United States Patent Application Publication US 2006/0134663 A1 - sequence listing, part 121

SEQ ID NO: 379128 - DNA, 590 bp, Homo Sapiens
  misc_feature (12)..(12): n is a, c, g, or t
  misc_feature (28)..(28): n is a, c, g, or t
  misc_feature (38)..(38): n is a, c, g, or t
  misc_feature (49)..(49): n is a, c, g, or t
  misc_feature (61)..(61): n is a, c, g, or t
  misc_feature (68)..(68): n is a, c, g, or t
  misc_feature (81)..(81): n is a, c, g, or t
  misc_feature (90)..(90): n is a, c, g, or t
  misc_feature (104)..(104): n is a, c, g, or t
  misc_feature (123)..(123): n is a, c, g, or t
  misc_feature (195)..(195): n is a, c, g, or t
cccgccagtaancccctgccccaggggnacattccctnccatttggggntccacccccccnagccccncggtgggtaatanggaccatanccctagtgaaaatnccccgcattccataatgtnaggaacaaagttccacagtaattgcccctcggaagacatttgccagcccctgcatttacaacctactcctgnctaatccgtggcaaggtcagaaaagcagcaggcctgtgaagtaagaaggaaaaaaaacccgtcccccctgccccataatgatttatgtagttgggcaattaggcaaaatacacaaatagtagttcgatattatattaatcaatttagcccatgggatataaagtcataaggaatgtcatctgctggggatgaaacacagtgctcggtgcagaatgtttactgtatgcttctacgcaacagactatatgtagtttccagcagaattatcgtgcttatttaacttggctctcccatgctcctgtgttgaattggtgttgagaaagcagattagacaatgttaaatgaaggaaagaaacttcaggaacaaactttcaaaaacatagactgtattattt

SEQ ID NO: 379129 - DNA, 414 bp, Homo Sapiens
ggaaaggcatttgacccaatgtaaccagctgaaaacgcatgtaagaactcatacaggtgagaagccatacaaatgtgaattgtgtgataaaggatttgctcagaaatgtcagctagtcttccatagtcgcatgcatcatggtgaagaaaaaccctataaatgtgatgtatgcaacttacagtttgcaacttctagcaatctcaagattcatgcaaggaagcatagtggagagaagccatatgtctgtgataggtgtggacagagatttgctcaagccagcacactgacctatcatgtccgtaggcattactgggagaaaagccttatgtatgtgatacctgtggggaaggcatttgctgttctcttagttctctttattcactcctttcttcggaaaacatacagttgttttgg

SEQ ID NO: 379130 - DNA, 446 bp, Homo Sapiens
  misc_feature (15)..(15): n is a, c, g, or t
  misc_feature (42)..(42): n is a, c, g, or t
  misc_feature (79)..(79): n is a, c, g, or t
  misc_feature (185)..(185): n is a, c, g, or t
ccaaaaaaatccgtncccccctggcctaagaaaaaggaatgnccttgttaaaaagcctaaaaatcccctaaaattctgncccatgtgggtccttggttggaaggaaaattgaaagcacccacatggctggggctaagattttgccatagatctttggggtctgtccagggtgggaaatgcaagcnaaccctaggattaaccctggaaggcctgcgaaaggagggtggggacagtccttggaaggcagctgcccttaaaactagcccagctctttctggatcgggcaggacccctgaagctgttcacagtccctgtggcatgtaggaaaccaaggtgtctcaggacaggaggagacaaggagtggctattgggaaatcagctctggcctccccatgagggctaataaggggcaaggacgataggtcctgtggcagggcggacagctc

SEQ ID NO: 379131 - DNA, 443 bp, Homo Sapiens
  misc_feature (40)..(40): n is a, c, g, or t
  misc_feature (57)..(57): n is a, c, g, or t
  misc_feature (426)..(426): n is a, c, g, or t
cagggttcaaggaaagaaaacagaaaaggcaggaaaaaanccaaaagaaatccaacnaatccaaaagcacccaggattgtgtgttgggcaggtgaatagcaaaggaaaaacagtcccaatgcagaactatagctcagagaaagtcagtctgcagggatgctgggcatgagtccactttaggtgcttcttagttctagtttctgtgtttttatcctttggatcagcagcatcttcctcattatgtttcagcagctccccggacacctaaggaggtggtctatcgtctggccaaaacttggggcctcctcccagcctgcctcccgccgctgctccagaagggtggctttatgctttgtaacaccagtggcttgaaatctttgagatcttgtagtgagctcatagtggtattcatcaccttgtagtccnatgcatctctgccacct

SEQ ID NO: 379132 - DNA, 553 bp, Homo Sapiens
  misc_feature (445)..(445): n is a, c, g, or t
  misc_feature (513)..(513): n is a, c, g, or t
  misc_feature (520)..(520): n is a, c, g, or t
taacttatctgggtgcccatctggtttaaattgctcattttacattaatttaacaataatagctgttggtggtcatgttttccccaggagaagaagttgacagacagctgtgcagagatgccatcttccccatccctgtggcctgtgatgccccgtgcccgaaagactgtgtgctcagcaatggtctacgtggtcctcctgctcacacacctgctcagggaaaacgacagaagggaaacagatacgagcacgatccattctggcctatgcgggtgaagaaggtgagtcgccagcttcagacgccatctaggttcgttttcaaaagttagtgtggcatctttttttgtgtagcctggggaaaagatgatattctatggaaagtcaacaacccagaaaattcagccatcccaggatttaatatcccgtttgatgtgttttgaggcanttttgatttctgttcccccaaaaattaattcttggaaaatgggtctctttaaccaaaggggggaaganttttttnaaagtggacccatttttggctttttccccaccc

SEQ ID NO: 379133 - DNA, 478 bp, Homo Sapiens
  misc_feature (414)..(414): n is a, c, g, or t
aaatttgagccatgggtaaggcctggtagaaagggaggaggttggggaggcgtgaataggcctttggaaagaggtgctgttaacccaaaacagagaggcagcagctttgcaattagattttctttttgaaatagcaggctctgtccctggtagcaatagggataaataaaaagtaatatgtattcattgggaaaataattggaaaaagaattaggcaaaataagcatgtggttttgtatcttgttttttaaaacagcttgttgtaatacattagatattctttgaaaaaaatagaatttgaagttcagaaaatcaaatcagttttagggattgagaatctcactacatattttgtctttcaaaattgtttgtttatttatttatttaggaaatggggtcttgctatgttgtccnggctgggagtgttagtgggtacaatccatacctcactgcagcctcaaactcgtgggctcaaggg

SEQ ID NO: 379134 - DNA, 483 bp, Homo Sapiens
  misc_feature (343)..(343): n is a, c, g, or t
  misc_feature (365)..(365): n is a, c, g, or t
  misc_feature (461)..(461): n is a, c, g, or t
gcaggggagctgcccctcccagcaacttcctgcccttgctgcctccagtctgtctcctgcccccaacccccacccctcacccctcgccctctgcgtattgttctggaggacagaagtctgtctggggctgcatgaggaccactgtccttcacgtcccgatgttgaaggacgacactgttcccggctttctgggtggtgccgtcagaaggcagcagccctgacaagggagttcccacagcctccctgtggagggagttggcctcctgagacccccatgtgcatctgagaaccatgggaggcaagccctcttgcagatctttcagccaggggtgttgtgtgggtngctccgagggctggaagttggngagggaacagacctcgcttgccccacagcaggctggttctgccccagcaaacacaggagagcttggccagagagggttgcagcaggggcccccagnagcatttttgggcagcaggttg

SEQ ID NO: 379135 - DNA, 628 bp, Homo Sapiens
  misc_feature (60)..(96): n is a, c, g, or t
  misc_feature (511)..(511): n is a, c, g, or t
  misc_feature (570)..(570): n is a, c, g, or t
aagatgatttcaaataatgcattaagttagcctgctgtgttaatttcataaagctattcnnnnnnnnnnnnnnnnnnnnnnnnnnnnnnnnnnnnncaaaataatggtagcatataatcacatgcaatgccaatgaatccccatattaagcttcgtacttctgtccaaatgtattgtagttgcctaatttcaaggttctaatttggaaatctgatttattttgtatgtttttatatacataccaattttaagcattatcttgcaaagtagacataggtggtgtttgatttgccataattaacttgaatttgattttgtaaccaaaatgtggctgtccacataattggagatcagtgtctttgggcttttaatggagaacaaatcacattgtgggtgttgctggtttttctgtttcacatttacttttgctctaggaagtatttccgtgagtctgatgactccataagttatggatccctcagtgttaaggtaacttaggacggttgggcanttacttttaatattccactttaaggcttctggtatccattttttctggtatttttcccntaggggaattttaattcggggtcttcccccaaattttacaggcttttaaaaaaatccc

SEQ ID NO: 379136 - DNA, 407 bp, Homo Sapiens
  misc_feature (353)..(353): n is a, c, g, or t
  misc_feature (360)..(360): n is a, c, g, or t
  misc_feature (368)..(368): n is a, c, g, or t
acctactgatggctgcactcctttctaaatagtaacacatgctccaatgcatgcttgagtttgtgcagtattcttgtttctgaaagtcaagttgtgacaattaatgctgtatctaaccaaatgatcacagcctccctcttccccatgggaactacaatcaagaagcatcttccaatttcatgtacactaaacctaggtgggccacaagcttcatttgggccatgaactcctttgaaaccctcataaaaactgtcctactatctcccgggtaaatcggcacattacacagagttttggccttttcagggacatatgggccttattaaggttttggactactaggtggaccaaantgttgangttttttncaaaatttacacggattgtttaggtggggataggttttt

SEQ ID NO: 379137 - DNA, 413 bp, Homo Sapiens
  misc_feature (18)..(18): n is a, c, g, or t
  misc_feature (31)..(31): n is a, c, g, or t
  misc_feature (40)..(40): n is a, c, g, or t
  misc_feature (45)..(45): n is a, c, g, or t
  misc_feature (55)..(55): n is a, c, g, or t
  misc_feature (66)..(66): n is a, c, g, or t
  misc_feature (78)..(78): n is a, c, g, or t
  misc_feature (107)..(107): n is a, c, g, or t
  misc_feature (137)..(137): n is a, c, g, or t
  misc_feature (383)..(383): n is a, c, g, or t
aagaatagtgtccttgtncttgttaaccccnacactggtnctccnaaactccccnggtcctcaaancagttccttccnacctcggccctccccaacgtgttgggaantatttgccgtgagcccacccacaccctggncctgtttccttacatttcctaatctgaatattgttgttgcctgttcagagattttggaactacatgagatctttgcagggagcgcactgtcaactataatgagataaaatggggtgccaggacaccagtgggttattgaaccaagatgtgatcttctagggagggcatgagggctcacagtgggtgacatattaccctctactctggaatattaacggcattaccaggtttgagtttcttttaaantatatggtatggcatggtacttttaatggg

SEQ ID NO: 379138 - DNA, 464 bp, Homo Sapiens
  misc_feature (20)..(20): n is a, c, g, or t
ctgaaagcccttccccacanaacactgcatctgtacggccttcctctccccgtgtggatgaatctggtgctttcggagcactgaagctaataactaaaggcttttcccacatacattaacacacgtgaggcttttctcccagtgtgaattctccgatgctgaataaggctggagctctgactaaatgctttcccacagtcactgcacttatagggcttctctccagtgtgaaccctgtggtgcttaatgaggttggagacccgactgaagggcttgccacaatcattacactcataaggcttctctccagtgtggaccctctggtgcttcctcaggtgtgcactctggctgaaggctttcccacactcgccacactcaaaaggcttctctcctgtgtgagtcctgtggtgtttgatgaggttctgacgttccctgaaggccttcccacactcactgcacacata

SEQ ID NO: 379139 - DNA, 478 bp, Homo Sapiens
  misc_feature (14)..(14): n is a, c, g, or t
  misc_feature (61)..(61): n is a, c, g, or t
  misc_feature (176)..(176): n is a, c, g, or t
  misc_feature (261)..(261): n is a, c, g, or t
  misc_feature (266)..(266): n is a, c, g, or t
  misc_feature (298)..(298): n is a, c, g, or t
  misc_feature (313)..(313): n is a, c, g, or t
  misc_feature (324)..(324): n is a, c, g, or t
gtgtgtggggacantgcccggcttgtccctagaataaccttcccaagttagggcatcaatnaggagcataaatctatgagccgatccagtattttcttaggacactttgggagaagttagagtctgaactggaaagcactactcccaccctgtcttaaccggcgagtgcccctcantagccacggccgcgcgagcaagtcagtggctacacagctcgtttcccctgggtcctctgtgtagttaactttgctggggaccctnatggnagaagggacagccaccagccagtgaaacttcnagtcagtgctcaggnaggcgtgggancctgcagggccacacacccctgaaccccacgcttacaggtcacaaaaccacggagtagccactctcaggtccaaagacactgcagtttttaccaaggcataaaagatgccacagaaaatttaacaggagcctcagcagcagttttcaaggggag

SEQ ID NO: 379140 - DNA, 537 bp, Homo Sapiens
  misc_feature (525)..(525): n is a, c, g, or t
ttcctggccaagaaggaagtgatattgaggctggagagctgaatcaccagaatggggaacccacggaggtagaagatggcactgtggatggtgcagacagggatgaaaaggacttcaggaatcctggccaggaagtcaggaaactagacctgccagtgctgttcccaaacagacttggttttgagttcaagaacgagattaaaaaagaaaatctaaaatgggatgattcagaggaagtagaaataaacaaggctttacagagaaagtccagaggagtttattggcactctgagctacaaaaaggcttggagagtgagccaacatcaagaaggcaatgtagaaattctccaggggagagtgaggagaaaaccccatcccagggagaagatgagtcaccagagtttttgtgccagggacaaagcctgttacacatatcctctgtggggaaaaactgctcttcaggagtgttgcactctccccacaagccagcgcttcaaacttggaaaaagtatcttcaatgttccncgaattttgggg

SEQ ID NO: 379141 - DNA, 343 bp, Homo Sapiens
aaaatacaggacttcttttttcctgttttacaaaactccagtgccctttcttatctactattttaatattcctttgctaaagtatattgcataatgtggagtcaactattttttacaatatgtacgtgttgatctgaaagttcctattgagttaaataatgaaaaataatttggtggaccatgaattttaaatttgttaaaaattgttttatttgtgtatgtgtataaaattaaattttgcaaattggtaaatttattcttcatttaaccttgttgctttgagtactcctaaagcttgtaataattctttggggagtaatataaaatatatcattcataagtg

SEQ ID NO: 379142 - DNA, 469 bp, Homo Sapiens
  misc_feature (80)..(266): n is a, c, g, or t
aaggctgaattagtagtattaaagtctcatcttattttttatgaaacaccactttaaagcttagtatactagattagagnnnnnnnnnnnnnnnnnnnnnnnnnnnnnnnnnnnnnnnnnnnnnnnnnnnnnnnnnnnnnnnnnnnnnnnnnnnnnnnnnnnnnnnnnnnnnnnnnnnnnnnnnnnnnnnnnnnnnnnnnnnnnnnnnnnnnnnnnnnnnnnnnnnnnnnnnnnnnnnnnnnnnnnnnnnnnnnnnnnnnnnnnnngactagagcattactgagaaccctggtgtctttatgtgtgtttataaaaatgaatgtgtgttactaaatatgttatttgattttcaaagctaattttctgcttttatagttatcgtggtaaatatacagtaaattcagtattctaattagtttttcatataatcaattaggcaaactaccaaagaaaataaaatgacttattc

SEQ ID NO: 379143 - DNA, 418 bp, Homo Sapiens
  misc_feature (237)..(237): n is a, c, g, or t
gcattggtctattatttttaccttgtcttttcccctaagagaatttgaagaaaatcttcaccaatattcctagtgttgagggtaattagggaaaatagtagttgagagatgtaagaatagattgagaagagtgagtaaaatgggtgaaatgacaagtgggaaccatgtagctgagatgtatttgtttagatgaaaagtctacactggttcttaatgtgaaaatcaaaccatgtatcntaccttaagaacaatgttgttgtttttaatttattgtagcgatttagtttttttcacgtaatatttctattttctttgcagattgtttttaatttaaattgtggaatttttacttctcaaaatgtattaagtactgtattttttgaaatcttatttttaaataaatattttttaaaaacgt

SEQ ID NO: 379144 - DNA, 461 bp, Homo Sapiens
  misc_feature (25)..(25): n is a, c, g, or t
  misc_feature (71)..(71): n is a, c, g, or t
  misc_feature (73)..(73): n is a, c, g, or t
  misc_feature (75)..(75): n is a, c, g, or t
  misc_feature (82)..(82): n is a, c, g, or t
  misc_feature (85)..(85): n is a, c, g, or t
  misc_feature (406)..(406): n is a, c, g, or t
  misc_feature (415)..(415): n is a, c, g, or t
  misc_feature (435)..(435): n is a, c, g, or t
  misc_feature (445)..(445): n is a, c, g, or t
gggcggcgttccctctcgccctaanaggtcggaggcgcacgtgcccggggccgctaccacgtgagcgcagncntngagggcncangcactggccgcggctcgtgtccgggcttcgggagctcctggttccttgctctattgggctgtggctgaggtgatccgcgctcagtgtggacgcacaagtaacttcgtaaaggttgcatggtggttggggctaacctagcagagcgatttgtaagcggaaggcacgttaggttccatcccaagaggtgtgggctttagcgaagcaaggaggaagggagtggacaaagtcaaatatatctaagggttcttgcagattccgtgcggggtttgctctgtggactaagcttttctttccccttcccataactagattaagcattanttcaacctnttctttgggcctgggaaggnagggagaagntgtacacaattgaagg

SEQ ID NO: 379145 - DNA, 385 bp, Homo Sapiens
  misc_feature (37)..(37): n is a, c, g, or t
  misc_feature (62)..(62): n is a, c, g, or t
  misc_feature (66)..(66): n is a, c, g, or t
  misc_feature (74)..(74): n is a, c, g, or t
  misc_feature (97)..(97): n is a, c, g, or t
  misc_feature (106)..(106): n is a, c, g, or t
  misc_feature (117)..(117): n is a, c, g, or t
  misc_feature (233)..(233): n is a, c, g, or t
  misc_feature (294)..(294): n is a, c, g, or t
cctgaaactaaaagggaatgttaaaagccccactttnctgtgaccagcagaccttatcctangggnccccaaancccaaatcccttgtaaacacaanttgtaaaanccccgtgagancctgtctcctttgccatcccgctgcaaggttataagtagagaaaacttaagttacaaatccagttttcctcaagatctgagacatgttaattgtctttgtttctccctctggtaanatcttcccaccacacatatttcctgccttagagagtttaaaaggtgataaaaaaatctaanacgtggcgtaccccgctcgggaccccttccacgctgtgaaagctttgtactgtcactctgcgttaataaagcctacagcttttttactctc

SEQ ID NO: 379146 - DNA, 488 bp, Homo Sapiens
agtcagcctgggttcaatgcccgttccataactcacggctgtgtgaccttggcgctctgactcagaatgtccaagctttgatttttttaattgaaaactgatggaaaatccacataaaaggtttagcacatggtaaacaatgcacaaaaattattcatgagattgctcaaatgttacaacactgagttcctgaaaacagcagtttgtatcagaaaacatacccaaatagtatttttaaaggtttgtattatctctacttgtaaagaaagacactgatttcatttttccttagtactttattttatgtaaaagaattctagcattgtacaggcatgtagattaatgagccaattgtgtatacttttgtgaattgaatagttagtataaaaaaaatttatgttactctttgaatagtgaaatttcacttcactattaaatccaagaaacatttttaaaaaacgtttgtcaataataaaatatttatggtc

SEQ ID NO: 379147 - DNA, 535 bp, Homo Sapiens
  misc_feature (419)..(419): n is a, c, g, or t
  misc_feature (444)..(444): n is a, c, g, or t
  misc_feature (450)..(450): n is a, c, g, or t
  misc_feature (486)..(486): n is a, c, g, or t
  misc_feature (502)..(502): n is a, c, g, or t
  misc_feature (512)..(512): n is a, c, g, or t
tctaatcctcccgcagcctagagacaggcaggcgggcgaggcagccgggcgccgacggtcctctgctgaaggagtggagaagaccgaccgacccgagtggttgatttatgcatgcgttttcgttaactaggactgaaagtggctcctggctcttctgggaaaatggagaacgtggttgttatcaatggataccaatgacttcctgaaatgctcaacttgtacaaacaaaaaatgaaaaactttctccccttaatgtagaaacacatggcattttaaaagtaggtttttcattattgtaaagatgttttaatttttagggattatgttttttgtggaaagattcgagggaaaaagagcgatgtttgagttttgggccggcggaccattatgggattttttactattagggctaggaaccntttaggtacttaccttcttaagggntgtttnccaatttaggtaaaaatgttttaaaggtttgaccanttttaaggtgaccccnggcagggttnttttttagtaaaagttccaaagg

SEQ ID NO: 379148 - DNA, 459 bp, Homo Sapiens
  misc_feature (11)..(11): n is a, c, g, or t
  misc_feature (26)..(26): n is a, c, g, or t
  misc_feature (43)..(43): n is a, c, g, or t
  misc_feature (86)..(86): n is a, c, g, or t
  misc_feature (140)..(156): n is a, c, g, or t
ccccccaaggnagccaatccccaccngaccttcacccaccccnctttgaaccccctttttaaaacctgtgtgtggaaggcaactgncaatatagaggatttggaaggttgtctgtttcctgttgtcctggggaaatgatnnnnnnnnnnnnnnnnngagagagagatgtgaaaaggaaaaagatggacccaggtgatttttccaatcttcaaaatttaaatttcttggttcttataaacataggaagagtcactgaaaggtggcaccaatggatattttgtaaaataacccacaactttagagctggaaaggacttgaagaaacaattaatccaacttcctcacttttttgtctcaggaaactgaagcccaattgggaaaacagcaacttacttaacatagtgattgtctccatggctatgtcctgtaaagattcacagaaaccccaatttccccttaa

SEQ ID NO: 379149 - DNA, 447 bp, Homo Sapiens
  misc_feature (20)..(20): n is a, c, g, or t
ggacaccctataaataccanattttttaatccccaagttccagtatcccccaaatccttttccattaaacttaacccctgccccaaatgcattccccataacatttttaatcaagtaatccacaggaaagaaccatacagattatgacatccgggcacatgatttcctctatcctaggttttaaatgaacaatggtaacatttattcctacaaaacatgatgaagaggctcctttcctcttacctttcctagaatctgtagtacagtctttcatatttcttattctctcccgaaatttctattgcagctcagttaccaacatcgctttataaagtgatgtaatgactggcacaatgaccaccatattcactgatttctgcctgcaacttatctcctaccatggtaacgcctggacagctactatacatatatatatttttaaaatag

SEQ ID NO: 379150 - DNA, 167 bp, Homo Sapiens
ttccagcagatatgtatgaagcacttaacactctgctgggcagttgaagatacagaagtgaaattgtatggatactgtctcctaacccagtagtatctgtgtggagacaggttacaaagacccaatgagatagtggtcttgcccccaaggagttcatggtcagtgtt

SEQ ID NO: 379151 - DNA, 501 bp, Homo Sapiens
  misc_feature (419)..(419): n is a, c, g, or t
  misc_feature (424)..(424): n is a, c, g, or t
  misc_feature (447)..(447): n is a, c, g, or t
  misc_feature (457)..(457): n is a, c, g, or t
aaacagtcactgatttgcctagattctgagagtctggcccatagccaaccacattttcctttgggataatttatttcctgtggcatctagccagaagaaattgaggatgtttcctttcacagctgctccaagcctgttgcccaattcacggtacaagggagcaccccttccctttcctctgaaggtacgccacccacctccgtcgcccacctcagcgcccagggagccttgggacttccttccatatgataaatcattcttcttcacgtcaatacacttcatattaatttctagtacagaaaatcttggacagctatcagaatgccttgggtcatagtgttgttggcaaaattggaccatacaggtgggcccatgtattaaaatctggaattttagggggttttgttccccacctgggntgctngggtttttacagggaggtttttnggggattccncattaggcaattcaaaactttaattactgggggttgcaggggtc

SEQ ID NO: 379152 - DNA, 573 bp, Homo Sapiens
  misc_feature (481)..(481): n is a, c, g, or t
  misc_feature (540)..(540): n is a, c, g, or t
  misc_feature (558)..(558): n is a, c, g, or t
ctggccaagcatgcctcctgtgccaggaaaatctgcagaggttagctgtaagagctttcagcacatagacctgaaagctggcaaaacccagtgagatgatgattgtgtctggtacaggtgtggaagggtcacagcccctacctgaagacactggcctgggtatggcccttccattcccattccatagggagaatttagtcacattaactagaggggtggagaaaagcaggtgtctcagccacaatacttctgtgcagcagaatggggatggattatggtggatgactgaaagtctctaccatgggcaggcaaagtcaacttgatgtccactcttagcctttttttgcttcctcctcccaactctgttttacctgtcctgctcttcagccagttgctagggaaatccagccaaagtggcccaaattcatgatttaggggttcttcagggttggcagccctgggagcctggggtttgaaggtntttgggggatggagacccttgagtttttaatctttgtaacccagttccacccagcattntctgttttggggtttggngtttagtttaggcac

SEQ ID NO: 379153 - DNA, 578 bp, Homo Sapiens
  misc_feature (475)..(475): n is a, c, g, or t
  misc_feature (495)..(495): n is a, c, g, or t
  misc_feature (509)..(509): n is a, c, g, or t
  misc_feature (518)..(518): n is a, c, g, or t
  misc_feature (533)..(533): n is a, c, g, or t
  misc_feature (551)..(551): n is a, c, g, or t
acatacgtactaataaacatggaattctagggtcttaagagtgttcaggggaacaggcttcgctaggctaagtgctcatgggcctccttttcacttgcggttctgcatttccttttacttatttttttcccaactctatcgaggtgtgattgacaaatgaaattgtaacaaaggtgtacaaagtgctgaattgatacatgtatgtattgtgacatgattaccacacaagttagtgaacacatctgtcacctcaccttgttgcttgtgtgtgtagtgagagcagttgagacctactgttagcacatttcaggtgtacagtattgttgactctagtcaccttgccgtccattaggagccccagaacttacctagttcaagtaggagaggttgggctctgccttttaacggagtcttaaccacttaggaggggcattttctggcattttcaggaacagaattggcatattaggccganggcttttcgtgttggcatcntgggggcagcactnctcacccgnactcctgggaacccncaggggccggggtttgcnttcagaggggcaggtgagacccaaaag

SEQ ID NO: 379154 - DNA, 546 bp, Homo Sapiens
  misc_feature (462)..(462): n is a, c, g, or t
  misc_feature (509)..(509): n is a, c, g, or t
  misc_feature (514)..(514): n is a, c, g, or t
  misc_feature (521)..(521): n is a, c, g, or t
ctggaatcccagcaagttgtgaaatggaaagactagtcggccagagagctgaggtctcacagtgtgcaaagaccagtcctcagtatctgcacccatccatttgagtttcaggtgaagcctaggatttgggagctcaatacaaagatgccagcatgaaggagggtgggtgccaactaggtttggatttagagacatcctccttttgggaaaggaaaaaatcctgattccacttaggtttccagggaagaaggcatccccatttcagaacagttttctaagccaccctcatggaggtttcacctgcagctttcagtctgctttgtctgatgtttgaggatgcaactgcccaaaaatggggtctaaagtaggcatcccgtcacgtttctgttaaaaagtaatactgcttttaaggtaacacttatgggaatgaattgaatgcatgaatggaatgagttcagtttnggatgaagtttgccccaaatagagtcctaaatataaggttttcatantccgntagtgtncatttccagggttccagggaaaatt

SEQ ID NO: 379155 - DNA, 523 bp, Homo Sapiens
attatctctgctatcgaaagcacaaggaggaggaattgcagctggccactagggggagcctcattcacggatcttatggaatcaagtttaggaggaccaagtgtcgccacgtctaggcttcctgggcactttgacaccatccaggcttcttgtgaggaggaggtatcaacagctgtgcccactgggaggctttcagatgcagcatccaccaaggaatacaccgactaacacacatgacagcctgaactagcaacctgcatcaacacccctgcagaaaagcagtgcatttcaactgctcatttaataagtatttgaattcataattacaaaacatcttctgtaattaaaccaccatatggcatttaaaatattttggggacaaagagtagcaaagaattatattggatattgactaaaaacacttatgaatatcaataatttgctcctcctcccttttcatcatagactctttacaatgatactgaccttggggttgatcacaaagtaggttttcaccaggtgc

SEQ ID NO: 379156 - DNA, 412 bp, Homo Sapiens
  misc_feature (331)..(331): n is a, c, g, or t
  misc_feature (371)..(371): n is a, c, g, or t
  misc_feature (392)..(392): n is a, c, g, or t
  misc_feature (401)..(401): n is a, c, g, or t
cactgtgaggtctgcaggaggagctgcgaggacacattcttcttgacttctcagcataggaatgtctcacgtccagtccacgtccctgtcctagtcctcctctctgctccttccacacttcctcacggtggtctcctgcacgctcgtggctgtcagtatcagacgagggcagcttctgcattttctcaattccaaccactcctctccacttacctacccagtatctctactgggtgtcttccagtcatcctggcacttcaacgcggactgacaatttactttccaaccggctttaacaatttccctgactttgttgatgggcaactttttnccttccagttgcttaagccaggataagttgggagtaattntttaaccattttggttaaaantaataaccnattccctaaag

SEQ ID NO: 379157 - DNA, 477 bp, Homo Sapiens
  misc_feature (447)..(447): n is a, c, g, or t
atttacatttctaagtagttgtatagtagaagcaggaagctcttattgcttatttggtcgtaatgaaaataatttgtaaaatgtcctttaaaagtttaatgatacttctgatgtttcggaacagtcatttcacctactatttctgaatatattttgcaaattgaattggaataggaattgataatagcagtcttaaacattagtagtgggatttggctatggtccagactgtgctccttatagagaatttgatctgctcagtgtgagcggtttgctgttagccaggggctatttatgggcaaacacatgcttttgtatcttgtcatagttatccacaaatgggcaaaactgggacttgattctactgggtatggcaaaacagggcatgctagttaaggcagttcagtcgtgggctcaggaacttaaccccataggctcaggggggantgcttttaggcaggaaaacaggggaaagga

SEQ ID NO: 379158 - DNA, 400 bp, Homo Sapiens
  misc_feature (18)..(18): n is a, c, g, or t
agaagcgagcaaaagttnctttactgtaaggtcacttgggaaaggtcaatagaaagcggctgttaaacatgatgttattctcagtgaaactgtatgcatccaagagaaggaactaactttaatgtttcacactgaagaaattgtgtgagagatacaagtacctttgtgactattgatttttaaagaacttttattgagaattcactgaacttattttaaattctctatgcaaagcttttctcactaggggtagtttcattattctacatctggcaggcacgactttcaatgaatcagaaaggaaataaagttaactatgccttgcgcctgggtaggatgaggaaaggcagcctcttcaagttcacccttttttcataggcgttttctgctcttggggatg

SEQ ID NO: 379159 - DNA, 569 bp, Homo Sapiens
  misc_feature (376)..(391): n is a, c, g, or t
gtgattacaacagattcctggatctcatgtcaaagattcctttgatgtgagaatctgaacatttatttatatctatagatttacaattttagtccattttgagagttatagtatctcttgttacatattgttacattgaattatagatctattcataggcaactttaaatgcccgtagcttttgagtttgagctgttacataggtagctgcatggctttttctgaacatccacaaagtaattactattcaaagtgcatactaataaatcaatgaagcctccacattatttgggaagtagtcaatcaaaggctaaattcaatgttatgataacttttaggcagtagttctttagacttctgtatttaattgaacagnnnnnnnnnnnnnnnnggggaggagattgatagggacatcattaataaaacaactactatctactatcactatcatttaacaaaaggacattttaacaccaggaaaagggggaggggtctcaggtgtagggggctctacccttttaagggttaaattaaatttaagggtttatttttgggccccttatggttgg

SEQ ID NO: 379160 - DNA, 460 bp, Homo Sapiens
  misc_feature (300)..(300): n is a, c, g, or t
  misc_feature (329)..(329): n is a, c, g, or t
  misc_feature (377)..(377): n is a, c, g, or t
  misc_feature (393)..(393): n is a, c, g, or t
cccaaacaggacaaaattaaattaaattaaatatatatgttaaaacaaagaaaaataacttcctttaggcaaccgcttgaaaaggcaacaaacccctcttagagaccccaggcaggcccccactcgggagcctgcaaggtttgcgcgaacaaccccaacactggcggactctgaaagacgtcgccctaggtcccccccccctggcgcccggtcttttgagatacactggagcaggaaaccttatctattgttacttttaggtcggctctccggaaacttgggtgagggagaaagccaagngcgctgcagccctgcaaccgaaccccganacccgaaccccggggaaggttccctgcactaccctgccctgcctaaancagacgcgcggcccgngtgcacccagcgcttggtctttgaaaacgcgcagtaggagggtgattcctattacgcgctccacact

SEQ ID NO: 379161 - DNA, 466 bp, Homo Sapiens
  misc_feature (437)..(437): n is a, c, g, or t
tgccccacacacattggctaaatgcgtgggaggtggtagggttggttccaggtcctctaattcaaaatctaatgccccaccccatgcttcagcatatcccagccctaattccatgtgcgggtggtgcccaaccaccctgctaccctcctcccaagtatcctacctacatccttccctgggcattccacaaggtctcccaactcagcctcctcttggttcacagtgggcataccatgtcggtgggaggacagtcgtaaggggacccagtgggcagaggtctatttaccattgggcattccaccctagttactttcaattcccgtttccccatcatcagtgccatatgctccaccccattcactgggagcagccaccagcaaatatgggaacctaggggaacaagagggatgtgggcagggttgaggggttctggggtnttcagggcatttaattgggaaaattgaac

SEQ ID NO: 379162 - DNA, 491 bp, Homo Sapiens
  misc_feature (364)..(364): n is a, c, g, or t
  misc_feature (445)..(445): n is a, c, g, or t
tattaagtaacagcataccacctcagtcttcaacataccgctcagctcaagagtctgcaccccatcttttacaacctcaatttagtttgttgccttcagcacttgggggatcccagcagactcctcaagcctacagttcaactctctttactagttctactgcttccattgaaagagctcttcttcgagaatgtagtgttattaaacaccatcagcggccttcaggtacccagtcaattcaggcacaactgactggttcacagcactccttacatagttatctatcaaattcaagtgtagttaattttcaggaaacaaccagggcagtcatctttatcctgtagcccaattggagattccactncaggtgaggcaacggaggattacaacagaaggacctcccagggtcttcagtgggaacttgcttcagtctttactcatctgncggtttccatcattcaggggtatacctccttataattacaagtatt

SEQ ID NO: 379163 - DNA, 394 bp, Homo Sapiens
  misc_feature (42)..(42): n is a, c, g, or t
  misc_feature (128)..(128): n is a, c, g, or t
ccctacagtccacaatgaagaaatgcccccacaaataatccnggaacgcaaatgtccaggatgaacatcctcagactttcccttgtgggaggtgaattttccctttgacgtaaactttttcctttttntccccaggaattttaacgatgactacaaagatatcactaaatattccccatgtttgtggtaaccagttggtgcttggaaattggcatgacatcaacaaaccaaacccaaaaaactatgtatggtattttgtttgttttgggaaaaatagcttttacttctatcaaccttataaaattcaccatgaaataattttgtcaagcaatttgaatggtttttaggcttaaaaaatatcataaggaatgcttaaaattaaaacttctatttg

SEQ ID NO: 379164 - DNA, 462 bp, Homo Sapiens
  misc_feature (123)..(149): n is a, c, g, or t
  misc_feature (288)..(288): n is a, c, g, or t
  misc_feature (357)..(357): n is a, c, g, or t
  misc_feature (452)..(452): n is a, c, g, or t
tgaagacagcatgcatccttccagcatcttccactcctttgaaatcagcatccctcatcttacttctccaggataaaaattaacatagctgttaccatatttgcaaaggccaaactttatttnnnnnnnnnnnnnnnnnnnnnnnnnnngtatttatgtataaaatatgtatggtgtgacaggtaggaattacgtattggaacaatgggaccatgggaccaaatatattaaatggggagcaactgcaggcaaatctggaggaggaatagtgtgcaggatacatacgcntaaaagctacaagctaatctcttagttatttgccccctacatgttaaaagtaaggtgattgggaaaggntttatctctaaaaattgggaatgctacctggaatattgtaaagtgggatccattacgggtacatatggggcacattattttcacctgtatggccngttggagatc

SEQ ID NO: 379165 - DNA, 552 bp, Homo Sapiens
  misc_feature (28)..(28): n is a, c, g, or t
  misc_feature (67)..(67): n is a, c, g, or t
  misc_feature (76)..(77): n is a, c, g, or t
  misc_feature (293)..(293): n is a, c, g, or t
  misc_feature (299)..(299): n is a, c, g, or t
  misc_feature (301)..(301): n is a, c, g, or t
  misc_feature (362)..(362): n is a, c, g, or t
  misc_feature (410)..(410): n is a, c, g, or t
  misc_feature (432)..(432): n is a, c, g, or t
  misc_feature (453)..(453): n is a, c, g, or t
  misc_feature (470)..(486): n is a, c, g, or t
  misc_feature (496)..(496): n is a, c, g, or t
  misc_feature (508)..(508): n is a, c, g, or t
  misc_feature (524)..(524): n is a, c, g, or t
aagactactcccggggcggctactgatngatgtcggtcacccacccgggcctgtgcggcgcgtggcngcgccactnncctggccctgctcgtgctctccgcagcagcccctgtgctggacatcaccacatggaccttccccatcatggcccttcccatcaatgcgtacatctcctacctcggcttccgcttctacgtggacgcagaccgcagagctcgcgagactgttcttctgcagcctgtggacctgccgctgctgctgctgctcatgctcacctgcaagcggccgagcgnaggcgngngacgaggggcccccttcccagctgagagcactggggacgcccaccgcccctttccctccgntgccaggggagcatgttgtggtaattctgggaacacaagaaggagaanttgttgggttttaggaacaagnttattaaacgatttcggtgtncagtgttcatttgacannnnnnnnnnnnnnnnnaaatatttanccaaaatggttncccaaataaggaatgnattagttcagtcagtgatttcaaaaagg

SEQ ID NO: 379166 - DNA, 458 bp, Homo Sapiens
  misc_feature (39)..(39): n is a, c, g, or t
  misc_feature (81)..(81): n is a, c, g, or t
  misc_feature (116)..(116): n is a, c, g, or t
gaacatccttcccctttgtgccatttaacaaactaaaanggtccaccggataacacatttcccacagtgacccctgccaanatcccacattggctttccttcctaagacacttcanaaaatacatccacacccttaatgtgttaaatatccactatgggccatatacctttaaaaacatttattttccttaattcctcaaaatacagaaaagaatgttatgcctattgtgtgcacaaactgctattttcaataaggagctcttaatttagaaagttgctatttttcaataaagagctctcaattagaaaatatcaagaagtgatgttaagtttttatggaaataaataaagtatcatgacatgaaaagtttataatttttcccccagcaatggcttactcagggaatttttcttatatgtaaagttaatgatctgaaaagtggtaatcttatcattca

SEQ ID NO: 379167 - DNA, 369 bp, Homo Sapiens
  misc_feature (315)..(315): n is a, c, g, or t
  misc_feature (337)..(337): n is a, c, g, or t
atgtagaacttgaactaacataatcttaaactcttgaatatgtgccttctagaatacatattacaagaaaactacagggtccacacggcaatcagaagaaaggagctgagatgaggttttggaaaaccctgacacctttaaaaagcagtttttgaaagacaaaatttagatttaatttacgtcttgagaaatactatatatacaatatatattttgtggggcttaattgaaacaacattattttaaaatcaaagggggatatatgtttgtgggatgggattttaccggaggctgctttaacagttgcttttgggntctcttagggtggattcccaantgttggaaggttgccatgttacctggccccaa

SEQ ID NO: 379168 - DNA, 474 bp, Homo Sapiens
  misc_feature (320)..(320): n is a, c, g, or t
  misc_feature (391)..(391): n is a, c, g, or t
  misc_feature (398)..(398): n is a, c, g, or t
  misc_feature (428)..(428): n is a, c, g, or t
  misc_feature (442)..(442): n is a, c, g, or t
  misc_feature (461)..(461): n is a, c, g, or t
tttagtaaagaccaaaatgttgtgtgtgaacctttgagggagccaataacttcgtaggagatccaattgtcctcccatgcaatcctcccaaaggcctcccacctttacacatttattggatgaatattgaattagaacacatcgaacaagatgaaagagtatacatgagccaaaagggagatctatacttcgcaaacgtgggaaggaaaagggacagtcgcaatgacttactgttgctttgctggcatttccaaggattaagggactattgtacaggaaaatgccaatggaaacttaacagttaacagttccaaattccnttcaaggcaaaggaaaaccccaaactgctgttggcctccccactgaggagtgggccagtggagtctttcanttacccntccttcaagggggggaatctttgctgcttngagtgttttttgcntggaggggttttgcccaanttccacaggtttg

SEQ ID NO: 379169 - DNA, 429 bp, Homo Sapiens
  misc_feature (13)..(13): n is a, c, g, or t
  misc_feature (59)..(59): n is a, c, g, or t
ccaccccactagnggcccagtaatgtaccccctaatcatggacaattaaaaaaatgtcnccccagacatcgcccccaacaatccccgcccgggaaaatccacccccccagtttagaacccactgaactagacaatgtgtatgaaaagtgttttaaattccccagagcaattgagaacagtcctcagcaaatcttttgccagctttgtccctcaggaaactgatagcccaatctgccttctggataattgagggactgtattaacaaatgtgaacatgaatgcaaacccttgttttttcttcatgtatcagttgtcatggcatcagatcaagctgctgtcaatcatttgttggtcattaagttaaataagtttcattcctgttgtacactgtacttttatagatctgttggtaatgttatagtcataaaa

SEQ ID NO: 379170 - DNA, 467 bp, Homo Sapiens
  misc_feature (32)..(32): n is a, c, g, or t
gcctatttaacagcaagccccagagttaacgnagagaaggctgtggaatcctactccttgaaaacgcactgtggccatccctgccgtgaccttgtgtgggaatggctgcccacaccccctcccccacaagccaagccatgctaaagcaagccctgcagagaccgcaggagtagggggtcaggatgtctggttttgtttcactggggggcccagtgcctcaagcttcactgaaacatgactgattgcctctaacggacaggaaagggctctggatttcaagggaaaggctgaggaggaaacagatgatggctggagcgggaagaattttgtgatgggagagtctctgcgcatgagacagttggaatctgaacctgcagaaatttgagtttagagttttgcagatagaaagcaccctatacattgcagggaataggaataatttctggattaaaaagtcttacctggtt

SEQ ID NO: 379171 - DNA, 605 bp, Homo Sapiens
  misc_feature (119)..(119): n is a, c, g, or t
  misc_feature (214)..(214): n is a, c, g, or t
  misc_feature (534)..(534): n is a, c, g, or t
  misc_feature (553)..(553): n is a, c, g, or t
  misc_feature (566)..(566): n is a, c, g, or t
  misc_feature (595)..(595): n is a, c, g, or t
tgacaggggcctggatgagacaagagacttgtcttgcctttgcagacagtgaatgtcagcttgaggagaagaaaagggggacttcaatgataattactggggtgtgttggtttgttggncctcattgtgaatgcctgaaaacaacttaggggtattttgaggagttcaaattcctctcttcacaggttggggacttgaagtcaatttctatagntcacaggcaggtgagtttatagtcaaaatcatgttccatatacaattcactcattcctgctactcactcttctatctccctgggctttgcttccttactcagatgtcaaggatttctatcatgtagctttttgatgctgctttacttcttcctgtctcttgctatcactatctggaaccttatgggcacccataaggttcctgggacataaggtgtctctggggacaaggggataatgctgaggaaatgggagacaaggactcaggggagtagtccctaaagcacaacagttctgagagcgtcccaccttgatggagcgncacttgttcacaggctccnaaggtcttaccgnaccagagcaacctaccatgcaatggcatnattgttagtt

SEQ ID NO: 379172 - DNA, 454 bp, Homo Sapiens
cccggaaaataaaggcaacaccatgaaggattccctttgataatgcactgaaaggcactggacaaacatggaatgaggtcttacggtgggtgtacatggctcatctctcattcagcttgcactgaaattcaacattttgagactctttgagatatgaattagctagagaaaacccacccagaaccataacctcataattttacccttaaagtagacataaaattttaaacctgtgagaatctttagtcttattcatcaaagatgactaccactaaggaaataggaaatatagattaacaaccaagctctcaggaatagctgatcataacatactagatgttttctcaaaagcgtgtgactaaatctaggtacaaatattaaggcacttaacaactaggaagtatttctattactttatgggctcttagtaggataggaaaccaggacaggtggg

SEQ ID NO: 379173 - DNA, 362 bp, Homo Sapiens
aaactctttctcctctccccacacacaaaaggaaaaggcccatgtgaagcaaaagagtgggaaagcggcccatctgccaacccaaaggagagagcccctcacccagaaactaaagttgcttgcacccgatcttggacttctgaattgtgagaaaataaatgcctgttgttgggccaccaaatccgtggtattttgttatggcagcccaaaagcagactgatgttcatgtatcaggagacttaacatttttcagatggcaatacccccaaaattgatctacagagtctatgcaatctctatcaggaaagcagctggcttctttgtagaaattcacaggctgattttaaagttcatgtggaatc

SEQ ID NO: 379174 - DNA, 385 bp, Homo Sapiens
  misc_feature (357)..(357): n is a, c, g, or t
ttgttaatcctctgagaatatatggatatgtgtgtgccacaaaaattatgaaactgaggaaaatacttgaaaaggtggaggctgcatcaggatttacctctgaagaaaaagatcctgaggaattcttgaatattctgtttcatcatattttaagggtagaacctttgctaaaaataagatcagcaggtcaaaaggtacaagattgttacttctatcaaatttttatggaaaaaaatgagaaagttggcgttcccacaattcagcagttgttagaatggtcttttatcaacagtaacctgaaatttgcagaggcaccatacatgtctgattattcaggatgcctcgatttgggaaagncttttaaactattttaaaaaaatttttt

SEQ ID NO: 379175 - DNA, 473 bp, Homo Sapiens
  misc_feature (430)..(430): n is a, c, g, or t
ataaacccatcataagttgaaaatattgtatgtctgttgaaaatgcgtgtaagacacctaacttactgaacattatagcctagcctagtctaacttaagcttgctcggaacacttaacgttaacctacagttgggcaaaatcatctaatacagagcctattctgtaacagagtgttgaatatctcatgtaagagtattttactgcatatcaccagtctgggaaaagcatcagaattcgaagtatggtttctcctgaatgcatatcgccacaccattgtaaagttgaaaaatcataatttccccaacttacaatttttgtccattgtccatctgtacaatgggaccttactggcatgagtaaggtaaggcagagtccactgtcctgggggcttaataagggtatgggggattaggaaatgttaagactctnttcccttccctcttttttttggccaaggggatttaagggggtt

SEQ ID NO: 379176 - DNA, 459 bp, Homo Sapiens
attaggcccacaagtacctaatgataattcaggtcctgaccagtatacactatcacaaaattttggtttttcttttattcctgagggtggcatgaatccaccaataaatgctaatgcttctttcattccacaggttactcagcctagtgccactcgaactccagccctcatcccggtagatccgcaaaatactctgccctccttctatcctccatactctcctgctcatcctacactgtccaatgatatttcaatcccctattttcctaatcagatgttctcaaatcctaggcacagagaaggtaaacagtgggaagtttaaataaccgatttgggatcaattttatctcctcccaggacctgttggggtttggttcaaccaagttttcctcttcttcccagatatggccaccaatggcacaggaccaactctcacttattccatttttaatatggaca

SEQ ID NO: 379177 - DNA, 407 bp, Homo Sapiens
aaggacgtgtggccttccttgggagcatgtggcccaagtcccaaccgctgattttcccccagctgttgccccaataaaccctggtccgccttcagggcagccctcgttcagattgtggctcctacccacttgcctgtgtgatccttggataaaccactttatttcctcattgcctcaatttccttctgaggcatagggaaggggaggtcataatatcacctcacagggtccttaaagtaaatattttcagaaacaataggttaggtgccttagaaattcattcagaggcttagaaatccacattaacacagttcttacatgcttgagtctggtctacatccatttacgtaagtaaaactccccttccagactgacgaaattctttttgtgacaagaagacaaaggaa

SEQ ID NO: 379178 - DNA, 188 bp, Homo Sapiens
  misc_feature (11)..(11): n is a, c, g, or t
  misc_feature (35)..(35): n is a, c, g, or t
  misc_feature (58)..(58): n is a, c, g, or t
  misc_feature (103)..(103): n is a, c, g, or t
cccaactctcnacagctatttttccaacaatgtgnactgttccacatctttccatgtnaaatgggaaacaacagagagctttacccacaattcctaacattgnataagatttctctcccagtgtgagttctttaatgacatggaaagggactgtaagaattgaagaactggcctgggcgtgaatgtca

SEQ ID NO: 379179 - DNA, 196 bp, Homo Sapiens
gaagcactttaagatttgagatccactgctttaagtgataccatctgacatcagtttatctgcctgtgtgaaataaagtcttttactgcacaggtgtctacaacaggggccaccatcatcgctaccgtcaacgtggttggatgtctgaaagaagaagctgagtatcaatgttgactctcactcatgtcatcttatt

SEQ ID NO: 379180 - DNA, 422 bp, Homo Sapiens
  misc_feature (383)..(383): n is a, c, g, or t
  misc_feature (390)..(390): n is a, c, g, or t
taagttactggttgtaattggttataggaatagggtgccagtttcattgagactgcaatgataacggtgagaagaaaaatgaatacagtcctctctctcttaatgtttagagggaagacatggtcatgggaagggctttttaggatatggaaaacctaaatgtatctgtagctcagaggaagaggatctggtaaggaggagaagttgatgataaaagattagttatagaagcaatacatgaaagtataaataatgagttagggtatgagaatggaggggaaggctgtctagggttgttgggtataatttatgtctaattgtgccctgagttagggtacttttaagaaaaggggtaaaagtttgggcatgcttgctcctggggngaaaacngccagaggaaatgccccttttagggccaaagc

SEQ ID NO: 379181 - DNA, 497 bp, Homo Sapiens
gatagatacaaaaaagcacggctacagtggcattatcatcatgcaatcctctgaaggtttcaaaaaacatttttccaaatgtactattagaaataaatacctttttactaaaacaactttaatcttttgaaagcattttcactaatacttatctcacttcagcctcacaacatcgtgttaagaaaggcaagcatcattgccattttccagataaggaatttaaaattaaagagattaaagtcacacaagaaaatgaaacatgggagtcaatattaggaatcaaggtcatgttactccagtcccttggctcattcctcacgtgactcacatgcagtagtagcctttgaaatttttgcaagcacctgtcctaggaatcatccattcttacttcaataggtatccccatgagggcaggaccttttcaaatatccctacattattgccttcttgttttcaccagaggttttggggttttccacctttctcacacagcctcc

SEQ ID NO: 379182 - DNA, 459 bp, Homo Sapiens
aaattttactgttgtgatgtacccaaatccctaacctaatgtaattttaaattccagccgtttaaatccatgtctcctccatttaaagacttttaaatacaaatgtccatttttaaaagaaacaaaccccaaaactattgtttgtgtttcctgtgtttccatattccagtgatttaatacagtatcatggctgaggtggatggggcaggtgcatgatactcttcagagctatttgtgaaattttaaagacagaagtgtctcagtgacaagttggatgacactactcccaactttttaaatttggagaaaaccatcaaggtcgaggaagccctgggtatggccattaccatctgattagaagatgaacaggtattttgaatctgatctgacatggaacagtttacctcattgtaggtagggaacaagagaacccatctattaaaattgccttagatctgg

SEQ ID NO: 379183 - DNA, 561 bp, Homo Sapiens
  misc_feature (419)..(419): n is a, c, g, or t
  misc_feature (459)..(459): n is a, c, g, or t
  misc_feature (469)..(483): n is a, c, g, or t
  misc_feature (512)..(512): n is a, c, g, or t
  misc_feature (532)..(532): n is a, c, g, or t
  misc_feature (538)..(538): n is a, c, g, or t
atttctaagtagttgagttgttgtgatgagggtacgactgctaatggtcggcaggttttgttttcattggtgaatctggtgtcatcatattccggtcatatgttgaaatattctttgtttaggtctggaagtagaggatctcactctgcacgtccacattgtgttgtttttaaaatgatgtctctgggagtatggatttctagaatttcaaatctgagtgaaggtccgggcatgtgtgggcctcatcacctgggccttgacagtgaactttgtgggctgtgtttcagatttcaaagatttgccccatagctgggggaaggagttgtgcatttttgctaatagtcggtgtcagggaatgtaggatgctcgagctggggaaagttaggagaggggaaggaccatttatatataaaataatnggatagtttgaatatttaggatccaggttaatttggggcntgatgaaagnnnnnnnnnnnnnnnaaagccagttgtgcccctccggggaaggnagtcttttccccaggttccncttganagggggttcctttaaggcccagg

SEQ ID NO: 379184 - DNA, 471 bp, Homo Sapiens
  misc_feature (344)..(344): n is a, c, g, or t
  misc_feature (393)..(393): n is a, c, g, or t
  misc_feature (459)..(459): n is a, c, g, or t
acacaactgtaggaggtggctggagaccacggtttggaggtctcacccaatcaggggaaaggggatgagcaaccaattaaaggaggagtctggctgtgttttggtagagcaactgtactgtgttggggggatttgttcagcccccaattggcttgggctctccaaggcccacaggctgcactggctgagatgcccaaacagcaaagatggtgacccactctgcctcctgggcacccccatcccagggagaaattagaactctgttggccttagaacatgggcatgggtggcaggaagccctgggctggggagtacctgcccagcaaggaaaaatggattggggntcccattttaaagaaacagttattgccattgccttcgacaaaacagccntttccatgcttgggggaaccaccttttttcccagttcagtttggattctttaagttgggattggtntaagttaacaaa

SEQ ID NO: 379185 - DNA, 434 bp, Homo Sapiens
gagtgccctttgaagatccattccatctctcccccgcaaagtgtccaaagccaattggcacagtgttaaagaggctggggtgtggagcccagacttggactcaggctctggttctgccattatcagatgtctgaatctcaaagtctacagacataccatagagataatagcaatacttacctccacagggttatcgaggagaataaatgagataatgcatgcagaacctctcacacagctaagaatttaatatgttagactattattaattatgaaaacacataaagaattctgcatataatttcagaggtctatgatttctaggggatccttagcctggttccggatggtcagtaagacaactttcttcaatgcctacattttccctctgaattccatctgtgtttactaagcatctgctgtgtcctgggcag

SEQ ID NO: 379186 - DNA, 502 bp, Homo Sapiens
  misc_feature (401)..(401): n is a, c, g, or t
  misc_feature (412)..(412): n is a, c, g, or t
  misc_feature (419)..(419): n is a, c, g, or t
  misc_feature (474)..(474): n is a, c, g, or t
tgtaactcagtaagaaaccagctggagcagcaaagggagtgtcatccctcccccaactctggcaacacagctcacaattctgggagaattcctccagcttgaggaaaagagagagaagagtaaagagaactttgtcttgcaacttcggtaacagctcagccgtagtacaataaagcacaaatctaatccataaagaccccaatactaggacatagctcccagatgacatttctagactcaccctggggccagaagggaacctgcggccctggaaatgaaagacctagggcgtgggcaggatttcagtacctctggactaaagagcccttgagcatttgaatatacagcagccatagccagacactagttcaccaaaggcctttgggcagggaccccgtaantgttgcttagncttaagntgttgacccaggaggagttcccagcattggtagtttacaggagggtttttttganaaccctttttccattttaagggagttta

SEQ ID NO: 379187 - DNA, 402 bp, Homo Sapiens
  misc_feature (22)..(22): n is a, c, g, or t
  misc_feature (56)..(65): n is a, c, g, or t
  misc_feature (77)..(77): n is a, c, g, or t
cctaagaaacccaaggtgtgantttttttccaacaacatgtcctgtccattaattnnnnnnnnnnttcctgggatgnaaaactgcctatgaataaagttgccagtgttgaagtggggtttttgagatcagcatgagagcagaaatgcaggcttctcttggaactagttcctgatgtgacgattgaaagaacgtaggcaagggtttttccagcatcaagtgttatttttgtagaaagaatttggaaagaggagaaggcaaagggatgtggaaaaggtacttacagtagtttctcaaaacagttttcttttaggacctatgaaaaagttaccaaagtaaaaatgacaagtttgaatgaaaaacaagttttctttttataaaaattacatatttttttaaaatac

SEQ ID NO: 379188 - DNA, 1254 bp, Homo Sapiens
  misc_feature (23)..(23): n is a, c, g, or t
  misc_feature (33)..(33): n is a, c, g, or t
cccctaaacctagagggccccanttaccatacntatacccctacatcccctacgattatcccccctaaaacagtgaacctgggtccccacagaacatagtttggggtcctacctacattccttatccatttggatagcctgaggaaacaaaggatcctgagaattaaatagactcagcctagaaaacggcagacatgggatactaaagccctaggactccctggctcatagagatagctctaatgccctttctgatatatcacagactgtgatactaaagcacccttaacatgatgttaacaagttctactacaaaaataagtcagcaagtttcacattttaatttcattttaaaggaagttcattttgttctttttcaatcataactgtaaaattaatcaaaaacagagtcaatgagaaaatattatcttttaggcaactcttcaagactataagcccagttcacttactcctacactctcctttccctcccctcactctctattaaatataaagtagctgatttctttatgtctttatagtatcattggcttcacaggtgtgtgctggggtgggggaggagaagttaattctatccatcaatcaacaacattttcagtgtctaccacaaagcgttctgctataatattttactcacattgtggttccaagtgtttttctttttaaagtgaggatactataatagtgccttgggccatatggtacttacacaaattccaagcagtcaaattacaatataattccattattatttttaggtttctataagcttactaacagaggccattttctgattctggttgcaccaaaaggtatggccctagaaaaaaaatcatgcaaagaattttatctttaaaaattagttattccaaatttttgatccatccatggcactgatatttctagctaactgctatgcattttaagcaacttacacagttcttccagagaaaaaggagtgaatgatcatatagtctttaaaaagaaagcctatgagctaagaaatagaatagcctgttctgaaaaaggaaaaagtagaaaatgttagtgaaaacagggtttaaacccttaggaaattcatttctgtataggatatcattttgttcatcaccaagaaaaggtagtcaatattaattaaatcttacacaggcaagataaccagttaagtagatgagaagaaaattgcaaggtgagtaaggcaaaaaaaacatttctagaaaggaactattcttg

SEQ ID NO: 379189 - DNA, 390 bp, Homo Sapiens
cccactcttgtccacgaggacaattttaagagcataaaatgagaccctatggagacgtaatagagaaaaggaaccttccagggatgtctgggcccctagatggaaacagatccttggtcccaacattttgaacagccctatgagaatggtaaacagcggtgctctcccattgctgtgagatttttagtcagatacttatttcttgccttgctgacagaggactgtcatgcctgggtcatctcaaccagccccagttttccatggtaaaaatcagggcatgctgtcattgaataattgcagcttgcctactgaaatgcagatgtgcagtcaatggagaggattcaatttctgggggggcaaagagagaaaagacagagggagtcaaagtag

SEQ ID NO: 379190 - DNA, 467 bp, Homo Sapiens
  misc_feature (400)..(400): n is a, c, g, or t
  misc_feature (451)..(451): n is a, c, g, or t
ctggtcgtgctggaatagatactattggggagagtatcctcatattgcaagaaaaagacaaacaacaggtattggagttaataactaaaccattggaaaactgttacagccatcttgttcaggaattcaccaagggaatccaaacattatttctctctttgattggtttgaagattgcaacgaatcttgatgacatctatcatttcatgaatggtacattttttggtgttcagcaaaaggttttattgaaagaaaaaagtctctggggaaataactgttgaatcacttaggatacctgacaggaaaaagggactcctacaaaaagacactatttataagtctgaagaagaggtccaatataattttcatattacaaagttggggacgtggcttccatttnaaggggaactattaggatttaggcttatttgtggacatttctgttacaggngacttggaaggaaagg

SEQ ID NO: 379191 - DNA, 431 bp, Homo Sapiens
aagtttacctcaggaaaagtgcttgtcaatctgcgggggaaacgtcccttgctgtgcttagtttttgttcttatgctgccctctaatggataccaaattatttcattaaacccagaacaaaagtaaattttcagcttctcagggctcctgcatcatcccattactgttggaaattgttatctgaccattttcccctttgcatacatgttggtgtagcacagctcgtactaattgtgcggagtcaccctgggccaaagttgcattcctgttctgggaagtagagggacagcgatgccaatttgtgcactgtcgaactttccttttttctctgccagcaattgggaaagaattgatgttctgggggacttaaaaatgagggaataaaaacagtgttaagtgctgtatttaaggacgatatgctgtatggtttt

SEQ ID NO: 379192 - DNA, 512 bp, Homo Sapiens
  misc_feature (14)..(14): n is a, c, g, or t
  misc_feature (26)..(26): n is a, c, g, or t
  misc_feature (63)..(63): n is a, c, g, or t
  misc_feature (102)..(102): n is a, c, g, or t
tcaaaaccaagggngccttaactccncccattttgaaaaaattaaaaaatgatgtgaattacnaattggcccttaccttagggttccattcgggaaacccanacactcttcctaagtataccaaccagcaagacatttaataacagggaattggaggcttaggtaacctttccagagggctggggagtgaagggcagagtctgtcaatgatctctgctgcttgtacaccaaagaggtctttctcaggagaatgccctggaagttgctggaaaagggctgtatctgctgtctgcagatgcccacatatctgtataaggctaccaacagcaaatgaatggcatctcctcttctacctttggaattgcctatgagtgcttctcattggcagtctaacctggagccatgggatattgcaagatgtatttctgaagcttctcagggaaaaatgtagaatggggtggggtaggatgaggaggaattgacaacgaagtctgtggcagaaaaaaacattt

SEQ ID NO: 379193 - DNA, 411 bp, Homo Sapiens
tttggggccgtccgcctatttccacatgaaagtgaatgtccaaatccacatgttgggaagcccaaatttgaaatgtccacttgggttacactgacattgtttttaacctgtaagggcccaaatcttttaatacaaatgaaaatattgggaattgaatcaagcaagctgaatttcaaagcattctttcaaagactacataattggcttgtaccttaaatgatgagcctcccaggccttttggtccatgtgcttactcctatctatcacatttccatggtcaggaatattctgtaggttagggactcaaacaaatggacattcttcatacagagcctcaaggaataccctaggagcacaagctacttctatggctagaagaccacatttcacagacatgtggggcttggctca

SEQ ID NO: 379194 - DNA, 422 bp, Homo Sapiens
  misc_feature (57)..(57): n is a, c, g, or t
tgtgcccaaataccctcccagcagttaaccagaaacagtccccaactagaaatacangaactcgagacagtaagttcacggctcaagtggacatatacccagatcgcaaacccttacaaataggaatttctacatcctcccaatccctcctgtgtttttctcaaggccacctaccggaaagatcctcttcaagagaaaccaggtcataaggcttgttcacttctcagctgcaaccatgcaatggatcttgaaatcacacagagggagaaccagagcctcacaatggcctccagggtgtccaccatctgctgagcttacacctccacacgttctgccaccctcacctctcaggcccctccagctgaacccctttttcactctgtcccaaccagaatgggtcatcgccacctctgtgtctttga

SEQ ID NO: 379195 - DNA, 446 bp, Homo Sapiens
  misc_feature (391)..(391): n is a, c, g, or t
  misc_feature (423)..(423): n is a, c, g, or t
  misc_feature (428)..(428): n is a, c, g, or t
agtgggagctctatgtctcctgtgcagccagacaccctggacgaggcccttcccacctccccctttcctcacggcttcttcagcaccacatgtcgattgcctgtgggtcagtccatctgtccatgggcaggggccctgtgagagaccccatgcgcgtgggatgtggtagatgctgattatggggccagccacccatacaggtctatcaggtcgcaatggaggccccactggagcgggaggcaggctggcctgggacttctgttggatgatgggggccaggggatggtaggaggggcaggagagcaggtctgcatctgtctcagccccagggagctcctgggttttggggccagttttaaggagtttcattccctgagcctgggccgagttntaaagggggttccccggatattccaatgcttnagacntagatttttttaaagctt

SEQ ID NO: 379196 - DNA, 413 bp, Homo Sapiens
  misc_feature (29)..(29): n is a, c, g, or t
  misc_feature (48)..(48): n is a, c, g, or t
gggcctaacctccatgggaattaaggatnggattaaaatgaagataanggccatggaaaagtacctcagtagagtttccaggtacataataataaatcctgtaatatatattatttataactggatatttaaaccataattctagaatactgatcagaactacatatagaaataatgttagtctaggaattgaatgaacttaattcaagttctttactccaaatttgattgcttagacattataatgctcacgacagtgacctatatatagtatgtacccaacaaatatttgctggatatatgcataaacaaacaaataaatgaccgatttaaactttctgggtccttagtttcccttgtataaaatggaattagaatgaccctaccataattccatccctgggatattggta

SEQ ID NO: 379197 - DNA, 470 bp, Homo Sapiens
agatcttctacatgcttgctgattgtgaaatttttgtccaataattctatcaattgctgagataaggctgttaaaacccacaactataatttattattttttagttctataatttttctcttcatgttgtttaagactttgttatttggtgcatatatatttggaattgttatgtttactggtgaattgatccatttattattagtgttgcagtctcctcactccttaatttagtgaggtccaagatcttgtcccacaaccaagagaataaggcacacaaataccagagagtgagtaaggcaaattaacattcattaaggcaacagaaaaggctcttcaggcaggcaaggagtgggaccccaaacaaggggttggccaggaaatggggggctggagtttctggatcccttttatggtggacaggaaacagggaagtccctttgtggggtcccgccttatgggagggggtt

SEQ ID NO: 379198 - DNA, 505 bp, Homo Sapiens
  misc_feature (140)..(140): n is a, c, g, or t
  misc_feature (489)..(489): n is a, c, g, or t
aagtaaaacccttcccttccctccctacgtgggggtacccccgaaccttcggaccctcctgaagaatctccgtccctcgggcccggcttccctcaagaagcatccaaaaattcctccctccgggacccaaagtccttcanggacccaggaaaacccatccccttccctctggggggagcacggcccctcatgccctcggcggggctccctccttcctgaaactgtaaagagaaaacagcagaatgtcccatcctcagagaacaccttgcccactcctaagttcatgtttcaaagaagcatatgatatgagaaagcatgatacaatgttaattgggaggaaaacaaaataaaactatatatttttgaaaggatacattatataatcctattaatactatcagaggcaaaaacagaccagaaggaaacacaccagagtgtggagttactttaagcttcttttaggcttttaggtatatacaagtattactntcatttcattcatttc

SEQ ID NO: 379199 - DNA, 492 bp, Homo Sapiens
  misc_feature (432)..(432): n is a, c, g, or t
cttaatacaaaggaaaaataataaagattttataagtagttaacattgattttattatctttactgttgttctcttatacttaataggaatttggcttttctggggattacctgctatagtacatatgaaacatcagtaacatccctaaggcggtttgctttgcagccgagccaaaatgctaaagtaagaagaatctttgggctttaccaacatgccttggggtggagggagtggggattttttttccctttaattcagatttttctaatcttagtgatagctgatttgtgcttgctaggcatatagggctttgccatttcaaaggaacatatttttcaggaacaattaattcgtgtttccaatactccatttaacttctggcggcccaagttccatggacaccaggcagcttttggaggtgttggactccntcccacatccctgggtgaggctggactagtggaacgagtgggccagtgttctttcccctt

SEQ ID NO: 379200 - DNA, 487 bp, Homo Sapiens
  misc_feature (457)..(457): n is a, c, g, or t
ctcgtcggctgtcacagtatcctaatgaaaatcttcacagtgctgttactaaagcctgcctttccaggtttttacccagtcttgctaggtcagcattagaaaaaatctggcagatgctacaatagaaataaatactgatgacaatttggagccagaactgaaggattacaaatgtgaagtaacatctggaactctgaggattggtgctgttagtgcaccgatctataatgcacatgagaaaatgaaagtgcctgatgttcttttctatgacaacattcagcatgtgatagtgatggaagatatgctgaaagactttctccttggagaacacttattattggttgggcaaccaggggtgtaggaaaaaacaagattgttgacagattccttcacctgctcaacagaccccgagaaatattatttcagcctacacaggggattaccacagttaccaaantcttaacgtttcagcctttcggtttaaaga

SEQ ID NO: 379201 - DNA, 417 bp, Homo Sapiens
  misc_feature (396)..(396): n is a, c, g, or t
gtagagttagtgtcaatgtgcttagaatataccaaattcataaacattttctctaaaaaagtattaagcttaaaaagttaattcagtttaaggaatataaaccaaattattttatatttgaatctcaacataagaagtcaaaatgtaatgctgccagataacaatatcaaaggtatttttctttctctataatttcatcagtatgtcctctcccttttctcctatttgtcaaattttaggcaaccctaactctggctaattataagctagggcaaggtaatcttgggacaagttatttggacctctgcactggcaccaggctttgttatctggtaaaatggatggataatacccaacacctttcttcttgggggtactggaggatggggaggaacntggatatgtggtaaagttgcc

SEQ ID NO: 379202 - DNA, 114 bp, Homo Sapiens
ggagttccttttctgttttaatttttaatttcattttcttaatttacctaatgaaccaatccctatgattacagtgagaaaagaaaacttggctctcactgaatcttctaaaaa

SEQ ID NO: 379203 - DNA, 551 bp, Homo Sapiens
  misc_feature (20)..(20): n is a, c, g, or t
  misc_feature (44)..(44): n is a, c, g, or t
  misc_feature (52)..(52): n is a, c, g, or t
  misc_feature (75)..(75): n is a, c, g, or t
gaagaactgaagcaggaccnggaacaaactccagagaaaccccnagtgaggnaaacacaagaagagaccccctgnggcaagtaaaaagaagaagtcctgccctatcaatgtggggatgcctgaagggaggccaacgcattgactatgtgctacaggagaagcctattgaaagttttaaatgagtatttatttgctttacaaagccatctatgctactgggagtctgaagatacagtattgctcgtcctcaaagagatctaccaaacccagggtatcttccttgatcagcctttacagtaaaaatgacccatctatggctgcttaatacggcacattgagggatccttccccagaaaatccacctgtttgttgctgcaattttcctctcctcagctgcgtcatttcctgcatgttgcctgccacttactcaccactggggtctttggaagataatcttcctctttggaaatgaatggaaaagcaaaaggccctattacttttaaccactggcttcatataaacacttgccatttttttctgcataaaaaaaa

SEQ ID NO: 379204 - DNA, 480 bp, Homo Sapiens
  misc_feature (32)..(32): n is a, c, g, or t
  misc_feature (40)..(40): n is a, c, g, or t
tgcgaaacactgaaaccccctggctgccaaantcccaaanctcctctggggccttgggtcaagtgtggtgttgtttatgtcccagcaacactttccgttggtctactggaggaaagttcctgtacaggcagatgacttccttcacccaaggacctgtgactctctccctgagggctttctctgacatcatctgcacatggacagcttagactgaaagtttcaggggttcgatgccttccagaggcacctctctaacaataagagcccagattgagtggaaataccccagcttccttaccactccagcctccatgcccttagtggcatgattccgaggtgcatcctacactgactcttggtggctccctggccagagctcattcgcgtggccctcagcagctctcctccttccctggctgtcttcctcaccacctctccgtgattccaggaatcagctcccgaataaacgacttgcacccg

SEQ ID NO: 379205 - DNA, 513 bp, Homo Sapiens
  misc_feature (130)..(130): n is a, c, g, or t
caagggcagagttgagtagttgaaacaaagacatcaggtcatgtgaagccaaaaatatttactctgtagcctttttctatgagaagtttgccaatccctgttctagatgattaggatagagccatgaacnccaacaaagacaaagctgtgcctctgttttccattatataatgtccaggtggtgaataaggaactaggaagaaaataaagtgatgccaggggagtagggaggtagagtggatggcctatttagatagagtggcttctcccttgaggtggcatttaaacagagctctgcctgtgaagccattgacttcttcacaacagaaagcttctgttggggaagggtaggagagcagtaacaattcaggaatatttttaaagtacctactgtgtgcttcatgctggggaccgagaagttgaacaaaactggaaaactgttagcattctactgcatttttattctagagtactgtgcaagcacccagagcaataaagaactaccagaaaaaa

SEQ ID NO: 379206 - DNA, 539 bp, Homo Sapiens
ggctgaagcagtagtattcccaacggaattactcaccatacatgtgtacatgcctgtatcttgcacagttacatttgtgaaatttaacgtaccatcactgagcacagctatccgcactttgtacgccccatgtgtccatgactgttcccatttggagtaacccaagatacagatgtcagggatgtggaggcccgaacatttcagctcagctgccatgccttcagtgacattgaggtctgcagggggctccacaatcaccggagcatagcatgtgaagtaattctggtcgagctctccaatgtacctcccctttagattgggaggagtgttacaccgggcacaacaagctgtgttcgagggggccatgtcttttatccaccagctgagccacagtatgtcacagttacagttccaagggttgtgatgtaaatgtatccgctctagatgatgcaagggagtgaagaggtcatgaggcagtaatgttagattattgtgtgccaggttgatctccactagtgactgaaggttgtcaaaggcat

SEQ ID NO: 379207 - DNA, 680 bp, Homo Sapiens
ttgctactcaaaatgtgatccatgggccagcagcatcaatattacctgggagcttacagaaatgcagaatttcaggcccactgcagatctaccgaatcaaaatcttcctttagcaaaatttctcaaacgattagcactggcctacatccattttatccttccttagctattagggatgtgaggtccgagggcttcaaaaggtccccggaatagcttgttccttcatccactgtgtcctattcattcttcagctaactccagcaatgagctgaaactcattcatcacccttgctgagttttcttctcaatccttattcctaattctggttctagatgagccctacctacccagtggttgtatttttgtagccagtgtgggacacaggagattggcagaccaacacagctagcctctctctagccctccctccacctctaagtcactaacaatcccatgtttgttcagtttgttgacatgtggcatgttcatttgttcacaacttaatcacgggggacatttcagaaaaatgtgtactaagttaaaaccatgtttagtctcctacaacttgtacattttcattttctcttatcagtagattgtccttgttgacatagctcatgcatgaggacacatagcagtacacacacattgaatgaattgttagtcatgccaaaaaaaa

SEQ ID NO: 379208 - DNA, 504 bp, Homo Sapiens
  misc_feature (172)..(180): n is a, c, g, or t
ttgtctgcatggaggccatgattcatataaagcaatttgatttatacaatgaatctctccaagttttgctccttgcaaggttctgtgtcaataaatgttcaaacccatatttattgagcacctactataaataatccaggcgctgttttaagcacttcctgatatgctggtnnnnnnnnncagatgcaaatacctgcctttgttacgcctgacattcctagaggacatttaaagagatctagttcccatgtggatagagcaaaatgaaagggaaagttatactttagcacaaatgtcaatttcagaatggtttatttttaaaatgccagactctgccatcctgagattgactaactattgtctcaccatctctttgtcctggttaagttcagagaatacaatgtgcccagagtgcagccctgtttgaaaaggacggcttgcagagttgcagcaaaagtcatttctgggcagacgataatactaaacggaagctgatgaaaaaaa

SEQ ID NO: 379209 - DNA, 435 bp, Homo Sapiens
  misc_feature (302)..(302): n is a, c, g, or t
  misc_feature (372)..(372): n is a, c, g, or t
ccgctcacactgctgtggctgacgtgccgctgggatggaggcctgatgacagccctcaaaaacccatgtttactctgagagaagagctggtcaagccagagtttcagcagctcagtgggcctctgaagacaaagcatgttcccctctcacttgcaaatctccagccttcttgctgccctgaagattgcacaggtttggcagagatggccctgcccatccttggcaaagtgctcccttgtcccaagctcagcttctccaaccagaacacagggctggagccccacaaactactgcacaaagtnctcatctgggtgggccttacaggggtgggtcaaactgtaatttgacctttgacccccccacttttgcagnatatgtgaccttgggtcaggttactaaacttttctgggtttccttatctggagataagaaaag

SEQ ID NO: 379210 - DNA, 459 bp, Homo Sapiens
  misc_feature (445)..(445): n is a, c, g, or t
gaacacggttcaggaaaattatgtggcacaactgattctagatgtaagaagggaaggggatgtcctttcaaattgtgaattcactccagcacccactcctcaggaacatttaaccaagaatcttgagctcaatgatgacaccattctgaatgacataaagttagcagattgtgaacagttccagatgccggatctgtgtgctgaagagatcgctattattcttggaatctgcactaattttcaaaagaataacccagtgcacacattaactgaagtggagcttctggcatttacatcatgtttgctttcacaaccaaagttctgggccattcagacatcagccttgatcctccggacaaaacttgaggaaagggaagtactcgccgagtgggaacggggcaattgagggcagacacaggctctttgcaggacccattttgaaggntaaaactacatctg

SEQ ID NO: 379211 - DNA, 542 bp, Homo Sapiens
ccacaagggaggtcctacccatggaaataagaaaatagtgatccaagttttcacccaacttttgaaatttcaatattttgagccaaatgccttctgaaatgggaggctttgatagtgggaaatactgaaattatcttttccctcagacctttagtgaaaccacacatatagttttcaccctatgacagtataaacaactcaaatcctatactgtttgttaagaacagttttcaagaattaaaaagtgctttagcgttatgatgtattgacatgtttgagcttcagttggggttcaaaacaaccccaacgaggtgaataatgcatataatacattttagatgaatgcactgaatctcagagcagtgaattcagcctgtgcagattcatatagcaaatgatagtgctgcagccagaactgggtctttagaaattacatattaacatgttttctaagtaagtcattttccatcattgccttcaaggatgttttatatcaattgttcagatttccataatatagaagatgcctccatgaaaaaaaa

SEQ ID NO: 379212 - DNA, 535 bp, Homo Sapiens
ttcagcaggcagtttctccagatgattaaacaaaggtaaccagagggccaaagggcatgactctgctgcagctttcaccttgaaacactgaagggaaaacctacttgccccacaggaaatacgaaaccccaagcattcctagatataatgtatttctgccttggagaaaaatatatccctcaaataccttcagtacaaaatacccacagtgaaaagttttaaaacatggtatgcttttaaacaaaatgagctccctgaagaagctgcagtatcctaagctcacacttgtttcctcttgaatttgtgatttagcagttttgggattaggcatcacgtgctttacaaagatgttgatctgtaattgctagtactgactcttttgctttcatgatggattatataccatttgcaattgatagtctctgaatctttattttctttgcaaaagtagcatgtcatctccaaaaaccggacagcagtgcttgctaaataaagtgtagtatcgatcaacgtgttaaactatcatgcctttcac

SEQ ID NO: 379213 - DNA, 503 bp, Homo Sapiens
tagactctccatgtagccacgtagggaatcagccttacttacatgtaggacctttgtgctttaagagctctgggacatattggccaaatagaaaagaagaggacagtatttcaactcagtcatactcaatatttccaattaagatataatcctgacaccattgttcaattaactttgacgccagaagtcaaagcccagaactgggaccccacagctcttaagtactggtccctatcctgcctatgcctatagccagccacactggtttccaagttctgtgatcattttgctacaatcatgttagggtgaaaatctgtacgtcagaactgttaaatgctaattatttttaagtgcatgagacctggggccttctctttctacttgcactctgcttatactagtttctatttgtagatctcaggccttcatcataaagacctctatcaactcacaaaagtatttgtctctattagagtggcatgtggtcatttgagtaaaaaaaa

SEQ ID NO: 379214 - DNA, 429 bp, Homo Sapiens
  misc_feature (18)..(18): n is a, c, g, or t
  misc_feature (398)..(398): n is a, c, g, or t
tttgattctgggggctgntggttggctatttttatggttgtttctcgatcatatgctaaacaagcagtgggctattcatgagttttccgggaaaggggtggggaattccggaactgagagttccctccccccctttaatccatatagggtagattcccagatgttacccatgtcatttgtaaactgtcatggcactggtgagagtgtcttttacccatgctaatgtataagaaccttaaggatgaccagaggttgctttcgttgccatcttggtttttgtgcgttcttctggctgctttacgcatctcattttaccagtggggtctttgtgatttgtaccttgtaaaaccagtcctgccaaactcctgtctcatcatgagagaatcagttgagccaanggaggttgaggctgcagtgagctgtaatcat

SEQ ID NO: 379215 - DNA, 642 bp, Homo Sapiens
  misc_feature (118)..(215): n is a, c, g, or t
  misc_feature (601)..(601): n is a, c, g, or t
ttgagagtggccctggcatttgcctaatgtttcattcttaaaggtttttgaaattattttggggctttgaagtgcttgctgtaataaatttattgagcatttaccaccccttatcagnnnnnnnnnnnnnnnnnnnnnnnnnnnnnnnnnnnnnnnnnnnnnnnnnnnnnnnnnnnnnnnnnnnnnnnnnnnnnnnnnnnnnnnnnnnnnnnnnngtcatatccatgagaggagtgaggcttggaatcgaggtcatttcaaagtttattctagtagtgactgctagtgctttccttgtgaatttgtattaaagtagactgagactcctcccagaaactggacctgtgagccttggacccatggcatttctctgtgttctgtctcagtagtagcagaatgacatttgtcataagtaggcagtgctctgatttaaagcaatattttgaaattacttctttttacattttagcaagtgttgatgtaaaatactttaaaacagctctgttcaccactgtctgtaccgagcctttttatttttagagtgttaggtaattaaggcaaaaccatccacattgttttatgtgttctgtagacttctttnctggtgtttgcttttactgtttttccagtattgtctacggg

SEQ ID NO: 379216 - DNA, 482 bp, Homo Sapiens
  misc_feature (299)..(299): n is a, c, g, or t
cttttcttcacggaagttttgctgttcttttctccactagacagctgttccagaagttcttatgtctgattccttctcattcttcatgcctaagcttaaatataacacaagaagcccttccctgattattctaaacaggggccttgcctattgatagtttctattacagtattatttatagttccttaattgccccataatgatgccagttattttaccttgtatttttattatctgtttgccccccataaatattactcctcataaagacagagactgccctgttactcctttggagnctcagtaaaacaaatatttgttgaataaatgaatatttgaagttagtctttatggaagcattataactttggttgtaagttttataatttaatattgtttataactctgaagataagtgagtctaaaccaggaaaatttacatttatactttaatgaataaaaatcatgaatacttacaaaac

SEQ ID NO: 379217 - DNA, 448 bp, Homo Sapiens
caaccctacgggccagggaatggaacccatatgttgcctttgtcctcagaaacacaaatataaagtccctttttcgggaacccagacacatggtggaagtttaaacccaaaggaacttgcaaggcgtaacattccacggggtaagccaaagaaaaaataacaagaatgttggaacattatcaatgttttgtttcagtgcccaataattatgagttcttcggttcccagagaaaattgaacgtattgagttgtgtgcatattcttgtgaggatagaagcactagcccaagagacaatgaagatattatctctgaaaaagaagaaaatattttatctttatctttgaagcatctagagttcactgaagagaagaatcttgatgtaaccaaagaaacaatgttacctgagaatgttgcatatctctctaatgcagatttaaacaaaaaaaa

SEQ ID NO: 379218 - DNA, 452 bp, Homo Sapiens
  misc_feature (28)..(28): n is a, c, g, or t
aaggtgaccacacatttaaaggaacatntaaaaatgcccttccacttatttaacctcccaaaactagtactctgtggcaggtattatcattccccactttaaagacaaagaattaaggctcaaagatccttagatgacattttatagatcaaaagctactaagacactggaatcagggtgtgagcaaagttattaaatcagagcacttaaacttgagggtcagacacatcttgatgagtaaccttgctgctccccagcagtgtgactctggccaagctgtatcacaggtttgagtgttagttccttcatctagttaatacacagcttcttttgaggcttaaatgagaggacacctagttcagagaatcagcagcatgttataaaggagagtgcatttccttgtgtctcctctgctgtttcctctatgcaagagtgccttaaagagcagcagc

SEQ ID NO: 379219 - DNA, 549 bp, Homo Sapiens
tacaaggtccattgtaatacaaggtccatcagacagagctttgaaaatcaagagaacagaattaaacagtagcatgagacatgtaagattaagtgagtaagaatttctagcaagtgtggttgtagactctcagaaggtcttcaaaataaatatcagagggatttggaggaggtgaccaaagatgacccaaaatatgagttagccccaatataacaccttgcaagtcctctaaaaatacagttcatgatgatgcatccttgagtgccattggtggcagtggagggtcagaatttctgttaggtttcatttgttttaactctccctgaagttgcctggtaaatccagaagaattttaacatggaaagagaaaaaggaaaggagaataatcagatttatgaggccatttggcaggccattcgtcccaggggcagagatagctttacagcaagaactgacagtaatttctagtaactctcttaagccctcaaatcccccaaacctggttgtatgaagtagtctctctttaaaataaatgcctgaaagaaatct

SEQ ID NO: 379220 - DNA, 549 bp, Homo Sapiens
caaggattaatccaaagtaacttctaaaataacactgattaaataagaactggagcaagtactcttaagtgctacattaacctggttagaaaggctgttggattccagattgctattgtaaaatctccatcatgatgtgttggagtgaaggattagatggttttatccaacagtcctactagatatttggtaaccagcttcccttaactagctttttctttaaatactcgttaataagctattccacaaacctccagttaacctaacacatgaccctaacctagccatttaccatacatcaaactagctaaaggaaaccaacctaaggaagtgaaaacagttgtgatttatttcatctagctaaattgtatttctttatagaggaaagtacctttaaggatagcattccaaatagactttgaataggcgtttctgccagtttattcctcattccttttggaccaacttaggcagacaaaagcagtttttacaagctctttgtgagtttgtgccagtgaccaggtagctccttctagttttctcatgagt

SEQ ID NO: 379221 - DNA, 232 bp, Homo Sapiens
  misc_feature (22)..(22): n is a, c, g, or t
accttctgttcccctggtcccnaaccccctcccaagaggccaagacctcccagccgccgaagccccagttcccactgcttaccaccttcatgatctcaggcaagtctcttccctcctctgagccttgctttcctcatctggaaaatgaggataagagttgagccccacccatagggctgttgtgaaggtgagatgaggtaaaacatactctatgcactcaaatagtacatct

SEQ ID NO: 379222 - DNA, 436 bp, Homo Sapiens
  misc_feature (55)..(55): n is a, c, g, or t
gtagccaaagagcctagcctgaccacaattgccataccccaatatttgaattccnggtcctgaccttacctaagaccctataactgaaaaggggagctggaaagtggtcctagtccatgttcctcaggagaaagaggaaaatagatttggtgaggttttagcccagtcctctgccagcatgtgcccccctggttttacacccattcatcccagcttgagaacccacagtaatggtgatggatttaatgcatttaagcaaaagggtgcattgaatgcatttaagcaaagggatgttatggttatatttggctatttgaaatattactctggaggaagagtgaaaaatggattggctgaggtgagactgagaacaggaggcagtttgttttggcaatggactataatgaggggcagtaagattaaagaggaaaaaaaa

SEQ ID NO: 379223 - DNA, 411 bp, Homo Sapiens
tgttaaattctgagctacagttaagacccggttggaatccaaaagaccgaacctacaggggtgttaccctaggatttgataatcaagccaacaaaactcggtatcctccctacagttccttgtaatttggtcagaacattcccaagagaagcatagtacagtatttcccatcccatctttattactgatgttatccctttagtaattaaagacattttctgaaattctgttttgggaagcatcagtccctttcaaactttgcccttagtcaagggatgaggacaaaacaaatacatgtttaaacctttaaaaaatagtcttgtttgagaattataatccatacaggataaaggtgattcagcaaatgccttcctatccacagccatgatcaataaagaggaagttttcttt

SEQ ID NO: 379224 - DNA, 489 bp, Homo Sapiens
aaattaacctgaaggctgttttgtgcccctccttgattgtgcattcacctcccaacccctcgctccttgggcaactgttatctttgttatttgtcattgccttaacattagattcttttattactgcttttgtaattcctaatgatatcaaatggaaaaaatattttgaatgcaactcctcttttaaattgccccaattttatcctgtattttttagtcccatgccctgtattataagtattataaatactatctgtatatacttttgctaaagtcgtgtgtatttgttaaactgatgatacagcttcataagattttaggtcagctaatggattgtcaatattttgtttagaatacttaccaggttataaattacaatttgaaacatagatatcctatagtttgagaatttgaacatagatatggattatgttgaaatcgactgcctttttcttagctatgacagtaataaactatataacaacaggc

SEQ ID NO: 379225 - DNA, 539 bp, Homo Sapiens
tcctttatttccctttttggacattttaataatatgtcgcaccattctcaggaacaaacatggttaatgaaaggtggcaaagggatgtgtgacattcttagattttcacacatgggcagtcaggagtgaaatgtgcaaccttggaagagctgatacaatgtatggtaagctgaagtacgtttccaacactgctgctcagagcatacagaagttttgcatcctggaacattgcttcccatgaaacaaagcacttcataaatattttatgtttttccttgagcacccctttcaaggtagggatcaaatagtgcccagatcaattttccccaaaaggaaagaggaagtatcccagagtttagactgaaggcttagagtcaaaactacaggaaggtcacactgttctctggaacactgttgctcttcagtttgtagagtttatgatggaaaaggcatcagtctgtcaaaagacttgtttaatcctgataatgactttggaattatctctcctgggtctcagttaataaactgaagaatgacct

SEQ ID NO: 379226 - DNA, 550 bp, Homo Sapiens
ttagattctttggggttaaggtaacttcttgaataatgtactaatgaacgatagtgtttcaggaaacatgccctagctattggaagttcgtatctaacttttaccccttgtgtgtcatgatacatttaagttggtagctacatttttggaataaaggaaatgtaaaattatttgcagaataataacccgggatttgccccttctgccctaaacatcgaacctagggaactttaaagacaaagggtgccatccttttgtgccaagtatcctaagcgggcaaaatggggaaaacatgaagggcaagtcctttggggatgacttcctaattaatgcagaagtcatttgctttggcccaggttgggtgggactctgagattgcacactcttgccctgttggcagaaactagcccatcttaagttagtcaatgaatcctgagtcaaaatgaaaggttgctaaatctaagatcgagtgtataaataaaataaccccttcctccagtgactgtgcatttattttgtaataaactcattttggaatgttttagcaatg

SEQ ID NO: 379227 - DNA, 432 bp, Homo Sapiens
  misc_feature (60)..(60): n is a, c, g, or t
  misc_feature (80)..(80): n is a, c, g, or t
  misc_feature (103)..(230): n is a, c, g, or t
acctggaaaaaagtccaagcccctaagaccccggcccaaaaattcacccggtgcaaagcncccaagctcgcctgtcctanatccgccagcctcaactttcccnnnnnnnnnnnnnnnnnnnnnnnnnnnnnnnnnnnnnnnnnnnnnnnnnnnnnnnnnnnnnnnnnnnnnnnnnnnnnnnnnnnnnnnnnnnnnnnnnnnnnnnnnnnnnnnnnnnnnnnnnnnnnnnngactggagatttttttatgagaactgcatattgcctctttggtttggtttgttttaaaggcaggttatctgtggaaaccttatttatatattaatttgtttctcttactggagctgaaaaactttttaaggagggatactgtactattcaaatacctttctaaagtcccctaactcccagctttaaacacagctggtttacc

SEQ ID NO: 379228 - DNA, 458 bp, Homo Sapiens
  misc_feature (20)..(20): n is a, c, g, or t
  misc_feature (28)..(28): n is a, c, g, or t
caacaaaaaagggtaagaanccaaatgnggaaaccagtttttggaactgtgaccccatgcagtgttggggggaacaaggagttgcctccaggaagttaagtgcagtgcgccctcccaaggggcagtgaagcccatggaagccgccctgcccttcctcactgcagtcaatgccagcccacacttgtgtatactgagtgcctgccttcagatcctcagtagataaaataattcccacatttaaaatgattcctgcctattttttataaagggtttgaaagccactactataatgactttgtcacctaattgattttctactaatttttacatattcagaaacttcgtgtttttttggtggacagaatattttggaggtctccgtcgctgtttagaatgtggccacttggctgtttcacagtttttaaagctattttattgaatagtaaagcagtgaactt

SEQ ID NO: 379229 - DNA, 481 bp, Homo Sapiens
atcttgagtttgactttgaactcccatcccataagaacagtgggacatcaaacttctgtcatttttggggttccccacttcacagtgttgtgtaaagacccccaagtcttaggaagcatctagagcctggggaggttccacaggtctcaatgattagcctaaacctctgatttcacatagtactctttgctgtgtgcttagggctgggcactctctggtgagtttggaatctttcctttttggagtcttgccccattcctagaggaactactgcagagcagagtgaggggcacagcgccctgcttcccacagaacccaaagcgttctccatccgtgttttctccaagggtcctaccttctactttcctaaaaattatggacataattgtcccagtggtctcaggttttgaaaaccaaaactatgaaggtaagtgttctttaggcttctgcattctgccttgccatgaacttttcctaaggc

SEQ ID NO: 379230 - DNA, 507 bp, Homo Sapiens
  misc_feature (45)..(45): n is a, c, g, or t
  misc_feature (70)..(70): n is a, c, g, or t
  misc_feature (192)..(206): n is a, c, g, or t
atggtaaagcctgaatccccaaccacctgtcccctccccacgganggggcctctccccaacccccttccnctgaggatgtgaaaaacaaacccagatgggtgtgcctatcctcccatccttttggccctttaagccagagtcccctggaacaaagcagggccagcagggccttccttgaagacttgccttgnnnnnnnnnnnnnnngctggatggaatcttgaataaaaatgataggttatgctttaagctgaataaaaataagcccatctgaagaatatatagaagtggcatgcatgtctgtcctctggaaagattcatttttatttgtctatctatgtataaaggaggaagatagataaatggaaagggaagtgccgtttctgtaatgttcactctggtgaagggtttgcaaacagtataaaaatagtggctcttccaaaatgacggctttacttgaagtttatccacctctctcccccttgctcatacccctcaccaaaaaaaa

SEQ ID NO: 379231 - DNA, 549 bp, Homo Sapiens
  misc_feature (125)..(125): n is a, c, g, or t
cccacacccaccaaatttacggtaataaattgttggctgcccccatgatgatcctttaatgctctgtaagacaaggtccctctgtcctgccatggccaccctaaacaaatccctggcaaatggantcccaaggacaacttctcctaaagaggacatgctgaagattttttgtctgttcataatcagtatcccatgaccaagcctcaaaaaagcaaaacagttcttgtgtatacaacataatggagttgatgctatgttgcaataaatgccttattactgggaaaagatcagggaaacggtttaggggcctatgttcctagggtcacaccaccatgagggagggccaacacagccccaaaagtaaccacaaaaactgactgcctgggcctgatacaatgcaaaatgttgtctgagcctagaaattaatgaacaaagaaaactagcccaatgtttcacatttgcttaacatttaaaatttgttttaaaaatgtgtttaaaattttattcccttatcagggatctgtttgtcttctgaaaaggttaataaaa

SEQ ID NO: 379232 - DNA, 452 bp, Homo Sapiens
  misc_feature (411)..(411): n is a, c, g, or t
cttccctctgccctcctctgcacattacaccccagcccataaggagcaatgtgctacaccccccaaaatccaagctgtctaactgctcccacagttccctcaacttggaggatctcctctctctcaagattcagctcacaagccctcctccgtgaagcctgccctgcttgctccgtcctctgtgcccctcctgtgcacggctatagtcccctctagctcacatcctggtttagacacctacctccctgctagcctgggagcagccagaggataggctagtatctgattctgtctcctctgggcctaagagcatgccgagcgacctcatgtgtgtccatatgcggcctgtgttgtgctcactgggcataggattccccttttccacctttccctttccagaggagtaaacantattattagtttcacaacaagtggttaagggtttttcccac

SEQ ID NO: 379233 - DNA, 491 bp, Homo Sapiens
agaaaaaattcagtaaatgcaccccgtaaattgctaccctttcctttattttcatacttagatctgctgtacattgtatatatatataatttttaaaatgcagaaagaaaataatttccctaaatataattgcaaactgatttcttttacttttttgtgtgtgggggtgggagctgtatctgaataagtggcattcagattagggtcttgaaaaataaacccagaatctttaaaagaagccaaataaactaatagacgcttattttccaaaatttaaatttaagctagaaatgtaaatattcaattaatttgttaaaagtacttttataaagttaaaaaaaatccaaccaaaattttagaaagtcaggctcttttagaaagaaagctacacccatttcctcaaataactgttccgaaaatttatatggtggaatgcgccatgtataaactgtgaattgtattgacaaataaagtttgtaattaaagtcagc

SEQ ID NO: 379234 - DNA, 529 bp, Homo Sapiens
cttttacaaaaggcaagaccagcatctggacagtgggggctcttgagagtccccggcgccccccacaccaggttgtcctataaccctctcccctctgtggagacgttaatgccaaggggtgtgtggggagggaagtcccaggcaggggccacgcatggtccccatcaccccctcctgggtggcctggactccatcatctatcctcatctgtccacactggcgttcacacagagaagacaggacaggaatcccctcggaagatgctcatggaagattctcacgaggctcctgccccctttctgagccaggccgggtttgccactcctcgggcgcgcacctgagacactgagtcagcgctttcgagaaaggctccgggtagcatctgtggaccgtgaagaaaccagagggaagccctgagccacgcagcggcccgtccccctgcatagccttctcttcagggtcctcgttcggagacctattttgagaggtgattggaataaaaggtcccgtccgtgaggaactctttaaa

SEQ ID NO: 379235 - DNA, 469 bp, Homo Sapiens
gttgtcctaaaaaccctctccccctctgtggaaaacgttaaatgcccaaagggtgttgtggggaagggaaagtcccccaggcaggggccaacgcaatggtccccccatcaaccccctccctgggtgcccctggactcccatcatctatccctcatctgtcccaaactggcgttcacacagagaagacaggacaggaatcccctcggaagatgctcatggaagattctcacgaaggctcctgccccctttctgagccaggtccgggtttgccactcctcgggcgcgcacctgagacactgagtcagcgctttcgagaaaggctccgggtagcatctgtggaccgtgaagaaaccagagggaagccctgagccaggcagcggcccgtccccctgcatagccttctcttcagggtcctcgttcggagacctattttgagaggtgattggaataaaaggtcccgtccgtgagg

SEQ ID NO: 379236 - DNA, 416 bp, Homo Sapiens
  misc_feature (17)..(17): n is a, c, g, or t
cccccctaaaaccccgntgtagggacagcccccccataacaaagaattaccccgctcaaaacatcccacagtgccggggctgagaaacctcggatttaaggaagtcacccttgagtcaagcagccctgtttgtaaatattgtcctaattgccctgagaagatccttattcattagatttacagttttccccttgactaggggtttgaagtacttacgaaaatcagatatgttaaatttatgatgatggtttgaaaaacaacgtctgaagaaattttatcaaataactggtccaaaatacgtatttaaatttaatctgcaaaatgtatacactgagtattaaagaaacaggaaatgtgtgtttttagtcttcacatcaaaattgctctattaatgaacaaataaaagattaagttac

SEQ ID NO: 379237 - DNA, 497 bp, Homo Sapiens
cttttcccttcgtgtaaaatatgtactattccagagagatggggtccagactattataggcatagtataatgaacctcactgcagagtgtactcagccaggagctggtgatttggctgtaatggttgctgaaatattctgaattggttgataaaagctgctgcccttagttcctcacaggcaaccatccctgccctgcccattttcctaggactaagcaacttccttcacaacctggcaaatgaaagtttaagcccttaagccctgatgcagcaagggctccctctgcttggatatccccatgtcacaccagctgttaactattctgaatatcaccccttgcttctaagagtaattctgtggaccattgattcctgtcttcccaagatgtgtttagtggatgatgtatgaatggccagagttatttactttatcccaaacacagattgtgctcaaattgaaattctaaataatattaaatttaaatatcacaactac

SEQ ID NO: 379238 - DNA, 211 bp, Homo Sapiens
attattattacgttgtttggtttacatcattgtctgtttttccagtcaacctaggcttgcctgatttgaagaatttcaagaagtctaagagtggatcataggctaccttcattttaagttgtgatcaaatcatccttccaacagtgttaccagcctgacaactacctgcagtgcatgggagtgtcccttaccctacattctcagcaatatt

SEQ ID NO: 379239 - DNA, 544 bp, Homo Sapiens
  misc_feature (253)..(359): n is a, c, g, or t
gccctaggtaccataaagcctgtgatcatcactcctatagctaccaccagacaacctcactggtcaatatttcacctgttaactactaggaaagagcagaattgagtgcagggggtcctaggttttaatctgtcagttctgagagtttagcaggaatggggaaggagattgatatgattctgtatagaaaaagtttggcacttctatcatccatatcccttagctttccttttgtgttttcttatagttatgnnnnnnnnnnnnnnnnnnnnnnnnnnnnnnnnnnnnnnnnnnnnnnnnnnnnnnnnnnnnnnnnnnnnnnnnnnnnnnnnnnnnnnnnnnnnnnnnnnnnnnnnnnncaagtacttaagtgtatccagagttaactgctgctctgtggtgcctgatcagtctgaacctattttcatggttaagcattctggactgttaccatcaatttctgcagtgaaggagtaggcaatgattgccctaaggtaaagttgttcgtccacggaataaattgggaagtactccctcctcctgt

SEQ ID NO: 379240 - DNA, 543 bp, Homo Sapiens
  misc_feature (18)..(18): n is a, c, g, or t
  misc_feature (31)..(31): n is a, c, g, or t
  misc_feature (322)..(322): n is a, c, g, or t
agcttggcactagggagnattccctgacacnccgatcttggcagaagcaaagttggtcataagttatgctccactctcagtgctggtgaaacgtatgatgcgtaacacagtgtttttgaattcagtgctgattttcctaaaggacatttggaaggaaaaaagaaaaggaaaggaaatacccaaattcaggaatagaacttacatattattataagacttaaaaaatacatgaacactaatgatgaactcatttcttcgaagtaaaaggccttatgctattttttcccatttccctatgtgggcttgattgtgggcgaaagtnggctgtgtgagtttcccattattgaaggagttaaggtctgtggaatcaaagcatgagacaacatgcaaggaccaggttggtttccatttaacagccaacctaatctaactgaaaggattgagaggtttgtcttttttggaaagtgttaaggttcttccaagtaaccagcaatgtgactttaccacactgttcattaacggggctttggatggccaccatgt

SEQ ID NO: 379241 - DNA, 531 bp, Homo Sapiens
cggattcatcctcaggacctaaagttgcccaaggagctcctgctctgccagaggagggtggagagggcggtgggaggcgtgtgcctgagtgggctctactgccttgttccatattattttgtgcacattttccctggcactctgggttgctagccccgccgggcaactgggcctcagacactgccgcggttccctcggagcagcaagctaaagaaagcccccagtgccggcgaggaaggaggcggcggggaaagatgcgcggcgttggctggcagatgctgtccctgtcgctggggttagtgctggcgatcctgaacaaggtggcaccgcaggcgtgcccggcgcagtgctcttgctcgggcagcacagtggactgtcacgggctggcgctgcgcagcgtgcccaggaatatcccccgcaacaccgagagactggatttaaatggaaataacatcacaagaattacgaagacagattttgctggtcttagacatactaagagttcttcagcttatggagaataagattaga

SEQ ID NO: 379242 - DNA, 277 bp, Homo Sapiens
  misc_feature (35)..(35): n is a, c, g, or t
  misc_feature (47)..(47): n is a, c, g, or t
  misc_feature (84)..(84): n is a, c, g, or t
ggaaaatgcccaacagggattgtcctgtgggtggncttttttccccntctgtgtcctcagatgttctttaagaagcatgtgttncgtttacggtaggaaacctcccagtttttaaataagaagtgaaaagcctctgtagtctgaggtgaagcaaatgcctgtgatacgatgttgcagcgtttcctttaacccgagcctgtttgctcttctgtgagatacagatagtaagggctggctgcctcatggggctgatgtgacgattaaagagagctgtgcc

SEQ ID NO: 379243 - DNA, 443 bp, Homo Sapiens
  misc_feature (353)..(390): n is a, c, g, or t
  misc_feature (393)..(393): n is a, c, g, or t
tcctgaaaaattctcctgtgaagtgaggctggtgtggaagacgccaacacagtgctctcattcagaacactctcgaatgcagactgaatcaggccctagacagagggctacgtgtgtgcctatgcgtgttggtcttggatgtgcgaactgtctaaccctgctctgagttttcctaggaaaaggaaaaatgtcctgaacctcgactcttccccaggctgaaaatctccaacattttccagcccggcttcaaacctgacagaaaaagacaaggggagacaggtattaagaaaacggagagctcgtttggatttttgcttcacttctgattctgtcccaaaaattacttttgggannnnnnnnnnnnnnnnnnnnnnnnnnnnnnnnnnnnnngtnaaagagacatcgtgttcttttccctgtggacccccccaaatcccaaacct

SEQ ID NO: 379244 - DNA, 499 bp, Homo Sapiens
  misc_feature (73)..(73): n is a, c, g, or t
  misc_feature (123)..(123): n is a, c, g, or t
attatgggaaatattaatgagggcttgttcttaatcagtatgggctgggctgaatggctctgcagaaagtttnctggattttagagttaagctcctggtctgttggggagagaatagggccanaggagaaagcctaaagaagagtacagctatgccttccagtgattcacttcactgttatttgattcattaaggttttactggggaaatgccttatcattgaggcttctgggaaaaaaaacattcaggtgattgatgaaatttcaaaaagtaaaagaagaataagatgaagacaatgacaccaggttttgcatccttgcttgcaggaggtctaaggtttcaactcacacactggatcttactgattgaaagcagcaaatatgccatgattgactaatgatgtctgccatgggtgtggaatagacaaatgaagacaaaaattcaaatacctcactgagcagcagagtcttaatccatcaggaaagcctatgaaaaaaaa

SEQ ID NO: 379245 - DNA, 494 bp, Homo Sapiens
  misc_feature (203)..(203): n is a, c, g, or t
ccccacccttccccatccctcctcagaggcactgggctggggactggagcctgtggtgaggtccttcccctcaagccctgtcgggggcagccactaaatggcccccaagaatccccatggactcaagggattcccatgtggcatcccttcccgtgctgcagaggctgggaaacttaaccacatttcccagactctcttgcagnctagtgtttctgatggcatggaaatcctgccattgaatgcaaacgcacaagactagaatttggaactgagtttcgtggggagagaggcagggcatggagcatcccaagcatccattttgctgtgtggatggtggtagagtgcaggcctaatgctggagctggcagttgtaatggtggcttctgaattccacagcttcttgatggaggcaggagccctggcatcttagcccagttcagcagcgttttaggcagctttcctggatgctcagacacttagtaataatatgcttg

SEQ ID NO: 379246 - DNA, 491 bp, Homo Sapiens
  misc_feature (50)..(50): n is a, c, g, or t
  misc_feature (118)..(118): n is a, c, g, or t
  misc_feature (291)..(291): n is a, c, g, or t
  misc_feature (297)..(297): n is a, c, g, or t
  misc_feature (312)..(312): n is a, c, g, or t
ctgctgggggcattttaaaactgttttcctcctggaaatcaaaagcccanccttccctcctctgtccctctgggaatttggttttcctgagggcacttaattaggtgaatagccatgncctgaactgccctcactgacccacttcccagatgagggttactctccctcacagcacggccttgaaggccaggctcatgccccgggatgcctgccctgtgttcccaactgtggatcctgcattctggggaacagcccaattgatctgatggtgccagggttactttttatttnttaaanttgaaaattgggggnaatatatccttagtggtgattaaaacttcagaactgtttttgaatactaatttggtttttggaaacagcccaactccattcgggaaaatctggggaagagggaatcaaatctgggcaagctgggtgacagtattttagtttaaaaaacaaaacaacaaccttcctctctcccccacctc

SEQ ID NO: 379247 - DNA, 504 bp, Homo Sapiens
  misc_feature (38)..(38): n is a, c, g, or t
  misc_feature (64)..(64): n is a, c, g, or t
  misc_feature (80)..(80): n is a, c, g, or t
gctggcctgcccccaaaccccctgtaaactgaccaaangaaatgacccgggctgggcagggcanacgtgtttgaaccaantgtctgggccacccccaggcctcagtccaagttgacacataaagttcaacccgcccccgggcccctttgttgtaatttgtgtatgaataaaacacagcatcccactccaggtatctgagggtccctggaggcaggttttgtgatccctttttacagatgaggatgcggaggtccagttgtcactcacccagatcacactctcatctgctgatgggaggagtatttgatgggatgtgtgagcccggccgtctcccttgggacacatcagctcattaaatttgccagcccctgcctgaaaaagtatttaatttgccttttacaatgcacccattgcaagttaattaactggcaattgaaagttataggtggcattagaatttattaataacattgggaataaatctccctggaattcaattaactg

SEQ ID NO: 379248 - DNA, 534 bp, Homo Sapiens
atttctcagcctcccttggagagctaggttccagccaatgagatgtaaacagaaatgtatgcaatgttcaagtaggctgcttaaaagaagttgactccacttgaaaggtgtgcttggtttggcctgccttctcccttcctctggttgaatgtcatcttgatgactggagctccaggagccatcctggaatttctgaccttgagggtggaagccacaggctaatatgatagaaggatgaggaagaggctgagtaccagatggctgagaagccactataccagccctagtttccgagtttacactgcttcctgtgaaagaaaagtcaatcacaataaaaccttttatccttgtttaaaccaccttaaaaagtcagttttcttttatatgcagcctactaatcctatccaaacaaggcttgaataaggtttactacagctcttttttgttgtaatagcagaaaaattggtaataaatgcccatcaataggaaaataaactattaatttaacaataccaaataaaactgtgcagcagt

SEQ ID NO: 379249 - DNA, 467 bp, Homo Sapiens
ggacaaatgttttgtttggcaacccaaagaaagcttggggcaaaaacatactgtcactccccactacccatactcttaaagactgctccatagggtgctaagcaatgattaaacaataataacaaacatctacaaggaattaacaagagttagagggtaggaaacacttgaaaaatctgcttacgatcaacctggctgatttcataacatcatacggggatgggggagcacatactgacttccttctcaagagtacagtatagaaaggtccccccgcttgcaccccaagaaagagagagaaacttgaccaatactacctcagtaggggtggtcaaggctacacatcactgataagccatgtatgtaaccttgatgtgacacaaagaaaacgatactttacccatgtgctcttcctcccaagacgctatgtcagtctaatcatgagaaaaacatcacacagatcccaa

SEQ ID NO: 379250 - DNA, 541 bp, Homo Sapiens
  misc_feature (244)..(244): n is a, c, g, or t
caagtccggatgaagaattaagagaaaaaaagtgaatatggtttttgctcacagaatggataacagcaagccacatttgattattcctacacttctggtgcccctccaaaaccgcagctgcactgaaacagccacacctctgccaagccaatacctgatggaattaagtgaggagcacagttggatgagcaaccaaacagaccttcactatgtgctgaaacccggggaagtggccacagccagncatcttctttgggattctgtggttgttttctatcttcggcaattccctggtttgtttggtcatccataggagtaggaggactcagtctaccaccaactactttgtggtctccatgggcatgtgctggaccttcttcatcagcgttgccagcacgcctttcgtcctggctccagtttcaccactggaaggtggacgctgggtagtgcaacgtgcaaggttgtgcgatattttcaatatctcactccaggtgtccagatctacgttctcctctccatctgcatagaccggttctacacc

SEQ ID NO: 379251 - DNA, 460 bp, Homo Sapiens
tgatcaacacttgtattttgaagtaaataccctggatccaagtaaattttccccaagaagcctactttttgtgaacacagcccccgtctccctgacccgcggttcccagaccttcacccattacacccagtcctattccccattctggaaagggagaggtatcagcctcttagggggcagagattagcaaattgaaaaatagcagtgaaccagatggaaggctctcgatctttagaggttattaatcagtgtttgttcgttcaatttttaaccagtcaccttgctgttaagagcagaacataattggctggaatgtaatgtagggaatttttccctgttggatccctagcacctagaaaagttcctagcacctattaggtgttaataaatgattgttgaatgaatcagtgattacaagtacttttaagaattttgaaaataaaggaaccattggaaatac

SEQ ID NO: 379252 - DNA, 138 bp, Homo Sapiens
  misc_feature (29)..(29): n is a, c, g, or t
cctgttgctcttaggctaacaaacctgtnaaagcatattaccaaactgtttactgtaggcaatggtaagtatttgtgttatctaaatgtatcctaaaggtatagaaaaggtacaataaaaatatgatataggccagac

SEQ ID NO: 379253 - DNA, 497 bp, Homo Sapiens
  misc_feature (87)..(87): n is a, c, g, or t
  misc_feature (358)..(358): n is a, c, g, or t
tgatacttagaccaaaagcaacattcgttctctaaccattctgtattgattatataagcaaaatgaaaagagaaacttaaatgaacncagctctttaacatggttcaggtacacatattttgacccaagtggatattttcctaaaacccaatcaataatagctagctattactgcagactataaaatctggatatagaaaggagacctgtatcaaactgccttttgtagtgtgttttcataacaacttatgactaaaaatatcacactgaataagagagcaggattgcccaggtatttttctatttctctccttaattttatatgtatatagatatatttggcttatattctaagtcncctaagtacttaaaagttaagttggtaaagtatttactgactgcttataaacatttaaagacaaagacatttcaaataactgcagaaaaaatattgtagtttgaatatttaagcaataaaactgctagtgagttattgt

SEQ ID NO: 379254 - DNA, 525 bp, Homo Sapiens
gtgcgggagagaaatggtttgtgtctcccttattcccaagtttaaataccctagctgcagattgtgccatcacccttcattcttccccagatggatcccatgggcttatgggagcaaattgccctggacctttggcctgaaatgggggcaggaaaggtgaggtgttgctggcctgtaatgccaccaggtgagttccagatgtggagcaacttgggcttttggggatggggcagcaaagttgggagctggaccccaattgagtgggggtagcaattggagtccttgtgtctcttttccaccccctgccatcctcacttagaggggccatggcactagatggcactagtcccccgataatttatgtctcgttgaaataattttgtatatcattctagtcctgaaatatttttttcatatgtgtaggtgaaatggtatgaataagctaacaggaatagtatctaaaaacagaaaacatccatattaaaatgtctaaacagggagctctggcttttgagtgggaatttc

SEQ ID NO: 379255 - DNA, 282 bp, Homo Sapiens
tttttactataatcacaaaactactacttttataggtgagaaaactaagactaagagaggcgaggataaaaaatgtgcccgaggccacaaaccacaaggataaagtcaaaaatttgaaacccaacttttccaaagtctaaatcttgctcccttccctgtaccttgcaaactttcatccctcagtggataccagggctgaggaaactgatttgtaacacgttcctgtcacagagttttggctctacatttaagacataaaacttggcctggcgcagtggctca

SEQ ID NO: 379256 - DNA, 543 bp, Homo Sapiens
  misc_feature (459)..(459): n is a, c, g, or t
  misc_feature (477)..(477): n is a, c, g, or t
  misc_feature (488)..(488): n is a, c, g, or t
tgaaatgctactagacaaggagattaaaggctcttccaacaactgaaattgagatagaaattgctctctggctacatttttggttatagcctaaatttcttcagtagacatccttctcatgtttcaaatttagtttattgttaattataatacataattgatattctttaaaaacactttagtatgattgtgctattgttggagcagggggtcagcaaacttttttagataagagtcagatcgtaaagaatttcagacatgagagccataatggcttctgtcacatccactgaaatatggtgttataatctgaaagcagccattgacaatatgaaccgataggtgttggctgtatttcaataaaaagtaacttacaacagatggcaggtcagatttggctcatgggctattgttcaacccctgtgtgatacgcagaatagtgactcctccaaagacgtnccacatcctaattccccngattcttggantgtgctgtgttacaggcccaaggggtgtttgtgtgagtacctgttcaaacggctt

SEQ ID NO: 379257 - DNA, 487 bp, Homo Sapiens
  misc_feature (299)..(299): n is a, c, g, or t
ggcagcctcgccaagggacagcgtgcccagcaccgtgcactgggcactcttggatctggagctcacaactccggaaggaatggggacttagatgaggtgacagacatgcatgcatgcaatgcaggctgaatccgcctgtctggagccaaaaataaacgccatggtcacctctttgttacaacctggatatgatgcccacatgcgtggggtagacatgcttgggatagataagcctgtggacttcagacggtattttctctttcccttttttcttctttctcgtcctcatctctgtcccntccctccttttcttctcgccctatctcttcctccctttctactctctctagtgtctcacttgagaaagacctagatttgagtgggaagagttatgccttaaactgttctcattataaattcaaaatgtacttgaagaatacagatcgactgtatgatggcatgaataaagcgctatgcttgtaaaaaa

SEQ ID NO: 379258 - DNA, 352 bp, Homo Sapiens
  misc_feature (50)..(59): n is a, c, g, or t
ccattgcaactccccagccccgggggacagagcaagactcccatcttggnnnnnnnnnnttcagatttcctagcaccctacccctctgagattcagattcagctggtttggcttgatgcctagaaagccgcatttttaggaagcaccgcagatactggtgctccacgagactcactggttggttagaagtatagattctggagtcatgaagcctggttaagttcagtatttgctttgccacttatccactgtaaatccttggccaagttatttagcatctcttaatttcttcctctggcttgtatcttgtgagaactaaccaagataattcaaataaacatgtggtacactt

SEQ ID NO: 379259 - DNA, 558 bp, Homo Sapiens
taaatgatttaatacaggttgttttctgtcttgttttagtaaccctccctcagtgtagaatttgtaatcaacctttgtcataaatacacatgccaaactattggaaagtaatttaccagacgaatggatagggtaatgtattaagagtgaagacagcagttccggagcccccggccggagtcctagtagaggaactgccagaggaccaatatccaacatagacctttagatataattaaaacctattatcctaagtcagtattccaaatttgtcatgccttaatctctttgaagacaagaaatgctcttctggttactcccaaagtacctgtacacattcctagatcctgcactgttacataattataaattggtatttgctaggtagataaaacttaagacattctgaaacatttctatttgtactttttcaataaacttgactatatcaagatgggaactaaacaggcttactgtgtcttataaaaaatactttgttgtctaaagtaaatgagatagttcaaaattaataaaaacaactagaactgtgaaaaaaaa

SEQ ID NO: 379260 - DNA, 552 bp, Homo Sapiens
  misc_feature (164)..(164): n is a, c, g, or t
  misc_feature (356)..(356): n is a, c, g, or t
ctggggctggggaggaaaggagcttcaatgtgccattctggttggggagaggataggacatttctgggtccttggctgctgccggtagaggtatggggaggaaaaactctagagtgggagatgtggaagtggaaaaggaaggccctgtccaggcctggcctggntttctggagacagaaaactccccaggggacagagaggttacccccttgtgcttagcttctgccacccttcccttctctggaggagaaggctgccctctcctcagcaaccctggcctttattctatgcataaccactgcaagggcacccctgggccaggctgaatgggtgggggtcccagggcacctgcaatnaatcttcagaatgggagggtatcctggggacaaagagggggtacagaaggttgccaggggggaaaaggtgattcctccatctctctctcacccaaatccccccagatcgaatctgacccttttccctggtctccattgtgctaaaccaccgaacttggaggagcctcatataaacatagcccccagccccactggc

SEQ ID NO: 379261 - DNA, 455 bp, Homo Sapiens
  misc_feature (239)..(239): n is a, c, g, or t
  misc_feature (245)..(245): n is a, c, g, or t
ttttaataagacataccatactattaggttccattgccagcattgtttaataatagtaaaccaaatggtccccaatgtcaatttcccatcagtaaggacctctatttgcctgtgtattcaaatccttttataacaggaatgcgtgtattttgtgtaagaaagaatagtaggctatggaggagggggtgatagcagcagagagaagcataaaagacctctttggcaggaaggatggcttnccaganccagctaagtggagcaagcatgttttgaaggacactggctctaatagggagttagcatggggtgggtcacagaacgtatttgatcaggcaaagaggactcttgccatccaagcctgttccctcagataaatggggataattcatatgtcataagccaaataaatgagggaatgaaacatacgtaactaataataaaaagtgttaaaattt

SEQ ID NO: 379262 - DNA, 520 bp, Homo Sapiens
tcttgatcccaggcagcagggacatgaaattaccccctgaaaagtaaactgagaagtgaacacctaatagattaaggtcaagagaggcaacataatcttaagagacataaagactctttggggagtaaggtttttacctataacctaatcgagggcattggacatcttaaacacactcacacagtctcccatcagaatagcagtttttcctgtctcctaaaacagagaaaaagtaaagctattaatgtcactgttacggttcctaacaaagcactgtcagatcaacaacacctgccagattgaggcaagcattcagtccacctggcagatgtctaacccctgtggcactggaatcctacataattaactccacttgctgtgcttccacacacaccaagcttccctctggaaactgccttttcaaggagataattcactatcaggctgatagagtaattcagttatgccctattctgttgttcactgtgaattaataaagtcacattctttttttctcagt

SEQ ID NO: 379263 - DNA, 471 bp, Homo Sapiens
  misc_feature (174)..(174): n is a, c, g, or t
gaccagcttctaaccattttgaactttagtttcccttttctgctatgtcaaatattttgattttccataatcatcctgagtccctatccaacaacctttacaactgatacagcctcactttctgttagataacttagtgttaattaaagcagtctcactaaaacgtgcttttgnctgttctttccccattttcacccaaagtgaatgagcccagtcccactaaaaatcagggccctatgggatacacagtgtcccgggtcacaaggcattactgtctttaatgatttgcctgggaacaaacgaatcagccatattttctccatcagccatataagaaatctcagaaatacctggatcccttctgcctcacttcgctatggaaccatttttgtttaaatggtcttttaaattggagttgtaagcatcagttgtcttttattcactacctaataaaggatgaagcctaaccac

SEQ ID NO: 379264 - DNA, 571 bp, Homo Sapiens
  misc_feature (32)..(32): n is a, c, g, or t
  misc_feature (76)..(76): n is a, c, g, or t
ctgagggatctggaattgccctggcctgaagngccctccttcatacccactgttctgaaggcttgaaaccaaaccnttcccacaacattggcttgatgtgatcatcatctcataactgagcaagaagactatgcaaatcttagggcgctcgctccctgcacacggaaagaactctgtttaaatgctcagttcagaacactttgggccacatagtgattttggaaaacaggataaccgtggtgtaaatgagtgtttcctttcaaagtccactgcagagcttttatccatatggtatgcacatgtagccaatattggtttctttttcttaatatatatattttattttaaaacaacaaaaagggagggcgttgacaccattccccacagagatagtcatgctgagtgtgggttgtttaaacatgcatattgaaataacacatatagtaacgtgggaatactaaaaaataaccaagattttatatttttgtaaattatactttctatactgtagattgtgtatgttatgtgtttttatggaaagctaataaattaaaggtacagtggtatcttg

SEQ ID NO: 379265 - DNA, 320 bp, Homo Sapiens
  misc_feature (65)..(65): n is a, c, g, or t
  misc_feature (115)..(115): n is a, c, g, or t
  misc_feature (185)..(185): n is a, c, g, or t
cctgactgctgacaggatgtgtgaaaatattttaactttgtgactttagggtcaattatgaaacnattgtgatcaaaattcagttgcttctgggaagtttgtggtgattatcccnttatttaacgtttgttctcaaaaaatggtcattttgaaaagtgaattggcaggtggaagcttttagcccnaaagaaatctgggtttcagcacaataaactgtatttcatcagggaggactaactttgctttttttcacactttatttaaatgtggatattttttcatgatacagaataaaatgtgcattttatggaattaatttg

SEQ ID NO: 379266 - DNA, 415 bp, Homo Sapiens
gaccctgtctctgaaaaaagggaaaaagaccttgtgagctgtctacgtgtactctatgtctcaggagactcatatcctgtaatttttctaaatggcgtctccatgtggtctttcatgaatgtttgtctggtattctctatccttttactttcaacttttctttaccttctactgaaattatgtcttttgtaaacagcccatgattatttatttagttatttatttttacccctctgcactatttgtcttgtaattggagtgtctgagtcccttatgtttaatgtaattattgacctcattgggtttaagtctgtccattgtcatttgctgccttctaatattcatctctttcttgctcaactatttttcttatgttaccttctttagatgaataaaaacctttgcattaaaaaaa

SEQ ID NO: 379267 - DNA, 484 bp, Homo Sapiens
aaaggcactctagcaggtgtggtaggagcacgccccaaaaggtagaatgtggtggggtgtgatggaaacaggccagttggccctaagaattagtacttgctcctaataatgggtttcatcctattttcatgagttgcagcatctgcatatacaaggcccggatcactttaggatcaatattttgacacgggagaaggcagctcagaaaggattaaggaagatagctcaaagccaaagcagaccctccgtgtgaactttatactgcctcacttccgtgtttcccaagtaaatggggaaactgtcccaaccttgtcatgtgttgggacttactgcttgaggcaaagcattcatcctacatcataaaaaatctccaaagatctctttaagggctgggcatggtggctcactttgggagatggattgcttgagctcgggaagagaccagttcggtctctacaaaaaatacaaacacaaatatactttt

SEQ ID NO: 379268 - DNA, 524 bp, Homo Sapiens
taccccgagtgccttacagggcttgtgaacaccgatactagaagtcaaaaagaagagagtgcccaagtgtgggtttggaggcactgacgcattcgccaactcaccgtcatcccatccttgaaaccctgagagagagtgtgtgttttatcacagtaagggaattcagtttagccctcaggaaactcatattgtgaatataggtatcaaatcatatatttgtttactgtatattttttaaaaagctttattgtaaatttatgcaaaaactaaccgggcctgttttcttacggcggcatgccaggtagtgtgtgtattctcccaggcactcccttcatagtcaccctctaaccacgtgacattccgttccatgctaagcagtattcacaggcctaaaataggtttgtatggtgatctacaagattttacaaatatttttgtattgtgattcctatgatatataccagagaattttttactcgtttgtaaattattgtacagttttaataaaaaatgttttaaatctt

SEQ ID NO: 379269 - DNA, 507 bp, Homo Sapiens
  misc_feature (143)..(143): n is a, c, g, or t
ttcttttgtttcattctttttttaaaagtctggatccaggtaatggcctgagtcacatttgcttagctactgaagcgatctcaatatgttatcgcttagagttgaaacataatcaaacatacgttatacctggggctcttgcncactatttgatatatatatgttactcctacaaagaaaccacaaacccttgtatgttgaaaatgtaaatccctgtttgatccctgcagcctagaatgcctaaagaaattgcaaatatcaaaagtgacttcaaataccctgaatataagcctagtcaacagtaagtggatggttcccagaataccatattcctaagacaaagcaggaattagagatcaactgacctcatccataatgttgctcaggtctgtctgtggatctgtccattttggagtaaaaaacaaggcatgcttctgtgattgtgtttatgaaaactgtagtatttcagatttatgttttgcaattgtgcctgccttgcaataaaac

SEQ ID NO: 379270 - DNA, 545 bp, Homo Sapiens
tttaccttgaagaagtagattgagaatgtcctgtttctcttctaaagacatcacccttcttgcccttctgacaagtttctatggtgtcagtgcccttgtacttgcttcatatctgtagaagccatgtttcagctttatgctaattaatgtaaccctgaaagttaccttacctagagatttcatatcccctgcacgtcacaaagcattagcatatgacatttaagcaccaaatggtattacaaacaccagaaggataaattataatatattggtgtgctactcagtacacatggggctgtctaggggaaaacaggttgaagaatgataatggaaacaaatgactcagaaatgccttcccacttacaatatagtcagagagacaatattgtggcaacgtggactgattctcatatactgaattcaaaattttcagttatcaaaaaggtatacagaagtaaacctacctatacccaaatttccaaaaagaacaacttatagttagggagggcattattgtaaattctactctacattatcagaaagaa

SEQ ID NO: 379271 - DNA, 449 bp, Homo Sapiens
ccaactgaaaacactagttagccccagagcaatagcaccatctatttaattcaagttagaacaatctaaccctcattctaaaatcctcaacagaaacaatcccctttaatcctatcatgttacagtgcatcgcaggcaatggaatcctactgcattttgagtcttttggaaataggcagtatcatctttgtcttggtattcttaccgtgcacagagtaaacgcttagcaaattattgaaagaataaacaacttgctccaaaacaccagagaagtgccgaatgaggagctgccatgctcaggcagtcattctgcatgattcttattctacaggaggaaatgaagcaagtgtttgccagttggaagggtagaaggaatctttgggagggaggctgccattaccctagctgaagtgaagccaggttaaaaccctcttctggtttaaaaaaaa

SEQ ID NO: 379272 - DNA, 553 bp, Homo Sapiens
  misc_feature (28)..(28): n is a, c, g, or t
  misc_feature (335)..(335): n is a, c, g, or t
  misc_feature (361)..(361): n is a, c, g, or t
ggactgagcccctcatgactcgcaacanctttctttagaataattcccgcatgagtccttttttatattctttgtgtatattttcaagggtttggttaatttgtcctgcagcagcatcgtccctgattaacatcgtgatattaagccaatcactgtgtccctgtaacagtcctctaatcgttccataaacacatagtagaaagtgggcccccaattaccccccaaaattattcctctacaatacatgtcagcctaacaaatggaactttctggaaattttcttcttgtcacttcccaacactgaattgtgatatttggcctttaacaggacattncttgatcatggacaaaacaaattttnccagataaactctcgctcttggatcctctaagctcttaaacttcctgagataacactttgcctggtcttacccaaagcagcaaacatgggacgttttgaaaagaaaatccatcacttcattgtctaattatgtataatatgtaaactgaaactggaattaaaatttaacgtgcacctgaatcttaaaaaaaa

SEQ ID NO: 379273 - DNA, 438 bp, Homo Sapiens
  misc_feature (109)..(109): n is a, c, g, or t
tatgggttattattaacaaggtattagactataagaaaaacataggacaatccaaattgttgtgacagtaaaatattaaatattttcaaaaggtccattaaactcttgnactgaaatggtttaagaaacaatgttagaatgacatggtttcacatttaacagttaacaaatggaaatatcaattaaaatctggggtgtttactcactgagctcagccagtgctatgcccaatgaagtgaactaaattctctggttctttgtggaaaatcattctgaagtttttgctctaaaaatagcttttggggcctgaattaccccttaccccactcgaacttctgtgcaagagccagaggaccagtgattactcgtggggccttgggcctacttaagagactcaacttgggtgttcacaggactgttgactttaattctaaaaaa

SEQ ID NO: 379274 - DNA, 480 bp, Homo Sapiens
  misc_feature (199)..(199): n is a, c, g, or t
ccctaatgtcctgctagaaaagtctccaagcagagatgacattacttctgaatgctcataaaccacaccatgaaataaaagctctttgttgttttaagattgtgaagtgtcgttaatgggtccccacagatggtccctgctggactcacctggaatctctccacagccatacccactcatcactatcattgaagacccngcacatccttaatagaaatattataaacatcgaaaatcatgacttaccctagaagttcgccttgtaactaatgaaattaaacaaatgtgttgcccttttgtcatgtgtttctctcctgtgacatttcaaaatatcacatcttgataaataatgtgtttcatcttgaatagctgaactaattgctttggaaacagagtcctagaaaagtgacttcaacagaattgttactaaaatttgcactcacaacatgaaataaattttcttcctatggaataatcgtg

SEQ ID NO: 379275 - DNA, 689 bp, Homo Sapiens
  misc_feature (468)..(468): n is a, c, g, or t
taaaaagggaaacctcacacgtaaatggctcagggcagcctggccttggtggaatgagcatgagactggaagctgaaagaagcaagttttaatcttgtcactaaatgagtgttgtttgacacatcatagcctctctgggcctcggctcctcatctgaagagaagttgaacttaactgctaagttgctctggctctaatgtttcatgaggctgtggagcgtgatatagatgcggaagaggttagaagaccaggatgccggcccagctgtcctgtgcctgccacatctggccataccaaatccatcgcatgcttcaggaaagggaggggatgctgtgacagcaaactcagcccaggagcttgttggggaaggagaaagggcaagtccctcgtggtcccacagcaggcacccccccaagcaccctcgataacccagtggcaggtaggctgaagtgaaggaagccctctgtncaggaggtctggcgccccagtgacagacaagacagctgtgagggagctggggcagccctggctaaaggaatgtctgagtaacttgtgaaactggaagcctctgcctctgaatgcattccaagacctggtgcaaatggatgtccattcattgttttgtatcagtgttcacttagatgtcttcttgaaaacttgtttgtggaataaatgtctaaaataaatgg

SEQ ID NO: 379276 - DNA, 510 bp, Homo Sapiens
  misc_feature (166)..(166): n is a, c, g, or t
  misc_feature (321)..(321): n is a, c, g, or t
tacccagctttatctcctggagtctggtcaccatcgtctcttttatacatggccacaggaagtattatgccacagtggctaagggctctggttttggagttagacacacttttctacttagttgcttgggtgagttattccagactctctagagatcaatttgccncatttgcaaagtgtaaaatgggttataggaattaaatgaaatagcacacttagccatagtgtcctggtacggaaggattcaacaaacactattaaaaacatgtcagaaacagtattttgggcttgcttgcaaaatggaattttggagtgaagttncgtgggtgaggcactaacagtgaggtcctgcgtgaggatggtggctggtcgagaggatgttaggaaggcagggatttaaaaggacttggggaaaaacaaccaagacctagtgagaggctggacaagtagaggagaaagaataaatcgaggatgacccaaagattttgacattgagataatagtggtcct

SEQ ID NO: 379277 - DNA, 537 bp, Homo Sapiens
ggagtaagataccaagttagactattcaattacactggagaaattaacttattgctagttggtatttcaacacattttaagaagttggattggggggaaattcaagtactgtaactaaagtcccataactagtgataatttagcatatagcagctgttgtacctttaacttacacaatgtgaaaaaaactagcattccaattgagtctgcttttccacttttgccccattgcgattgggtcctgccttttcccacttttgcccttcccacagggcacatgaaatggaaaaactgcattggcaactttgccggtggtcatatgactgactcttggctggtctcactttgttgctcttggctgaggaagacacattttaaatgttgcatgctatgtgactaagtctcctgagaaaatcaccctaattactgtatggtcaaaacacactgtactgtatttttgatgactgtgacttcattttatactttttaaataatgtgcaagtctcttcaacttgaataaattagattacaaattac

SEQ ID NO: 379278 - DNA, 478 bp, Homo Sapiens
  misc_feature (369)..(369): n is a, c, g, or t
  misc_feature (437)..(437): n is a, c, g, or t
ggctggcgtatacggtcagaggtggtcggaggaggggaagacattgaaatggagggagaagctctgctaacggtggcctgggcgggcgggccggagcagcaattgccacttccccagcttcctccctggtctggggcgacctctggccgcccgggacggtcgccttcccacagccggaagtcagtcccgctggccccgcgccgccttcgcactgtcccccaaggccacggctgcccccgccctccccggggctttttgttttttacgccagccccatttatcacttccaacctgcctatcgcccggcaccaactgttgcaagttccgtaataactgctgctatgaacttctccgtcgaaactgctcctncccagagcctgtttaagaagcagaaataagaataaatttcccggatgccggtggatgcaatggacctnttaagatttttcaaaggtgaagtggatacagttattaagtt

SEQ ID NO: 379279 - DNA, 460 bp, Homo Sapiens
cgataaaaggaaaaaatttaatgcaagagttttatcagaaggagatattatagtgtcttctttctagaaggctttaaagctagcagatgacattgcttgggataataatttatgaaatcttagaacaagaattatgaactggtatattctaactctttgtgtagatcactgattgaattgatgtttcctaggaagtatgaatttttttaattctagtggcagattatcctcttagtagcaagatattcttatcaacctttatgtgtagttattattgttgactaaagttttaaatgtaaaggcttatccttatgaggatcatttatataaatactctggtttttttcccatttattttctgtaaaatatttggagttgaaaagaatgaactgaccctttaacattaggaaaaaatataaaacaaggtagtgatgtataactaataaaaattggcttcaat

SEQ ID NO: 379280 - DNA, 494 bp, Homo Sapiens
  misc_feature (16)..(16): n is a, c, g, or t
  misc_feature (74)..(74): n is a, c, g, or t
taaggactggggtggncaagttcagctctggttttgttgtctggaaacctactttcttgcagagatattagccncatctctaatatccgtgtattagttataaagacaatattttaacttccctatctggctttacccttttgtccttattcttcaacagatggagacgtcaggcaggaaagggaagggacagtttactgaatctctgcccacaacaactatcaacatatatcgaccttctttccctcccaaagccccattaaaatgacagcaaaagatatgtaaaaatgattgactataaaaacaaagagaacagaataggaaacgtaaggagaagagaagtaaacttgatccctgcccaaattgacataaacacaatttttcttctatgtgtaaacatattagaagtgagccagttccaggcacagtgaatgaaaaatagaccagcctacttctttgtactaagtagaatgtttattatgaaaacaaaaaca

SEQ ID NO: 379281 - DNA, 436 bp, Homo Sapiens
  misc_feature (374)..(374): n is a, c, g, or t
cggggaggtgcatgctttaccaggtggccgagctggaggagcagcccgggaggtgtggcattttgagctgcccaccccaccgcggagttctcctctccccacattgctcaggtggccccgtgcccagtccagggaggaagccagccacagttaccccatccccctttcccaataggccttgtcccagcctcccttacacctaggggaggcaggaggcccttaggggtctggaaaagtctgtggagcaggaggggtgggggtggctcttgggagaagcttctgtgtgctgacggagggagagagccacgcttagggcaaggcctttctggccacttacttgccgagccccaccctgcctttgaaatttgctcatngagggaggcctgtgccatcttgtgacccgcaaaacaagcagacggcaaaaagacaaaaaccc

SEQ ID NO: 379282 - DNA, 655 bp, Homo Sapiens
  misc_feature (325)..(325): n is a, c, g, or t
tagctcccactagatgcacccactacttctgctgatactccattagctaatgcttgcttacatggtcacacttagtttccagagagacatgtctggacagtcatgtgctcaattaatatccaagtgtccaattactgagaaaaaaagaaactagcacctttgcttggttgcattcttcttagcataagccacattctttttatgaagttgtcctcagttacttggatgcctcagttgtcctttcatttagaaatgctccttggacatcctgaatctgacttcttttgtcatcagcaccatcactaccactgccttccttcaaagnccaccacgttctgtccccaggatggttgcaacaaccaccatagggactttttgcttctacttccacacaatagccagagtaagcttttgaaaatgtaggtcagatcatgtctctctcttctcttcaaaaccctccgatggcttttcatattactcaaaagaaaacctaaaactttgctgtgagatctatgtgacccggcttattcttcctcttactttatctctgtattgctcttcctcactctactccagccatcccacctccttgctgcttgtcctatactcctaaaagaagttcagtcttcccttatgatatttgcacttaaaatag

SEQ ID NO: 379283 - DNA, 523 bp, Homo Sapiens
  misc_feature (23)..(23): n is a, c, g, or t
cgcgccccctggccgagccgctncgcgccccgagacgtcttcatcgctgtcaagaccaccaaaaagttccaccgcgcgcgcctcgacctgctgctggagacctggatctcgcgccacaaggagatgacgttcatcttcactgacggggaagatgaggccctggccaggcacacgggcaacgtggtcatcacaaactgctcggccgcccacagccgccagcctgctgtcctgcaagatggccgtggagtatgaccgcttcatcgagtccggcaggaagtggttctgccacgtggacgatgacaactacgtcaacctgcgggccctgctgcggctgctggccagctgacccgcacacgcgggacgtctacgtcggcaagcccagcctggacaggcccatccaggccatggagcgggtcagcgagaacaaggtgcgtcctgtccacttctggtttgccacgggcggcgctggcttctgcatcagccgtgggctggctctgaagatgagcccgtgggccagcggggg

SEQ ID NO: 379284 - DNA, 540 bp, Homo Sapiens
tcctaggcgaggcgtcctttgagcaaggctttgaaggttgaataggtgttcatcaggtttaaaaagagagaaaaggcgttccaagtggagggaaacacatgtactaaagtatacagtgtgaagctaggaaggtcagtatatgaagggtcttggacaccggactaaggaacctggggactagctgcagggatggggcagggcctgataatgggatcagattcgtaaacccagaagatgactcgcctcatggggccctctgggaaggacggagttagtgaaagacactccaggcaggaagatggtaaaacattccccaggatatcccatccttccctcagtggatgctctatgaccaagtgttaaagccattgataaaaatggggccaaaccaagcacaaagaattcctctgccaatctctgaatgacaagatgctttgtagggaaagaaaacatgtacagtttggaagccctacatcagaagtggcaaaatgggtcaaaactggcccttgggcttgttttatttggcctgagcaaaaaaaa

SEQ ID NO: 379285 - DNA, 549 bp, Homo Sapiens
ataatgttctcttcgatgtgttgcaataatgttggaaacatatagtagctagggcggttacttttaagtcttgcttgccacaataataacgtcttttggaatcctagaatatgttcaagatactgaaaatatatcattgtttttccccctgcattttcaggcttaattccattaagaatgcccaaaaatatcacttaaatatgcccaattttgttacccaaatgtcgtcttcaaaaatatttgccaaatgagattgcttttcaacgagaaaaatgtaaatctcgttcctgagttcatatactctgctcaatacttttccttgagaaagccaacgaacttctgtatgaaacaataagtgggtgtggttcactccaatctctgaacaaaatatttcgagaagtcggctattcagtgagcttcctttaataaaattaacagttttcactgcatttttcaatacatccatcagacttggtgaaatttctttggataccaaagcttctcgatgaataaaacagtgattccaaacagcattgttgtgggttgctt

SEQ ID NO: 379286 - DNA, 411 bp, Homo Sapiens
  misc_feature (30)..(30): n is a, c, g, or t
  misc_feature (40)..(40): n is a, c, g, or t
  misc_feature (68)..(68): n is a, c, g, or t
  misc_feature (72)..(72): n is a, c, g, or t
  misc_feature (85)..(85): n is a, c, g, or t
  misc_feature (119)..(119): n is a, c, g, or t
  misc_feature (126)..(126): n is a, c, g, or t
  misc_feature (188)..(188): n is a, c, g, or t
  misc_feature (251)..(272): n is a, c, g, or t
gtttaacctttcctttcccctccctttttncaaccccgantttttttgccatgttcccttttgaaaangggncaaaatgtgtagncagccctgccatgaagccacagttgttttggggnaaagaanactggagtatgatgtaactcacaccctgcaaatcctgagcatcgcgaggttaaacgttcccncctttttttgtaatcgtcaacagcacaactattttgtattgttgtttgtatcattttgtcccnnnnnnnnnnnnnnnnnnnnnngggaagagagttgatgttttcagtgtgtttccagtgccagacagtcttggtcctgaactcagtagaaccttgcggagcggttgtgcgcgggcaggcggggccgctgctccagagaatgaataaagtcccccttttccgt

SEQ ID NO: 379287 - DNA, 506 bp, Homo Sapiens
  misc_feature (59)..(59): n is a, c, g, or t
  misc_feature (251)..(251): n is a, c, g, or t
  misc_feature (319)..(319): n is a, c, g, or t
gggctttcttaaaggtgtatttgaagcttaagattaggcagaaatgaacattatcaaancaagaacaaaactgctcactactgtgggaataaaaatgtttagcagatcctatttgcttttgttcattcatcatctctgggaaacatcaatgacttacctcagttcactctcatgctatatattaaaaataatttacagggacactcagtaggaggttgaattatacgcccagactgagacaggatggctgnctggcgggtgctgtatggaatttcccagcaaaagagtctttcattagtttcaccaaatataccatttnccagcttagttttaaaagaaagtcaaactgaactgccatttgagattacatagaatgcacaagacccaatctgagaccctatgtttaaaaaaacaaaactgttttataatctaatcagcctgtcaaaggcatcactcataagcaaccgaattgtatttttggagagcaccattaaagatgttctttt

SEQ ID NO: 379288 - DNA, 519 bp, Homo Sapiens
  misc_feature (34)..(34): n is a, c, g, or t
  misc_feature (43)..(43): n is a, c, g, or t
  misc_feature (55)..(55): n is a, c, g, or t
  misc_feature (72)..(72): n is a, c, g, or t
  misc_feature (77)..(127): n is a, c, g, or t
cccctcccccaccctgatcaatatagggtttttnccctgattncccttggcccantgtggtggggcaaaagnccccnnnnnnnnnnnnnnnnnnnnnnnnnnnnnnnnnnnnnnnnnnnnnnnnnnngtcctgagtaaggctaattatgagggtaacagcccacaagagtcccactgataagacttcataaatgccgtgacattggcccacgcttcagtttctgagagcactgcaagtttatttcactccagctaagtgcttatgacgtgcatttttaaaaatgcaaatcatgcttcaggtcagcagaaaaatgcttccctgacttcccagtgagctttacatttttatagatgccagtcattaaataagaaagatatttaatgcaaagttatcccagatccagcattgtaagaagatgaacaaagaagaaggcaataatagaacacagcttagacagtgggtccttgaatgactttccactcaacagcatttctttgtaacattgatgagaaaaaaaa

SEQ ID NO: 379289 - DNA, 453 bp, Homo Sapiens
  misc_feature (26)..(26): n is a, c, g, or t
  misc_feature (31)..(31): n is a, c, g, or t
  misc_feature (50)..(50): n is a, c, g, or t
  misc_feature (57)..(57): n is a, c, g, or t
  misc_feature (63)..(63): n is a, c, g, or t
ccgaagccccggtggcccccaggaanaaagnaaaggaggttaaaagccanaataaanaaccanacccttaaaaaaggcctttccaaaaataatattttccacccccgaccagtgaccccctgtaacctaaatgcatttttgggaaatattagtatgtaagtataattccaaagttgtcaaaatgtaagacatttagaagtaatttttattatttatattgttaatacttaatcactggaaattgattttccttactcgatgttttctttcaactgagaagcctaaaacaaacaaaaaccttgtgtgttatcctgatatagttgactaaatgtatttgttcttatatggatagtaatatgaatgtgacatgcaccaattgtcctattataattttcagataagtgtaactaagtacttgtgtaataaatattagtcattttatttcaaaaaaaa

SEQ ID NO: 379290 - DNA, 530 bp, Homo Sapiens
  misc_feature (411)..(424): n is a, c, g, or t
  misc_feature (514)..(514): n is a, c, g, or t
tagctggcatatcaatttacactttctgaatgtctctcaagaactcatgtatgtcatctcacaaagatgtgaaacctgtaccaaacacttcaagtggcagaaacacctttttttccaacttatctcacccaaaggactagcttgaccgaaacatctatgttctcttgttggccaattccttgctgttctctgctgagaccaaagttgtcatcttcccatctctttttcaagggccccggaagcatttcagcacatctactgttttttctccactcccactctgcgatatctggagtagacccctcagatccttcaagctacagttggtgtccttttcttaatgggggtgtggacctgccttgcttttctcccctctatccatcaagatttgtgcaattcaggagttagccnnnnnnnnnnnnnncccataacgggccacacaagcagctttgtgggccatgcggtctcctaattactcagtgctgacaggtggcatggaagctggcgaggcatnagtgaatgggtgtggg

SEQ ID NO: 379291 - DNA, 494 bp, Homo Sapiens
tatccactggaatttcctgctttcaacttattgttctggcaacctgtagtctgaaagacagcattgtcttcaggcatcacatgatatccatgagatctgatcatactacacaaattaccctgcactcaggaatctcctacatgatattgctggaataagtgtccatatgaactacagttttgctgatatgaattaattctgcatggtattatttaaaaataaaacatccttaggctgaatcccaggttactttcaaattttggctttgagatttcattctgcatagtaatattttttatcatttaataaacattcaacattaacacattagtcctcaaatctaaaaggaaagtagtggaagcctcattttaaataattgaagcagcgaaaactaaaccttatgaaatctcatattgatgaatgtttcagcatgacttaaaaatatgattgtacaaagaatattatagaagcattaatgtaatcaaaagaaaaaa

SEQ ID NO: 379292 - DNA, 440 bp, Homo Sapiens
  misc_feature (24)..(24): n is a, c, g, or t
tgtatccgtaagatatttttgtgnaatcctaattcttctggactgttactccccttttttgggaaatgaccctcctctctccagtctgacacagggtcccaaatataaatcatcctatatgcagaatgattaggcaaggatagtcaccctaactctggctgagctaatccctaatctcattttgccctggctacaatagaatagagaaatgacttcagtgaagtatgtctcttccccaggatttttcagcttgaaattaagatgtgacgaagctgggaaaatgcaagcccaggaaatgctggcagctgtagttcagccaggctcagtgggaaagaataaggctgataacggatattgctaatggcgttaccctggtccctgaagcccagtgcaatcctgccattcttgatacgtgagtcaataaatttctgtcttttggc

SEQ ID NO: 379293 - DNA, 433 bp, Homo Sapiens
atagtgtgtgctctgactcatccatgacccctaagctcccaagatctcccaaatccgcaggccccgtttggcagagttgtggctcatggggatgacagagcagaatgtttagggtttctgcccaagagggagaccaataaaataggatgacaagtcttacgatgtccctacttctaaagagaaggtaagaaatcccgtgctgaacatccactaggttctgggtatatactttatacacacatggcccctttattcctctcagtgaccctcagggtaggtctcactacccaagtgttagagtgaaggacgctgagaccaagaagaggaacaggtcagggtcagacagagctggaatttggacacagttctgtctgactccagatattccttgtatcacacaatactgtcttctgaagcaagtgattgtccccaa

SEQ ID NO: 379294 - DNA, 482 bp, Homo Sapiens
  misc_feature (236)..(236): n is a, c, g, or t
  misc_feature (429)..(429): n is a, c, g, or t
cagaacttaaaaaatgctacatgaattaaggataaaatgccttttatactctcaacttttaagtcttttattcaattattcagatgaaaccacataatccacgcatgcactaacatcatgggctcttcaaacaggaatagatttagagatccaattaatcccaaagttcctcaattaacagcctggtgaatttgaagcccaggaatatagacaactcccatagagtttcccacagnctagttagttatggaagtctagttagttacagaactctatttatgatgtacaacatttattttatacattgttaaagatatcatatacatgtgcatattcagaaacacattggcctacatttgcctacacagaatatcacgaaatgtcctataatggaggcttaacccctggcatcaatgctataaaggcttnctactagcttttagcagaaatagtcagaaaagtgcctttttgaagaaaaaaaa

SEQ ID NO: 379295 - DNA, 621 bp, Homo Sapiens
  misc_feature (121)..(145): n is a, c, g, or t
cactattaagagatgaaactatttgattctttatttaactcctttccaaggaaatgtttttgaaaatccatacggtttacatattaaagaggatcaatctgataataggtgatttttttgnnnnnnnnnnnnnnnnnnnnnnnnngggacagaataatattttgtatacttccacttctagtaataataaaatgagtgatttggaacaaacatgtagcagaggaaaggtgagcaaactttttaaatgtcaaaagacatcaaaagacaagataatggagaaatggtgggcccaaaattccagaaacagttgggagagtcatgccatttggggcctacttttccccccggggatgatggtcctagtcctaggatctgaaaagccctagaatctctgcagcacttttgacacctatatgaagctgggggaaagaaagattctagcaaaaattaaaatgcacatcttttcaggcgcacataagatttgtacaaatgagtaaaatgatatgggatttcaaaatactgaaatactatgttttcgaatacagtgaaatttggctagaaatcaataaaaatacaactaaatgattcatgtgtgcatttaataaatattgtctcatctcc

SEQ ID NO: 379296 - DNA, 547 bp, Homo Sapiens
  misc_feature (131)..(131): n is a, c, g, or t
  misc_feature (213)..(213): n is a, c, g, or t
cacttgtgtattgcacattctggttcctctttggcaaattgccttggcattaagatagtaaattttccttgccacctacgctggttgagtcaggatgcttaattacttggaggtaaaaagcacctagctgnaaatagcccatccctgaggctgccctgttgaggataggagatggctttcatccatctttagatcctttcttggaaacgctgnagcctggccagccatgcaggcttttcccaagctctgatgctgccctgtgtccacaatagcatccccacagccctggatccatcattcccagcattatgatagctcctttgtctccttggaagagcccaaaacccacagctgaggcctcagggcttttctaatgtgcttagaacaggggtaaaggtaatgccaaccaaaatggggaaacctgtattcttgctcagtcactgcttagtcagcataaatcactccagaggatagtttgttactgacctcaaagactcagttacaaagatgatcaccatagcattgtttacagtagcaccaaaaaaaa

SEQ ID NO: 379297 - DNA, 527 bp, Homo Sapiens
cttgaagggagtcatgctggcctggcaaaggcagtaacctgtgtacttggggaactgttaagatgcacccttaaggagctgagatgattgcagagtcataaactcttaagtctatttgccactggacatttgcagagatgatcatatttacttcccctcctcccaccactcttcctctcagtttcctttttactttatttttttctccctttcctggtaaaagtattagtatgtttaacatagtgttaggtggcagataggctgggaagagctagtattgtaaaggaacactgatgtgtactggagcctactagctctcaatccattgccccagacttggggagagagagcacattctctatccagagaaataagaatatgcagtttatggttgtcctgtggacattaactgactgtgaaggtaaggtatatgccaaaggcagtgatatgcaggtgatagattcaccaggagatgatatgtgacttttcttgtattttaaagctctgcttcttttttagaaaaaaaa

SEQ ID NO: 379298 - DNA, 432 bp, Homo Sapiens
  misc_feature (139)..(139): n is a, c, g, or t
ccaaccttgcctaactttccctcactccaatatattgaacctgaatccaagctggtcacgtgactccagttccagccatgacaccctaatgcaggtacccatgcaggatgaaaacaaaggaattaatagggctctgagncacgtttcacctatatataaccctcccctcctcatcccaatattcctaagcagcaaatgaatacaatgaatatcaacttcctaacttcaaaaaacttgtaggtggaaatgtatctgcataaaaagcagttgaaaagagatctattaaactctacacagattgaggcacttagaaggtcctagcgatcagggcttatctttatttattgccaggttggaggtatatgagtaaatattgacactgtttctgttgttatatttctatatgaatacaagctaacggcttcaccagtc

SEQ ID NO: 379299 - DNA, 262 bp, Homo Sapiens
ggcttcaaaagctaacttcatcttttaacttcttaaatttaattcagcttaattattttatgttactcatgctctaataaagcaagcacataaatctgctttccctactgatagttttagttctatcttgtaagatttgatatgtaatcttctaatcattattattttttgaataatctgtaatcataattgttcttttctttagtccaatagttatttatgtatatgttttctaatttacaaataaacactttcctatttt

SEQ ID NO: 379300 - DNA, 323 bp, Homo Sapiens
cccgggcccagtaaaaaaatattttaattgatggctgaagttgttaggttatttaacattttaaatatttcctcacattgaaatatgtctcacaattgttccatatctttggcttttcttcttttttcccttacaaagttcttaacttctttattttataagcaatacatctgaaaggaaaatcatcacattcatggcatatcatagtcaggaagaaaaattaggttgcatcctgaggttgaccaaacataccagattcaccctgttaagtcctggtccccaaataaaacattgagcacttcctgtaagccggactccttagc

SEQ ID NO: 379301 - DNA, 413 bp, Homo Sapiens
ggaatccaaaggcccactttggttttcccctttttccacctagtttgaaatacccacaaatccacaggtgagtccagtcccccccagaggaaaagacagtccctagggagaatcacagccccggcagacaagacccacactgagagccagtagaaggaacctgcatgccttaagggacagaggactgtgttgtgttcctcataatagaccgctggatgaagaagtggttaaaaaccaaccctcgaaaaacaaaaatccctggctaatcctgaaatatatttaacttgaagtctttggatgatttttttaaggttaaaaaaaagtttaggattattataaatcaatatttataaataagcaacaatgtatttggaatttttgtttacctgattaaatatgtttttggtatgtgt

SEQ ID NO: 379302 - DNA, 475 bp, Homo Sapiens
tgtgaagggatccaccatatgtaagcttttggagctgattttattatctgtgttgtcccaagtggtgaagggaagatggcacaccaaaatgggggcattggtgccagtgcatcaggtaaataggcatctaaagctctgagaatagactgctactatgcattataatcaatgctacaataaccttgtaggtttcttttcatgatactgcttgctaagttttttcctgtttgcttcacccatattttgaacaattttctattaaattaggatattttaaaagtttgccttttcaatgtcttatttagataaattctgtagttccaaagttatatattttcaaagcctgatgcctttgatgtttgatgatgttaacaatatactattttcaaagccagtttgttatttctacactgatattgggaaaagaataaagtgatgaagtcaacaggtgttattaaaaatgtgaataacaggt

SEQ ID NO: 379303 - DNA, 531 bp, Homo Sapiens
acagaatttcctctcttgtggttaataccaggtggaacccagaaacatacagagataaaacccaaatattatttctatgtaaacacagaaaagggactcttccctttttcatcctgcaaagaaaaaagtcatcttttagcatgaaagaagatgagagagccttcttcctcaagcataatttgcattttgtaatccaactcagtaatttgtaaatgtgttcactgaagacttcaatattttgaaatattctctttcaggcccacagatgaaaatcctttacttttatgacctacattaaagactgtatgaatagagcctaatagttactagcatttgaatagtatcactttgggttcaacaaattgatattatagtactgaatacccctaatttaatggaaattctaacaactttctgtacttttatcttccctgaaaatctgaatttttaagcaagtgactttaagttcattaagtcaatattgaatgtataaattgctacattaaataacttctgctgtttgtaaaaaaa

SEQ ID NO: 379304 - DNA, 376 bp, Homo Sapiens
aaataataataataaggaatggcaggcagtgctgacaaatacagtaatattgtggtattgtgggtaatgaacaaaatacaatagccacaatgagtccatgttaaaaatactgtagtatcagaggtaatgatgcaatatagtatggtatagaatggaatatttttacatgctacaataggattaatttttgaaatactatagcatagcatggtgggtaataaaaatacccgccatggtggggaacgttaaaaatacgctagtatgatggattataataaaaatactgtaggccaggcgcggaggctctctcctgtaatctcggcacttacggcggctaaggagggaagattatttgaggccaggagttcaagaccat

SEQ ID NO: 379305 - DNA, 409 bp, Homo Sapiens
tgtttgggaacaccttggtccatttaaaatacaatgtatttaatttcctaacctcacctctgataatgaaatttaagataatatatcccaacctccttaaaaatatttccaaggtggaaaaacataacacacacaaatacatcctaccttatgttggtgtggccttaaaatacagaaatatcctgaagatagggtttgtgaagggtaattatttcctcacatagcatcccagatacaggctttttgttgttctttttttggcggtggtttgtttattgggagagcccatattgacagttatttaaaagaggaggaaggaaacattttgaccttagggtagagtttatgggtgagaacattactggcataaatgagaagatatgaattcgataaaagaatataaagaaaa

SEQ ID NO: 379306 - DNA, 569 bp, Homo Sapiens
cggaaatgtgttgtacaagtaaattgtggaggatcttgaatgtcaggttgaggagtgagaagttgagtatttatttggtaagtaatggagagtcattgaaggtggacagggggcagatttgagtcttagtatagttgaatcttaagattaaatggaagcagtctgtaggttgaaagtatatttacgaaaataacccaagtgagagggagtaaaggcaagatggtgaaaggaatagatttgggagatattttaaaagtagactcaataggacttgattagaagttgccaggaaagtaatttatgccagggcatggcaactatgcacaaaatctgaattctgattgaaccctggattaaagggagagaatagctataaagaacataattgggataatttgtgagatttgaatatagatcatatatcagataactagtacagaattattaaatttcttgagagtgataatggtgtggttatgtaggagattcttcttgatcttaggagatacatcctgaagtatttaggaataaaatgtcatgatggcttcaacttccagaagttattcaac

SEQ ID NO: 379307 - DNA, 518 bp, Homo Sapiens
  misc_feature (11)..(11): n is a, c, g, or t
  misc_feature (48)..(48): n is a, c, g, or t
  misc_feature (88)..(88): n is a, c, g, or t
atgatcagggnctgaactcaagaaacccctggccaaagaaaaccctanacccagaagagtcagtgtcacagatatgatgcgggcaaanctctgtctccaaaaacctacctgaacttaatggtagaattcaaagatctggggactgagggcacccagccttcctaaaaacacaatgtattcatgtgtttagtgtaaactctctgcatggattctcagtgttaataataaaaggaagcattcttttacaactcctgctgtgtgcaaaagaaagtgcaaaggatttggagtggcattccgaagatcaccacacataccttggttctgatggctgctgaactccgacttcttcgctgagacatgactgtgggaacagcctccagctatctgctcatcagaggtgctttcctcaacctcctgcaccacctccaagagaaacagcctaaaaagaaaccccagctgtttacttatattggtctgtaaatccctggaagtaaaccccatgcatttttatctactgt

SEQ ID NO: 379308 - DNA, 560 bp, Homo Sapiens
  misc_feature (505)..(505): n is a, c, g, or t
gttgagtaccatgaagggctaaagtcaaatttcagagacatggtaaaagaattatctgacattatccatgagcagctttgaagacttaagtcgatattacaagaagacacaagccattctccccggatgagcaacacattacatgtattttgtgcaattagtggtacatcaagtgaccgaggttatggttccccaagatacgctgaagtgtgaggaaatgcagatgtacgtgacaatgagactgacctttctcaggaatatttggagctgtgcaaatgttaaaatttaaagatttgatatacatggagtgtttcttctcgacaccaaaattttcatgtgttccaacagggtgcttacatatttgtaaataagcaacttgaaagtgcctggaaaattgcaccactgtgcttggtttgtacttttttaggtaaatctatatgctgaaaagtagagctaaaaaacagtagttcaatttgcttaattattgcttaaaataatggtaatnatgtaaaattgtataatggaatacaataaaaggtaaaacttatttgtaaaaaaaa

SEQ ID NO: 379309 - DNA, 488 bp, Homo Sapiens
accttttttccctgctttctgcattcttaaaatagcctttcacggccccccattagtttcatttgagtcttgccctcaacgtgtttctcgtaagctgtaaactgggtaaatatagccattccctaaaaagagtggagccctcctgggacaggacacagcagcatcttcggaggttgcaggggttatgaccatgtcacatctttgtccctttcttctgtcacagggaacaagtattaccatggagcttactgctttctatcataacaacacacccagttagattaacaaaatgtgagaaaaatcctaagacactattaagagttctgtcccctacagtgggttccatcctaactttgtgcaactaaatgccaaaaatgtaagaatattaaaggaaactttgttcttactgtttgttgtatgtgtatgttaacttttcatggtgaaacttactgtgctttaaacagaaataaactttacttattttcttt

SEQ ID NO: 379310 - DNA, 450 bp, Homo Sapiens
gggaatgcaagtcaagtacactttgtatggacagtggtaattcctaagaaggaaaaacaaagatgggcttaaggggtgcagagggcctggactatgtgtgtctgtgggatagtctgttactacctctgggactctcatctcgtgagtgtgcttgggtgtgtccaaccgtttttcctagtgacaaagtctgggtaattctgtggggacatatattggtgtatcctgggaggtcccatgtgtctcagtggtggtccctgttttcaggaaagagtgtctgtgaatgtccatgtgtctcacttgcacagctgtgatttttctgtgtctctgtgttttccagtctttgtgtgatgaaatataaaggcctagcaggctcagagttattaatgaattgtacttaagcgttgagaggcatatatttattgcactattaaattcttccaaaatatagtt

SEQ ID NO: 379311 - DNA, 493 bp, Homo Sapiens
  misc_feature (139)..(139): n is a, c, g, or t
acacgggcagctgagtcccctgctttacgtatgaggaaacagggtgcactctttccccttggcaccagccgatccgactcttccacgggctcctgacccccatggcttttcgctttgactttgtcacatccaaactcanccatgtttcctcaggaatgctgaaccagtcggttcttttagccagctatgtaagagcatctgctctctttgattcgaaacacctgcttgaaaaatggagctaaagcttgggagaagcccgtcaggttgtacgtatgcccaaagccaagaaaaacatttcctaggcagctggccccaggtttctgctttttgggaaccacaaaatcgctccccagattttggaggccggcacaagcttttctgttgctaagtgaaggcattttgtaacctgctcgcaccatggttccatactaacatatcaacgcaccagatggacagggtgtcattccagaataaaagagtccttcaaacccag

SEQ ID NO: 379312 - DNA, 367 bp, Homo Sapiens
  misc_feature (99)..(99): n is a, c, g, or t
gaggtcttgaaaatttatgaacaacccaaggtatcactgagtcaagttaacttggtaactttaaacagtttggcccaaagatttttaaaaatccccccnggtgctatttattattttcatactcagaggatgaaatagtactttatgaaatattttaccgaattataacagttgtggggggagggttattcttgttttttatttgggtttgcttttgtcttttgcctgactaattaaatgaaagatgctcctttaactaaagtgactaccagacttcacacaatcttgccttttttgagttttggctattttaaaaatgatcaaatgtataataaatataaaataggaattttctcatatatataat

SEQ ID NO: 379313 - DNA, 619 bp, Homo Sapiens
ccatgatggaagtatcttgatagtacccaaagaactggtggcctcaggccacaaaaaggaaacccaaaagggaaagagaaagtgagaagaaactgaagatggactctattatgtgaagtagtaatgttcagaaactgattatttggatcagaaaccattgaaactgcttcaagaattgtatctttaagtactgctacttgaataactcagttaacgctgttttgaagcttacatggacaaatgtttaggacttcaagatcacacttgtgggcaatctgggggagcccacaacctttccatgaagtgccattgtatacaaaattccatagttatgtcccaaagaataggttaacatgaaaaccccagtaagactttcccatcttggcagcccatcctttttaagagtaagttggttacttcaaaaagagcaaacactggggatcaaattattttaagaggtatttcagttttaaatgcaaaatagccttattttcatttagtttgttagcactatagtgagcttttcaaacactattttaatctttatatttaacttataaattttgctttctatggaaataaattttgtatttgtattaaaaattaacttttccctttt

SEQ ID NO: 379314 - DNA, 570 bp, Homo Sapiens
  misc_feature (417)..(417): n is a, c, g, or t
  misc_feature (495)..(495): n is a, c, g, or t
  misc_feature (510)..(510): n is a, c, g, or t
  misc_feature (535)..(535): n is a, c, g, or t
  misc_feature (540)..(540): n is a, c, g, or t
  misc_feature (557)..(557): n is a, c, g, or t
taaatgcaagcatggtcacctcgctctgcaggtagaaatactcgtgtggcttctgtcaccctcaggatcaagctcgaactcctccgcttggcttagagggaccatctggactttcccggccctctcatccccttgcggcctatggctgttcttctgcccccgccttctcccacctcacctttctgggtgcactggctaactacagtttttgtgtctgataagagcttacaaaggactgccttctgggagctgtcccaccgtgcccgcctcagctctctgccctcttgtatgctgggccagcttccccaccctccatcccagccctcgcccaccctgtgctgggccagagctgctgtctccctagctgggctgtgcacaaagagcaggcaccatccctcctccccacagcaagcttcncagcagggttttgggaggcacagtaggacattcagtatgggatggtaggagtttttaaagattttcttggaagattcntttgaggaagtaaangaaggcagcgagggatgaaaacaanttgtnctgtgtttgagaggaanggggtggttaacc

SEQ ID NO: 379315 - DNA, 541 bp, Homo Sapiens
  misc_feature (66)..(90): n is a, c, g, or t
  misc_feature (127)..(149): n is a, c, g, or t
aattttaacacagccaccaaatattctatatttgaagagtatatgctaatcatgcaattttaagtnnnnnnnnnnnnnnnnnnnnnnnnnctgaatatgtgttttatatcctcgtgaattcaaagtnnnnnnnnnnnnnnnnnnnnnnnccaaatatatgtatgccagtttggagcccaaaattttaattaagtaacccatataattaccatgtagacatgtataaaccttgagatatgtaaagacccagaaaaatatttaaaagttaatagttacatcatcctgtggtcacaacaccctgaaaatgccctaatattggaaatttaagcaggattgatcccaggttattacttggatgggagaccagatgctataggctgaaaaaagaaagcataagtacgcacaagttaatacttaataattatctcctaatgataggactataagttctatctcttttctttacattgttcagtattttcaaatttccctttgaaaatgtgttatgtacttgaattattagaaaaaataaatgtcattt

SEQ ID NO: 379316 - DNA, 445 bp, Homo Sapiens
  misc_feature (19)..(19): n is a, c, g, or t
  misc_feature (28)..(28): n is a, c, g, or t
  misc_feature (37)..(37): n is a, c, g, or t
  misc_feature (48)..(48): n is a, c, g, or t
  misc_feature (98)..(98): n is a, c, g, or t
agttaacccgggggttggntgggtaccnggcccctangttagaccccnagccctacttgagaggcctgaagagagggagggatcccgccttgggcccntgggagggttgagggccgcggtgagcctgagatcgcggcccacctatacctcctagactgggagacagagcaagacccccatcttgcctatataaataaataaattatacatctatataaataaaccccccaaaataagaaagtaaatagaacataactgctacctacatcttaacatggctctgacgattaatgatacagtgcataaaagactgtttcagcaatgattagtgtataaaaaggatgtaataactagtaatattggccacaaattctattaatatgctttatatgtaaagatatataaaataagtaaggtattaagagaatacaaatatcaacttatg

SEQ ID NO: 379317 - DNA, 490 bp, Homo Sapiens
  misc_feature (19)..(19): n is a, c, g, or t
  misc_feature (41)..(41): n is a, c, g, or t
  misc_feature (52)..(52): n is a, c, g, or t
  misc_feature (62)..(62): n is a, c, g, or t
  misc_feature (81)..(81): n is a, c, g, or t
gccccccagggtaaccagncctcagaaatccctgagagtcngggtagaaaangggaaaaatnccgtttttttccaggcccnccctggcaagataaggggaaaccaagtgacagtgctgaaatgaacactgggctgagtggtacccaaacatcagtttagtcacctaattagcccatgtgatccctgttaagaaggttagcttgtataaccttatttttaaggacacataatgatttcaaaagtccaagtataaatcagtaattacaaatcagccttataataccccaggtatctatgaaaactaaaaattgagagttgataaatataagaaattactgctgatctaaaaggaagtggcagaaatcccctgaaatgtgttaaatctttgccttactaaatacttgccagaagctataactatattttcttattaatttcatgttcatcttctcaacaagtaaacaaaaataaagccaacaaaattctcaaa

SEQ ID NO: 379318 - DNA, 466 bp, Homo Sapiens
  misc_feature (256)..(256): n is a, c, g, or t
ctctcatgctaacttgggaggcaggttatgtgccccagagacagcagctctaggggaaagggacaggccagataggatgtgcagtgtgagttggctactgttgaactgcattttggaatgcctatccacagtaaggaggaaagaactggctagtttgcaagcagaaatggaaaggcaacaatcctaaaaaaaattagcatcaaaaggttgcaaaagactttcctcaaactctaatgagaaaaggtaagattcaaanattgctttcagcaataaaggcataataaaacttctcatctgaacaaaataacttggtcttttggtaaatatggaattaagggggtggctctcccatcatgatcccagatggcctcatggtagctaccattaaattgagagaagcatggaggtaaggcagcaaggaaataaggcagcttatgtctaggaaagaattttatgtgtgtgcttg

SEQ ID NO: 379319 - DNA, 440 bp, Homo Sapiens
agggcccagggaacaagggtttaaaccaccgaattaagtgtatggatggaactggtagaatggaagttccattccctttcctatacattaaggtagatcagtcattcccttgttattttataccttttggtttaatatagataatgtacagtaatttgagtttatagccttctggtagtaaaagtttatttaaaaacagtattaaaaggttgataaagatataactaacaaataattttccataataccatttttctcagtgtttttttaaaagcaattacccataagagaagctgaaaaaaggcatttctagaatgtggaagcatctttagagattatgacgaaaagttagatagctatagcttttatagaatttcaataacaagcacagtaatagatctcttatagttctttcttctttcctttttcaataaaaaaaa

SEQ ID NO: 379320 - DNA, 446 bp, Homo Sapiens
aatgggaaatctaagtcaaagataagccccaaaagtgatgtttggtccttaggatgtattttgtactatatgacttacgggaaaacaccatttcagcagataattaatcagatttctaaattacatgccataattgatcctaatcatgaaattgaatttcccgatattcccagagaaagatcttcaagatgtgttaaagtgttgtttaaaaagggacccaaaacagaggatatcccattccctgagctccctggctcatccctatgttcaaattcaaactcatccagttaaccaaatggccaagggaaccactgaagaaatgaaatatgttctgggccaacttgttggtctgaattctcctaactccattttgaaagctgctaaaactttatatgaacactatagtggtggtgaaagtcataattcttcatcctccaagacttttg

SEQ ID NO: 379321 - DNA, 282 bp, Homo Sapiens
gtattttgatcataacgtttcttattgataaccttgaatattagatatatccttcccttatacagttttaaaaatttccttccagcattttaaataattttcactgtaaagtatgtgtacttgcttttaaaaatatgttcccaaatggtttttccaatgttattattaaattttttcttgacttaatttttagtatgtcgattactgttatataaaagtattatttcatcttgtatattaatctcgtattttgtgacattaataaactttattagttcaagt

SEQ ID NO: 379322 - DNA, 542 bp, Homo Sapiens
cacactaacattcgttaaaatgtatccaatgtttgtaatatgtcataaaatgtgctaaacagttcctagttatgagcttagttaattctcagaacttttgtaagcagctgacaattgatttcattagctgatttgattttagctccattttacaggtggaaaaactgaggcacagagtgagtgaattcctgaaaccgtaaagataggaaatattcaagagggaattaccatctggatgggttgactaggtttcctctctgaatcaccattgtacacagtttccagggtcaggtaaaccaaacaaaaccatggatacctacactgttagccctcctccccaatctgcgcctcacttgtccttagcaggtgctcatttagcttacttgtgccctggacaaggatgctgtttacacacttgtgtttctctaaaacaagacatgcaccgactagctagtgttgtctagttccataaaacacataaatttccaaacttggcttattgaggtaagaaccagtataatttccaccaaattagatttctc

SEQ ID NO: 379323 - DNA, 536 bp, Homo Sapiens
  misc_feature (423)..(423): n is a, c, g, or t
  misc_feature (435)..(435): n is a, c, g, or t
  misc_feature (440)..(440): n is a, c, g, or t
  misc_feature (451)..(451): n is a, c, g, or t
  misc_feature (469)..(469): n is a, c, g, or t
  misc_feature (497)..(497): n is a, c, g, or t
  misc_feature (503)..(503): n is a, c, g, or t
  misc_feature (517)..(517): n is a, c, g, or t
acactaacattcgttaaaatgtatccaatgtttgtaatatgtcataaaatgtgctaaacagttcctagttatgagcttagttaattctcagaactttgtaagcagctaaaaattgatttcattagctgatttgattttagctccattttacaggtggaaaaactgaggcacagagtgagtgaattcctgaaaccgtaaagataggaaatattcaagagggaattaccatctggatgggttgactaggtttcctctctgaatcaccattgtacacagtttccaggggtcaggtaaaccaaacaaaaccatgggatacctacactgttaggccctcctccccaatcttgcggccttcacttgttccttaggcagggtgctccattagctactgtggcccctggacaagatggctgttttacacanttgtggttttcntcttnaaaccaggacnggcaccgattggctagtntttgttctaggttcccttaaaacacctnaatttnccaacttgggtttnttgaggggtagggacccgt

SEQ ID NO: 379324 - DNA, 517 bp, Homo Sapiens
gatgtacttaatttcaccactatattgagtttgaatgagctgaaagcaaaacacgcaaatagagaacaatgcctggccagcccccacgagcccggagaacaggtgtttcccatcggcagtctgctgcgcgcccttggccattttcctcctggagctataggtgcgccccaggcgttttcttttaggcagctttgggatcagtgcaggtcccagggcccagctggactccctttgggactgctctttcttgggacttttcaatacagcagcgttagcaggagggttcatctgtcacataaatatctgatcctcaggggtggcagcccccaagcttttcccactcccagcagatgcagaatagcatgaagatctgtggacaaactgggcaatctgctcctcaatccacccctccctcactttagaatttgaactctctctactgttttgcaaaagtggtttttgtaaaggtagtaaaaggacagaatcgcaaaataaaatggtcccagtaggtaaaccc

SEQ ID NO: 379325 - DNA, 405 bp, Homo Sapiens
  misc_feature (39)..(39): n is a, c, g, or t
  misc_feature (114)..(114): n is a, c, g, or t
gaaccttgacccaattccccgggaaactttgcccaaagnttccccatgggaacatgaaagggaaaccgaacatccgtttctgcactggggttgtggaacaccctggcccccaanaccaccctaggtttcccccacaggggccctgaaagactggaggttcctctcccagaatgttctggtttgattctgagagcaggagagacaccccataaaaatgattggggttaaatttctggcccaggtagatgggaactcacagccaaaatttaattaaggagaataaacaattgtgccacgccatgcatccaagtccggcagggcaaatccacacccgctactcactgagcttcccctgggccggaatgctccccctacatttgcaagaacaaagcctccttcctgtag

SEQ ID NO: 379326 - DNA, 496 bp, Homo Sapiens
ttccaaggaagcccagtcttcagaaaccccatttcataatcacccagttggatgaaccaaagtagcttttacctcccaaggacagagcttctcagaaaatggggcaaaaaatctccagacagccctactcaggttcctggtctctgttctcatgttctgacccccagaaggcctctaaatcactcaacttggagactcgcccagttttttcctaatcagctgccctgaaagcggttcagagttctgtcaacaagcccttgcacgctgggccttattaatgctgggccactcagagcccatgactcaggaacatggcttggggtcaacactgaaaagcagaaatcacagtactgataatgggaattttgtaggaggaaacaggcttttggaacttaatgcctttgttaggtttctggatttgcagatctcattgtgtgggcctgctttaggaggaaaagctgggattcataacaatctaataaacctgacccaaacc

SEQ ID NO: 379327 - DNA, 478 bp, Homo Sapiens
  misc_feature (87)..(87): n is a, c, g, or t
ctctagttttattttttctaatctttactgaatttggggcctgtggttttatttctgggtttattcctgactataaggttattcccntattcttgacaacagtgattgagaatttggtttttggcctgaccatttagtcatctctgtagatggatgacacagatctaattcctttcaagtgagagacaacaggaaatccggtttgttgggtccctttcttgtttgtttattttgagctcccagtcagttagaaatttagtgcccgctgcaaagcacagctctttgagacttgggattggtaagagggtgtgttgcttacttctggcctgtggctgaatttgcagggccaaagccaaaatctctccatatgtctgtcatctgtgatccatgtgtctgcaagtctataactgagaaaagccttgattccgtgatatgtgagtgtgaaataaattaataaattagttatgtctcttaaatc

SEQ ID NO: 379328 - DNA, 501 bp, Homo Sapiens
  misc_feature (194)..(194): n is a, c, g, or t
  misc_feature (264)..(264): n is a, c, g, or t
atgattaaataagaatatttaatggcatggaatgatatgtacactgtaggttcaatatgttttcaaaacatacctagcacctatggctgcctgtgcctagtaaatagaaaaggtataacagaataatttttacaatttacaaagtttaatacaattgagaaaggtttctataaacattgttaaaatatttcagnagggcaaatgcttactttgacatagcaatgcttcagttaccgggaatgccctcccttctttcttccaagncaattttatgcagcacgaagctcagtggctctactccaagtgccaacaaggtgaacaacccagttcctgctctcatggaactcacattctggtggaatttgtttttgcaacatacttgctgacaatatcaaattaataagccattagtattgaaaagtaatttacacactctccagtctggtccttattttgatatatgtcttcctatgagatggatgcaaactcacagcaaaaact

SEQ ID NO: 379329 - DNA, 549 bp, Homo Sapiens
tcaatctatattcacaggcccatacttcagtcagtccaatcatagtacagtgatgtggtggtagatgctatgaatttcttcattgtaaaatacggatcatttgtattttggggtgataaaatagttcaccatgggtatgagatatttattctttaaatcaaagtaaattagaatttttaaaaagcacaaaactgcaggacagtttatgaaataggtggcactattagggaatcttcctttaaagcaagaaatcatgttatttagaaagaaaaactaatcttaaacatactatttctaataaatatttatatttttatgaaataaagaggtatgtggaaattaatatttggtgatgttggacagtggaaaagtatctagagtttttacctgccttatctgaattcttcttgaaacttgagcttaaactctaatagctgtttccctttctattctgaacaactgtctccatttttcaagtgtgagagataagggctaatgatgacatctcatttattttgagtaaacattaaaattgttttacaagtctaa

SEQ ID NO: 379330 - DNA, 510 bp, Homo Sapiens
tgtggggtccctctatgactgcctgtaagacactgccaaggggactttcttcctttcaccagactgaagctaagaagtgctggagacagcagttgctttaaccaaggctgtgtaaaaccacctgaggatgaccctgggggtctgttttgtgcaccttggaacccatcggatccctcccaatgacacatttgtccagagcaagacaagatcacactttgacagccctctgtcaagatccttgctccaaatctccagactagcagcccaggagtctccatgctgttctgaagaagcagattcctcacccacccttcaactccttcccaggaggtaatcctcctccaaatctctggaaaagatacacctcctcttctctgataaaggctggggggtgatgcccctcccccagtttcccaataaagctatgcaagacaggagcaagggatctcacggcctgtttttgctacaaaaaccctttttcggaaaaaataataaagaaaggaatcagcc

SEQ ID NO: 379331 - DNA, 529 bp, Homo Sapiens
tcgggtagaaattaagtgactcaggtttgccttcagtctctgaccaagggtttgaaaagccaggagccagcctgagaactgtggctccagagggtgttctttcagccactccgctctatgcttctcactctgggtgggcacaaccatgttctcctttggtgatgcctctaacttaccgtgaaaatgtacctttcccttcgctattggcttcccttccctcctagtcagcccgagattcttttgaaaactttccccccgcttgcctgcacaaaaggcgatggaaattcaggaactgaaacatctgctctggggaatgcgtatttccacatttccaccgcctgtgtctgctgtcttatcttgaagacaggtgctccagggcttccgaggttattttgtctgttaatggacaccttgcaaagtaccacttaaggaatgagaattacaaacttttaattatattgtagggggaaaaaagtaggctgttttcctgataggtctagccattcattcaataaaccatattgatatg

SEQ ID NO: 379332 - DNA, 441 bp, Homo Sapiens
  misc_feature (62)..(62): n is a, c, g, or t
  misc_feature (174)..(174): n is a, c, g, or t
tgattaggtacatctgaagcctgttagcaataatgtgaacctgtgatcaattaagcagctgnccaatcattacctcctcttccctgctctttctacccagtaaatacaaagggctgtagaagcctcagagctgcctgcttttgcctcagtagaagcagggagtcctcttccttncttcccccgaccccttcttttaaaacagtttcttttaagttttcatttctgcgttcatcctccttcattcagtcccgtagtaaccgtggcaaaccacggcacttcaaaacctcataaaaagcaccacatattgcttatttggatacatatgttgtaaatgtgtgaaaacatgcatgggaatgacaaataccaaagtcaggatagtgactggccatggggaagggatggttattattgtcgtcttatatcttcaattccaaatgagcc

SEQ ID NO: 379333 - DNA, 524 bp, Homo Sapiens
agaaattattaaactcacaagtataaacaaggccctaaattaaagaacatgccaaccatgacttttgtctctttacatctatacaatgatatcttttggtctatggttgtcatattctgtccatacagatagaacaggacaaattttatttttaaaattccaggtggaaaaactgcccaaaacagtcatttaatgtgtagaccccgacataattttactttcctcagtttttaatttatcatgtcatatagcagcctaaattatatttgtctgtttatagaacagaatgaccaaataagattataagttacttcactatcttatactgttttgactgtgaagtcaggaaatagattaagagaatttctctttgacataagtttatgtttacttctctctttaaataaacttaaatattttaatatgataatttatttggtatcttggctattaatgtttaggagcttgatttcctgaaatttattattatgagttttgaatgtctgaaatgacatcgtttagat

SEQ ID NO: 379334 - DNA, 1173 bp, Homo Sapiens
  misc_feature (116)..(126): n is a, c, g, or t
  misc_feature (147)..(301): n is a, c, g, or t
  misc_feature (341)..(384): n is a, c, g, or t
atgagccaccgcgcctggccagaagaaatctttatcttggtgtgcagtgtctggtgagggacaaatgtcatctctcttggatctgaatctggaagaattcgcggcactgaagggannnnnnnnnnncagacagtatccctctgtcgnnnnnnnnnnnnnnnnnnnnnnnnnnnnnnnnnnnnnnnnnnnnnnnnnnnnnnnnnnnnnnnnnnnnnnnnnnnnnnnnnnnnnnnnnnnnnnnnnnnnnnnnnnnnnnnnnnnnnnnnnnnnnnnnnnnnnnnnnnnnnnnnnnnnnnnnnnntaccacggtggccaggatggtctcaatctcttgacatcannnnnnnnnnnnnnnnnnnnnnnnnnnnnnnnnnnnnnnnnnnntgagccaccacgcccggcctcactgaagggatttttttaatgtcacgtggctctcacaggtgcggtgtgtttgggtgcaagtgaagattacgactgatgcttaaaaacaaatgtaaaattccaggtggttgttgctatggggagcagctttaggacaatctgagtggtttcagttgcaagagtgtgcgtgtacgtccaagtgctacagtcaagattcaactgctggctttgagggcctctttaagaacagtaatgataacctaaggcagtttaacagtatggaatggttaccttttagaagttaagctatgggcatggaagttcaatcagtgcattgaagtttttcctttatctctcctatggttaatggtttctgcagaaaaggaccaattgatttctttctaaaacgttgcttcagggtgtagagacctttataggtcatgtttcaacttacagaaaatttttatagttcaaatataaattaagttcaatgtggaatttgtaatagaatttcaggtgaagtaaaatttccactttccttaggctgtttgcagtgcccagcaggccccatgatatcgagatggaagttctgttaaaggaggagattgatcagggatgggcagaataaggaatatgggcagctcaggctaatgatacaatgattgagatgtagaaagagggtcaggcacgggataacgcctgtaatcccactgccttgggaggcccaagacaagagaatcgattgaggtccagaccagcctggtcaacagagtgagacctaacctgtac

SEQ ID NO: 379335 - DNA, 530 bp, Homo Sapiens
  misc_feature (115)..(115): n is a, c, g, or t
  misc_feature (127)..(127): n is a, c, g, or t
tctgcccacgcttactaacctcccctctctgaatccacttttctcttctcaaccctcccttctttctttgctgtgttgacccccacccggaagtctgtcaacacctatggagaanagggtggagaanaaaggacggtgagcagggggttgaaacttgttccttgacccctctgtggccctcagtttcctccccagatctgtaaaggggtctgtaggttagctgtttcctgagaagctagacaaaccacttaagtctgaggattggtcactttagtggaaagagtgagatggaaacccacaaagtcaggacaccctggattctaatccttgtccaaccagtaaccaaatttattttgccttggagggcaaatgaaatccctgggccttagattcctcatctgtaatgcgatattcttagttatgcccatgttttttaaagtgtaggaaccttggcactaggatggcataacactgaatcacacattgagaactgtattcctttccgatcactttaaatccttctggttgtt

SEQ ID NO: 379336 - DNA, 475 bp, Homo Sapiens
  misc_feature (395)..(395): n is a, c, g, or t
ctttaaatagacatcatctcaagtctacaagaattatccaaaatggtatttaatgacatttctaggtcttcagacactattaatgcagattgtagcctctaggtcctgaagattttactagatactggttactgaaactgagctttcttgaattctttttccttccactgtggtttcccgcatttcaacatatcacctatttttgtcctcaaaggttacttaaatgttttcccacagaattaaattaaatatgaatcatccctcctctgatttttgaaatgaccctttgcttcctatgataatgattcttctggtccgttttgtagttatatgttagagtttgtaaatagtcacacattttgcaactgcatgtaattttcttattattttttccntcttcctctaaaactgctgttatttcttttaactttttgtgggaaaaattaaacccatctttcactttgttgatatactt

SEQ ID NO: 379337 - DNA, 448 bp, Homo Sapiens
  misc_feature (74)..(74): n is a, c, g, or t
  misc_feature (116)..(116): n is a, c, g, or t
ttgtagcctcagttctgtcaactcttctttgaatttcaagtcccttcatcattcaggacaagttgaacttgttntaagctagtccagtatcattttgtttacggtcccataactgnctggccatcatgagtatggtctaaccaggtggaatagtgtgaagtggaccctagtaccttttcggtgcctgacacctgccctcacatgaaacaaaattttagatagaacttcccaaaaatgttttaagcgatacagggacttatttgaaaggataaaactcctttgcatatatgagctatatgatacgtttgttttataaaaagtcttattcctttataatcactttgaagtacagaattcaaaattaggatatttgggtgttgccctagaagagcttacaatttagtttatgttctttgcacaatgattcataataaaatgactctccttg

SEQ ID NO: 379338 - DNA, 547 bp, Homo Sapiens
taaaaagatgactgcagctgaagctccgcaggcagactcagaatatttcgtgtgctttgaagcaggaacgcttgtctttatattacgtaattcatgctattgctcatttaagttggtctttcactccagataggtttttattgattttaaaagggtcatccttcggaatagttggggtaataattgctcctacttcttgactgacccttttattcttatacattctttctttttcaaaatgccacactgtactgggaattcagatctgcccatcctacagctacccgggccccactcaaaaagggcttctgagttccagaaagtcctcgtcatgaaacattccacctacagcacgtgtgtgcgacacacaccagactctgatgccagtgtaagccaaggctgtgattggctaatcattttacttaaaaggttttgaccaggtcggtgacaatatttaatttctagcaaccattttagaggtttcttacttaactccgtttgttaaagtggtgagaatataaattctctaattggtgagaactttttt

SEQ ID NO: 379339 - DNA, 519 bp, Homo Sapiens
  misc_feature (51)..(418): n is a, c, g, or t
ccagttcttacagttgtgccaaagaaaagatgtacagggtccaccgtgatnnnnnnnnnnnnnnnnnnnnnnnnnnnnnnnnnnnnnnnnnnnnnnnnnnnnnnnnnnnnnnnnnnnnnnnnnnnnnnnnnnnnnnnnnnnnnnnnnnnnnnnnnnnnnnnnnnnnnnnnnnnnnnnnnnnnnnnnnnnnnnnnnnnnnnnnnnnnnnnnnnnnnnnnnnnnnnnnnnnnnnnnnnnnnnnnnnnnnnnnnnnnnnnnnnnnnnnnnnnnnnnnnnnnnnnnnnnnnnnnnnnnnnnnnnnnnnnnnnnnnnnnnnnnnnnnnnnnnnnnnnnnnnnnnnnnnnnnnnnnnnnnnnnnnnnnnnnnnnnnnnnnnnnnnnnnnnnnnnnnnnnnnnnnnnnnnnnnnnnnnnnnnnnntctacaaaaaaaatttttttagttagcaggtgtggtgatgtgcacctttagtcccaggaggctgaggtaggaagattgcttgagcctggagaggtcagggc

SEQ ID NO: 379340 - DNA, 457 bp, Homo Sapiens
  misc_feature (25)..(25): n is a, c, g, or t
  misc_feature (44)..(44): n is a, c, g, or t
cctgccacaatgttggcccaaagantttgaagttaagttgttcnaaaacttacgtgtcagggaaaatatcaaaactcccaacgtcaagaaagaactaagcaaccccgggccctgatttctgccatggttctgaattgtctagagctgagtgtgggcaccccttcaaagagggcatgtgttctgcagttcaaccctggtctccaccattcttgtgttcctctttgccttatccacatcaatcatttacagaacttgcctggtccttctgaggcactgacatttgcaacctctcctatatagaattaggaatcttttggaaatgagactcattgggttcaaaaccgtacagcaataaaaacttcttggggactttaatgctaacaatggagacattccaaggagtgaaaacagagatttgcaagacgcctcatctcaaagactaggagccaagcctgta

SEQ ID NO: 379341 - DNA, 320 bp, Homo Sapiens
tgttcttaacatttcatcgtcttccaaaacgacactttcttagcaacttcaaagtggcaactgatggtttggtaacgatataataacaaggaataactcctatattcttaagagactcagaatttcaattcttaccacatatacatctattttcttaattaaaacaaaaagtcccagataaagtgtaatgcccagaacttgaattttaatgaatgcaaatgagcccaaagtgagaataatcagctgaagttctaggatggaatatttgtcttgtatttaccttggaagccactagcttttactcaactataaaagaagcc

SEQ ID NO: 379342 - DNA, 503 bp, Homo Sapiens
  misc_feature (450)..(458): n is a, c, g, or t
aagataaacctactattgaaatggtagtttgtaaataaccagtctccattaaaaggaactagggctccttagaaaaataactgttgcccaaagttggtgcagggaaagtacccagatgggtgtaggcccatccttggctatgcccagaaagtaaggaagggatggaagaaaaatagggacgtccttgaagaatacaggatcaggagtggaggtttggggcataaaacaatgatagaaatgaatgatcatccatagaataaaataagaattcatgagtccatactgataaaaatcaataaatggaaaatgaaactgtcttaccttagtgtaatataaagtgataaatgtagaatcgtgaaattagaagatcaccaccaagaaaaccatcaggcaagagtcaccactagaggctacaaaactagtgggtgaaattctgaggaaaagcataannnnnnnnnaaagtatctccctacaagatacttaaaactacaaaggaaaaaaaa

SEQ ID NO: 379343 - DNA, 498 bp, Homo Sapiens
  misc_feature (15)..(15): n is a, c, g, or t
  misc_feature (66)..(66): n is a, c, g, or t
  misc_feature (102)..(102): n is a, c, g, or t
  misc_feature (177)..(177): n is a, c, g, or t
cgagtcgtcccccanttaggaagtttttgggggtcagatctcacccccccttgcccacacaggtantgggaagaagactttgggccgacgcccctcacttantcccccagacccaattgcagggactttagtcctctggagtgctgcgtgtgagttaccttgtgtgtctgtgtgcgngcctagaggtcaagtgtaactggtgttcgtgaagcacctcgtggttgcgggtcctcctaactctcgtgggtctcctaagcgcacccgcggggctggagcggaggttcgtgtcctctgggagggtcagtggtgtgactgaagctgggagttagctcgtgtctgtgggtgcctcggtgtgtgtctctggggctctgagtccctgtgcgtgcgtgtgtgtctgtgaacccgacaggaagctccccgagggcaggaatatgttttgctctctactcgatcccagcgactggcaacgagcgtttaataaatatctgttgaatgaat

SEQ ID NO: 379344 - DNA, 528 bp, Homo Sapiens
taagggcctgcgtgtcttccactttctcaacacttagcatgcttaatgatactggaaatgtatgtaattaataaatatttactgctgtgacaggacaaaaacagcacattaattgggaaatccataaattatatatgcatgcatctagtgttccttaaacttaaggatttaaaaatattttattataatgtttatgcaaaatgcaaaagatagggctaagtaatatttgtattttgcctaagatataaaagccttcaatgatccatgccaactctaaatgatattctggattccatattagcatttgaagataccagtaatggtttgaaatcacaaatatcctttaaaaagctgtaaatgttctacaatgggataccgacactggctaacctttattgggaagcttactctctaattctattggggcagcctgtgctgagtgctttcaatgtggtttctcactgaagggcagagcccacggactgtacctctttgggttgcagaagggagcacttcggaattttcccc

SEQ ID NO: 379345 - DNA, 568 bp, Homo Sapiens
ctctgttttctcatctgtaagactggataatagctcctaccacacagagtggttgtaaggattaaaagatataacccatgtggaatttttaatgtaccattggcacctggccagttgtcaaatcactgtcaagcttttcctggttactgtttccaagacccccaacacagtcatggaacaaccaaccaaccacccatcacttgcccattcaccctcaaccctgtaattgtgttattttggtccttagctgctgttctgggcacccacctcatgtttgacttggatttcaaacttgcagtcaactcaaacctcagttcttgtaacttgttcccaggcattgaaatttctgacctatgtctctggttccttagcactgatatgccctggtgaggacacaggtgtccagcaagccctgccttgtaagggtcacttcagaagtccctggacattaaggattaaatagcatcattatgtattgttattagtttattttctcaagtgacatcaaagtatttttcttcagtatgcagaaataaacagttctgtttgtcctttcccagaaaaaaaa

SEQ ID NO: 379346 - DNA, 420 bp, Homo Sapiens
  misc_feature (29)..(29): n is a, c, g, or t
  misc_feature (53)..(53): n is a, c, g, or t
  misc_feature (74)..(74): n is a, c, g, or t
  misc_feature (89)..(89): n is a, c, g, or t
  misc_feature (231)..(231): n is a, c, g, or t
  misc_feature (312)..(312): n is a, c, g, or t
tagggtggcgataatgattcatctggatnttctttgcatggatgtatagaccntgcaaaaatttatcatgctgnacgattatttgggcnctttactgtgtttatactcaaggaagcatgaattgcaaaggaacaagatgaaactttaggggttatggatacatggattattttaattgtaggatgaccttcacagatgtagacatcctcaaaacctcatccaaagtacacnctttatgtgcacctttactgtacacctaccttatttcctcagtaaagccattacatttttttaaaaaactccccaacagcnccatttatgcttgagtagaaatgtaatttcagcaaaacattaataatgtagctagtttgaattttattggtgtgggtaaagttttaataaatcccctgtttgaggctt

SEQ ID NO: 379347 - DNA, 628 bp, Homo Sapiens
  misc_feature (313)..(313): n is a, c, g, or t
tgaaattttcatagattgctttcttcatttcattatagggtgtgtgatagacttactcatgtctaaatttggccctgccaaattccacatgtaactgatttatcattttcttagacctcttcatttctgtcatcgacgttgaggatattgtttaggaggctgctttttaatgcccccaggtttagttgctccccaatatttaacagcagaggtggtgtcaaggctccactgagacagggatgctgaacctcagttcgctacccggctaaaaacctcacccttcacatgcagagcatgtcggtgggtgggagtnctcacccaagggacacgttctcccatggccctgggttgtaaggatgctcttacatgagagacattaaatttgaggttgctaacataagttcccatacaatgcaaccaggcctgttcagtgggtggtcagcaaatacatattaactgtcagagtgagtgaatgttcacctatttttatcttatttttgtactgtcatggaaaacaaatgtttatcctataaaacaattgtccacacatcgttgcttaaagaaatgcttcccctaagctattatgccaaattggtactgaacaaataaattttaaaaggttattttc

SEQ ID NO: 379348 - DNA, 437 bp, Homo Sapiens
gtaggcttgagtcatggagatcacagcagcatgaagttagtagaagaagcagtacagctgcaatatcagaatgcttgtgtgcaacaaggcaactgtacaaaaccatttatgtttgacatttcaagaattttcacttgctgtctaccaggcttacctgaaacttcttcttgtgtttgtccaggatatatcactgttgtgtcagtatctaataatcctgtgatcaaggaattgcagaatcagcctgtgcgaatagttctcattgagggtgacctcacagagaattaccgccacctgggatttaataagtctggcaaatattaaaacagtattaggataggcatgcgggctttcaaggaaggacagcttcaggaaggaactgtgggggcaattcacgtgtttacagggtgtttaatcccagtttcaagggtggaaccttg

SEQ ID NO: 379349 - DNA, 569 bp, Homo Sapiens
  misc_feature (336)..(336): n is a, c, g, or t
tcttcacaaaagaacaaaggaaacataaacataatgaatattttttgttaatccaatgcctattcctgtaaaaatggattcctttcctgtaaaatcgatagaatataggctctaatatagcaagctcatttcatacgtatttccaatctattaagggagaggcttgtgtcttttttcccaagcaaagccaaatagcattcaatgagagttcactttggtgatgtttaatgaaaatcctaacctcagatagaggccctcactggaatactcccatgaacagaaatgtaatcctgggcaaaaccctgcaggctttatccctgggaaatgtaataaaanaaaatcagaatattgtctctattgctgaatcagtagccctggaagtcactgcagaagttttacctgtgggaggctatgggaaccctcttgtgtcatgtgctctcaaatgtgaatgagcgggccaagaactaagaatattcaaaagattttaaatgtccaaataggcagttctggaaatacctcaacattgtttggatattacatttgacatgaaataaaaaggcatatgaaat

SEQ ID NO: 379350 - DNA, 279 bp, Homo Sapiens
cccttcctctgcaatcagatttcctcagcccggtacattatgaacagccttagtgctgttgagtaatttatatcaggatgattaggaaagcttttctctgcagattttaatttttcttaaattaaaccactggctcaaacagaattttccttgaacccaagttttcacattagagatttgcataacttttaataattcttatccattttccttttctatcccctcttacctataattctcagtctttattctttcaaaaaaggaatgaatctcatcttt

SEQ ID NO: 379351 - DNA, 439 bp, Homo Sapiens
acagcctcaaactctttaggttaatgcgtagttttcaaatttcttttctcatgttcaaatagctgtttcctcaagcaggacagtctttcccttatattttcagttccagatttcctcattggattattagaggttaaaaaaattatagacattgcaaaaagggaaaaggggaaaccaacttacgtctatactactttatcttctgatttccgaaagggaaaagaagtttgttgcaatcttctgtgtttcttattaagcctctgaattttttcactgctctgtcttatagttttagtatgcttagcctggtgtgtactagacattgcctctggcactacaccacatgcatttagtgtgggcctatataaacttagtcaagcaactgtgttagaaaaaaattttattctgtggtgaaataaattcttagaatttgaattta

SEQ ID NO: 379352 - DNA, 434 bp, Homo Sapiens
catcttgtcctattggaaggtctttaggggcaataacatgcatggagctgtcaccttctggaggacttgcctgaggctgttttacagttaatttttctaagtagaaggaatgcactctaaaataatgataaaaagtattgtatagtaagtgcataaaccggtaatacttactatcaagtattatgtactgtacgtaagtgtataacctagactttttacagctcagtaggtttgtttacaccagtataatcacagacatagtaatgtgttgtgctacaatgttacaattgttctgtcactaggcagtagtaatttttctgctccattataatcttaagggaccactgtggtatatgaggtctatcacttgaccaaaatgtcattatgtggtgcatgactgtatttgaaactcagcccaaattaaaatctctctg

SEQ ID NO: 379353 - DNA, 521 bp, Homo Sapiens
  misc_feature (121)..(121): n is a, c, g, or t
  misc_feature (150)..(150): n is a, c, g, or t
  misc_feature (410)..(432): n is a, c, g, or t
gaggctttcaacctaaaaagtactgtgtatttcattgactagaactgaactgaactgtaggctaataaaaagtaccaaatgaaaatattatggtatctcattgcactccattgtagatggnaatgtagtgtgacccagcagtagccttgnattccattgtaaatccccatctgaatactgacaacagttcaaaacatccaggagataaacctcaaaggtcacatttgtgtgaatggtcattgtgcatataagacatcattttattatttgaaaactagtagtgtagctcttaagacagggcagtgtcctaacctctgacagggatagaggcgagaggagaatcagtgggctgccaaacagtcatgtgttcataggtgaggttctgtttcttttttagctgttactattgnnnnnnnnnnnnnnnnnnnnnnntgcatgaatggtagcagttacttcacaggcaaatttcctatgaatcccagagtattgcaacagattagcagcaaataaagacctgagat

SEQ ID NO: 379354 - DNA, 540 bp, Homo Sapiens
  misc_feature (210)..(210): n is a, c, g, or t
tggccccagggaggagggacacggggaggaacttctggggctcctgctggggccaacttccctgggctgctccctcgggcctgtaaggggaaatgcccttctgaacccctttaaaacgtccccctgggtggacctcccctgctgcaggcacccatacctgcgaatggtgttacagggctgtgaatgcccaaccgtgaaggatggtggaanaggtagaagttcccagccccaggcagatgtgcacaaacagagcccccgcgtacaggtccagctgcggagggagagagccttgtgtggggctgttattcccagggctcccagcaagccactccctgggtgacctcgtggcaaagccctctctgggcctcggtggcctgtggataaggaggggagacccccactcgcctgcctgcctgcatcacggggccattgtgaggttgggggaagacctggccgtggagctacaagcttgtgcggatgtcaggggacattactgttgctaataaagtccaaagtggccaatgcctttcccaaaaaaaa

SEQ ID NO: 379355 - DNA, 510 bp, Homo Sapiens
  misc_feature (313)..(313): n is a, c, g, or t
  misc_feature (327)..(327): n is a, c, g, or t
  misc_feature (449)..(449): n is a, c, g, or t
atggaaacccaaatggctagaaacctcctttagaaacaggagctttcagatctgcatgcagtgacggtaaatggtctatttgggtccctaaacagcgtccagcacatcatgaagggttcatcgattgctgctgtgttgcatatttgtaaactcacagtcgtctgactcaccacctgggattctacctgggaggctggcaaggcagatgttaccaccaccattgttctctctaagattaaaaccattttattttgtctctaatacatttctccccaagttgatagatgcagtagtaaccaatagtaaaacagtncatgcatacaattncatcttctcacagagaatcatgactttacaagcacagacttacaatctatcgggaaagaagaaggtctgtttttagagagacaaaccccttgtaaacctcactttgttataaagtactgttnctttgtatatgatgttaaatttgcatgtgccttaaattttattaaacatttttatatttgg

SEQ ID NO: 379356 - DNA, 250 bp, Homo Sapiens
cagcttttgaaaaagtgattgatttgctttttatcccaaactgtccatatacccagtaaggcttcaaaaaaccagtcaacaatgagtaagtcaatcttatagattcttcttcctcgaataaaatacaaagaattagttcccaataagtattttaactttgttaacaactgaaataccccataaaaaaaagaacttgttgagagtatttctttaaaatggttacttgctgcccaggcaccatggctcactc

SEQ ID NO: 379357 - DNA, 449 bp, Homo Sapiens
  misc_feature (52)..(91): n is a, c, g, or t
gatcaggccaactacactacagcctgggcgacagagagagactcccctcctnnnnnnnnnnnnnnnnnnnnnnnnnnnnnnnnnnnnnnnntacccaatagctatggccctacccattccccaggaaagaaagtaaaagccccacaaaggtaaatattttcttccctttggcgtcttctgcccttcattataaagagttgctcagttgttgaaaaaggatcttaatatgcaaaactttacattttagtgagaatcaaaggcaaattcttttgaactgtgtcacaacgaataacattacaaacatgtctctcatcagcacataactcgtccttattttagtcaagcaggcaaattagtgggcctgtaaaaacagcaaggtagtaggagaaaaatcatcagaaggttaatagcagaagggctggtttaaaagaagcctcctaatgcatctg

SEQ ID NO: 379358 - DNA, 512 bp, Homo Sapiens
cgttgggaaccctggtgacatcatatatggacctgggaatgtaaagaaacgtaggaaatctgaatttatgacttttctaatctctctatcgggatccttttttggaatcaagatgattttccttctaaaaggtcattttattacagtaatgggcagggtagacatacctcactagcgtactctcaaaatttcttgcatgcatatgctttctccggcatgcatatgctttctactacaatgtgaacaagccctacgaaagctagccctaatggaggatgagagtaccacgtggaggagagctgaagtgccccagccagcagctagcctacacgccacagctattttgcttgtgttccactcgtcctatttgcataatattgttctttaagttaacccattcttaatttattgttttaatcttaagcaataatattcaagaactaatgagttttgtgtattcattatatttttccataatatatattatactaataaatgcccattcaaatttt

SEQ ID NO: 379359 - DNA, 539 bp, Homo Sapiens
ttcctcatcccctttattgaggactctccttctttcatacttagtatttttatattacctgtatctattattctacgttgcaagaagtccttttgggaaggcagagtataaataatgtagttttaattaaatagataagtattaagtaaaactttgccattaagaagatgtaatgactgacgttgccatagagttgtgtgatgtagagtaatattccatggtgtacacatccataattatgtttgccgaaacatgaataccctactacaggtctttgtgatagacatcagggtggggatgcataggggacaaaaatgtacacaattttgtgtctgctctcagagagattacatagtaggagaggaagacccagtattaaaaaatagaataaaggcaagtgccccaaatctttgtcattaattttaactggaagagaggcttaggaaagatgagacatttaagcattgcatggaggaaaaaagaagtagatctcccttggcaggtggataggctaggacattccaaactgagaaaaaaaa

SEQ ID NO: 379360 - DNA, 506 bp, Homo Sapiens
  misc_feature (13)..(13): n is a, c, g, or t
  misc_feature (43)..(43): n is a, c, g, or t
  misc_feature (63)..(63): n is a, c, g, or t
  misc_feature (98)..(98): n is a, c, g, or t
  misc_feature (131)..(131): n is a, c, g, or t
  misc_feature (353)..(365): n is a, c, g, or t
aaccaattggggnaaaacctaataaaaatcgggaacaaacganaagaaacttaaccagtgaancatgaaaatgaacgccctccctaggtgttgaaggnctggtacctgttacccatctcccattttcccancggggggcccccatgtgtaggaatgttgagtcacttgcctcagggccgtaacagctgagcccaggtagagcctggggttccatcccatgtttaaccacagaacctgccccaaaccattgtgcaatactgccgcattctgaagcacgtgtaaaagctttccagttgggcaggtctgtatataagactcagttaaagttaaaagataaaataaggtcattgttnnnnnnnnnnnnngccactatttagtggtatttagtcaactatctttgccaaaagctggtgggggtgagggaacgtgtgagagcaggtcctggaaacatccttgatcattgtcagaatagttttgtatgaattcatacaataaaaaatagaact

SEQ ID NO: 379361 - DNA, 458 bp, Homo Sapiens
cttcttaatgttgcctggaatacatgagtcttcctgatctcttcaaacgggctttgttttgttttgctttggggagaattcttttgacgtttttgaataagctgttaacaactttaatacctgtcttgtttgttttcttcagaaatttgttaattctccatgattagcaccctttatgtggttaccctcattattttcattcctttttaattctctgttttaggaatgcttgtcaaattcgtcactaaaattgatttactttcttgaaaacctgtttctgctgctcccaacatgatttaatcttggctactgagcttttggttacgttgcactccctttaaaattactccgtttaagtacagtgttcactctttgggtaatgtgtacaatagaagcccaatccccacctatacccaatatatccatgggacaagcatgtacatgcaccccctgagtct

SEQ ID NO: 379362 - DNA, 477 bp, Homo Sapiens
gacgcaccatccttgggagtggcctgaaaaggcctcggaaagggggtcccagggtggctgaacctcaagccatcaccccatgccgtccaaccctgcaaacacatgctgtgccttggacctgccttctgacggggccggggtgcccgtggggtcccagtccccgtacgagcatctcactttcccttccatggtgctgcttggtggccgggagaccatatgtcccagccatagtggcagatgctctccaggccggctaggggacaccggccctcatggcaggtgaggaggcagtgcactgttttgggggctctgaagcccggcctgcccgacttgaagtgtccagggcccaccaccttccttcctggttgaggagtttctgggagaatggtcaaatccccaatgtatcaactcagctttatctccaaaacctaccacttcccagagaacaaaattaaagaagatttcccagaaaaaaaa

SEQ ID NO: 379363 - DNA, 473 bp, Homo Sapiens
  misc_feature (68)..(68): n is a, c, g, or t
tatgtcaggtttcatactagtaaataaatgtgtagtaagtaatttagcaatcttgaaaagtgatttancctttttaagcttcattttgtgttctataaaatggagataacattacctgcctcaaaaaatcattctgaatgttaaataagataatgaatataaagtacatagtgtatataaagtgcttatattagtacctgacatacaagaccttgtattccaaaagtattttcttcttactcatgttacaaaatgtcaatgagagatttagtgagtataaggtttggtgttctccctctctgatgtgctaaaatttgatgtttgtatcttcccttgctggtctacttttgcacttctttctagttagcacttaccactctttgtacattataggcatactgaccaagattcagttgatgaagttgaatggcataaaggggttaactctcctgaagtgaattttttttttattt

SEQ ID NO: 379364 - DNA, 499 bp, Homo Sapiens
tgctgctgcccaactcttcctttgtcacctctaggctattccactaagttacttataaactggtggctttaactgagggctgtgtaaaggtactatttggcatgtgaagtcaggataaatttatcgaatgtccgttttccacatgcaactgtgttacagaagtagtaaaattggaagaatccatgtttaatggtgttacccactgatggaaacacacaaacacccaagcctaataataaatatataacttaaaaagcctaattatatgcactgaaatggtgggaattttagtgatgcagtaattgaggagtctggagttttgtatttggaccaagaattatgagatgaggatctttttctgagtgttctaaagggcttcttgagggggagtggtttaaagcacttcatgaatgatgtgaagaaggtaccttgggctgagacagcattctaggtacagatggcactctgttcaaccaactgtggatggaaaatattctga

SEQ ID NO: 379365 - DNA, 416 bp, Homo Sapiens
  misc_feature (11)..(11): n is a, c, g, or t
  misc_feature (22)..(22): n is a, c, g, or t
gcccaggaatnccctgcaaacnaaaatggcccccccacaatatttttaaaattaaaagggttggccctaagaatccctatgtaaatatatattccaacctgatattgggtagttataaaatagtgttctgaatcaactattttctgaatagttttctgaatcaaattcagcttcagagttttctcttttagtcaaaactttgccaaattaagctggtaaccgatgcagagcccagctttctgaaatatggatttagacgtgcctgtttgtttttccctttttaatatcaattatctaattcataggtccaatacctgtgcaccaattcacatatatatgttacctcctaatctctggaagcacagtggatgggtccctaatatcttgtcagagagttaatattttggccaaaaaaa

SEQ ID NO: 379366 - DNA, 513 bp, Homo Sapiens
tatttctatgctgaagcagattctgaacgtcttaaaatctgttcattatcagatgctgaaagataaagagcaagtaaatgaatctatttcagtttttgtgggtaatttagcccagtaaatttaaccttatttcctttaatctttaagttttacctactgaaggcccagaatagatttttttctcttaaatttttggcaagtataaaaggcacattccagaatgtcactttcatagatactatgaatatcaattgtcaagtgtgttgatttcctaagataaaatatttgagaattaatattacccaacttgtcccaataaaatgtttttaagttgcctattttttaaaaaatctatcaattttgaattgcatacctagctaaatttttttaagattgaggataatatgtaaaataatttatacaagtaatataaactaagtttacttaaattatttacttatttaagaaatctaattacattttaaataaattgctgttacctgttaaaaaaaa

SEQ ID NO: 379367 - DNA, 488 bp, Homo Sapiens
  misc_feature (37)..(37): n is a, c, g, or t
  misc_feature (90)..(90): n is a, c, g, or t
  misc_feature (254)..(254): n is a, c, g, or t
taaaaaatagaccagtgaaataatgataatgataatncattaagaaatttgaagtataaccttctaacagagcattcaaataaaaaaatncaagtaatagaatctgtagtatacattttggccaactttgaattgtttgaagaaccgtggggatgcatactttcttttttctcttatgatgctcccattcacaaattttcaagtgatatgatactgttaaattctgtaattcagttacttgaaatgatgtttgncatagttagtcagtaaatatttcctattccgccctatttatgtatttatttatttggctggactggaacaaatatagttaactgatttgagtatttgttaatgcaaataccaaagcccttagccatattattgtaaaactattttaaagtatcataatgattttaagatttatttttgcctggtgtatgtggctttttatatgatcatttatgaggataaatgattataataat

SEQ ID NO: 379368 - DNA, 393 bp, Homo Sapiens
  misc_feature (326)..(326): n is a, c, g, or t
agattttgcaagtggaattgggtagatctgttaaggacattcagtcctgtcttctgccaggcattagggtctcttctagcatgtttcactcaatttctccagccaagaaatgtagggttattctttggaagggggattgtgataagttgggatattttggttgtaagcttcagaatcccatttcaaagttgcataggcaacaagagatatgttgccacccataactgtaacagtcaggggtattcctgggctgggggcaggatgctgccctggactgtgtctcccccgcatgggtatttgattctctataacccaaaccagatttnccccatgcgggcagcaacatggcagttggaagctccaggctcccttcttcccggctttgataggcag

SEQ ID NO: 379369 - DNA, 377 bp, Homo Sapiens
  misc_feature (24)..(24): n is a, c, g, or t
  misc_feature (65)..(65): n is a, c, g, or t
  misc_feature (264)..(283): n is a, c, g, or t
cccaggaagaaggggcccactggncttggccctggaacttgtctccctactactgcagcccaaanccagtggggccccttctccctggggaatgggggagggtgggtgctgggggcagaggcagtgcccagtcagtactgcctccctgagcagcaagggaccccaaccccagagacccacgccctggtccagcccagcccccaggcccaccgtctgcaccaggaaacccttagcaccaaatgtcggattgcgagtgtttgtatnnnnnnnnnnnnnnnnnnnnggttgttacttgtcacagcaacaagactggcatccactacacccaggagacacacgcacacgggcaaacatcaaaattcctgcggccgcaaggg

SEQ ID NO: 379370 - DNA, 424 bp, Homo Sapiens
  misc_feature (158)..(202): n is a, c, g, or t
  misc_feature (205)..(229): n is a, c, g, or t
  misc_feature (232)..(232): n is a, c, g, or t
  misc_feature (238)..(238): n is a, c, g, or t
  misc_feature (244)..(244): n is a, c, g, or t
  misc_feature (248)..(248): n is a, c, g, or t
  misc_feature (252)..(252): n is a, c, g, or t
  misc_feature (269)..(269): n is a, c, g, or t
  misc_feature (283)..(283): n is a, c, g, or t
  misc_feature (287)..(287): n is a, c, g, or t
  misc_feature (290)..(290): n is a, c, g, or t
  misc_feature (301)..(301): n is a, c, g, or t
  misc_feature (322)..(322): n is a, c, g, or t
  misc_feature (326)..(326): n is a, c, g, or t
  misc_feature (330)..(331): n is a, c, g, or t
  misc_feature (337)..(337): n is a, c, g, or t
  misc_feature (395)..(395): n is a, c, g, or t
gtagagacagtctcaagcaatcttcccacccaaagtgctgggattatggtatgagccaccatgcctggcttcaaactcctgggctcaggcaatcctccctcctgtttgagcctcctgagtagctgagactacaggtatatgccaccatgcccagctannnnnnnnnnnnnnnnnnnnnnnnnnnnnnnnnnnnnnnnnnnnngannnnnnnnnnnnnnnnnnnnnnnnnggnagaganagggtnttgntttnttgcccagggtggtctnaaactcctgaactnaagngancctcccacctnagcctcccaaaattctagggnttanaggnntgaganatcctgcccagcaacagcaaaatttttaaatgaagtccttcagggcagaaggaaatantaccaaatgaaaattaggaatttggcaca

SEQ ID NO: 379371 - DNA, 491 bp, Homo Sapiens
  misc_feature (49)..(49): n is a, c, g, or t
aatcagtgacgggaagatggaagggcatgatgaactctgccatagaaancttcctccagcctgaagagaaggatgcactggaggaagccggaccctcacgagtggagaaaaacccttggtgattgtaaaaaagggcccctggagctcatttctgaaatcgcactctccatttccagagactaaaggatgtcctttgaaatggctggactcagagagttggagtcgttttgagatgagcattagccccagctttgtaaccaatgaggaacacttacttatttttaagtatcttgacagaagcaatttgaacacagtgtcccgtcatttctagaaacagaatggtctcttctagagagcttggataaggaccttgctgggttgagttaggttttaatccttgctttggtttggaactgcttcgggctccagaacttaaattgcttggtccgtggcatctgatgtaccaacagagattaaaagtgtaaagcacc

SEQ ID NO: 379372 - DNA, 537 bp, Homo Sapiens
ttccttaatcattaattttattagtagtataatataatgttaaatttttgttttggttccagttgaagagcagcatgatgataggaatttgcactagaaaacaatactaatatcacaggaaaacattaagagtttcttctctctgaatagtggtcataataagcccatccttccttttcatagaggttgatggtgtctttggagatgatctatctcacggcctcctcagggcaggtgtccattgtttacctggcaggtgttccttgcacctctgcttgaacactgcccatatttggcagcttatcctctggggagtactgttcccttgtgggactgctcaggtttattctttactgagctcaaatctatgtgcatatgctctttctcactggcctgattattccttcagggcaagtctactcttcttgcagatgaagcatctagccccttacagtcttctcttctccagtgtaatatattctgctgctcttcaagcagtgcatttctagacactggaaaatcctgaccctcgtgcca

SEQ ID NO: 379373 - DNA, 347 bp, Homo Sapiens
  misc_feature (32)..(32): n is a, c, g, or t
  misc_feature (39)..(39): n is a, c, g, or t
  misc_feature (177)..(177): n is a, c, g, or t
tttgaaagaaaagacctttaatgtccttttantcctatnccttcccgatttggggtttaaattaccccccaataagtttgccagaatattcctgattaactactgccttaggtgatatatttccatatgagaactatcctttacacaatgggaaaaaatatggtaaccacttcattncatcagagaagttgtgttttgtttacttgtattttgtttgctaaatgaaattggttatttagactcatggcatgctttttctcaaatggagatttaaaagtcatttccaatgtccttctaacttctggccaattcccagtaggctatagaataaacagttttcatataat

SEQ ID NO: 379374 - DNA, 534 bp, Homo Sapiens
aaaaaaggaaatagacattataaatactgggaaaaaaagaaccagaaagacctttataggtgatatgcttgaatacctagaaaactcaagatatgctaccaaaaaaaatctttcagacacctaaaagaatttagtaaggtggctaaatataagatagcatacaaagattagcagcttttctttatgtcttcgtaaattagaaatcaaagttagggggaaaatgtcatttatctttgtaccacacatttaaatatacagtaataaatatcacaagaaaggaacagaatctatgtgaagaaaattgtgaaatttttattaaaggataggatataaagcactaggtggatagtacagagataccatgtttgcaaataaggaaatttatgatcaaattacctgtcttaacatagaaatcgatgttaattctaatacaaatctctggaaggctttagggaaatagagataaaataattgtaaagttcaaattgaatgataactgagaattgcaagaaaaaaattgaacaataatagtta

SEQ ID NO: 379375 - DNA, 441 bp, Homo Sapiens
  misc_feature (85)..(85): n is a, c, g, or t
  misc_feature (104)..(104): n is a, c, g, or t
  misc_feature (159)..(159): n is a, c, g, or t
taacctgggtttccccttggttgggtggttggcctgtgggtccaaatggcaaatatgccaaaaaaaggccaggaagaccccaaanccatgtggggccaccctcncctgggccttatttcccctccattaagacctaaagtgcactttccaaagaattgnagcctgtaacattccacctagatagttaagaaccgtagccattgaagaaaatagaagcctgaagaaaaaagagcaggtccaggcttttaaaagataaaatttataatgatcagccagacaatatttattgatttcatttgagcctaattttagggttgctggaattgttttctttgtgtgttcctgatgtagagacactttaaaggtacatagacatttcccctccaaaatgtaagtcatctaaatgttcctaaaagctagggttaatggttctctgttcta

SEQ ID NO: 379376 - DNA, 519 bp, Homo Sapiens
acagtaaaagtgtgaatgcaatgcacccattttacatgtatcattcattactatgctcgattggtgtgccctttgccgcaccacagcatatttagaacaaaacagatcagtcggttggggggaattccagtaacactcctacacttgtatcccagtcaattgttgaagggtaaccccaatccttggatgtggtgaaaagagggtgggccttagggtcctaagtgaaattgactgcccagtgtgtgactctgaatcatttatttatatctctgaggttttcgttcccttttttataaaaattttattaaataagttttcatttttccgtaaaactaagactgaaggaaagtctgcctttcttaaagtcagcaaggtctactgataaagaagataccttgtaatctctactttcatgacagaaatccaggcctaatcaatacttttttctattatcactgtaattaaggcataaggctttccctgatatacaaatgattaaacctctcaataaacaacttc

SEQ ID NO: 379377 - DNA, 564 bp, Homo Sapiens
  misc_feature (19)..(19): n is a, c, g, or t
  misc_feature (36)..(36): n is a, c, g, or t
  misc_feature (112)..(112): n is a, c, g, or t
gtcagcatggaagccccanaaagctgtcaatccaanaagcaactggctcttaaacctccataagtttctctaagggtgcccacatgtgattaaacacggccaagctcagaancaaccacctgctaggcaacccatgccactctcggctgcccggaagctgtctgcccccttcaacagccatcagattaccacccctcccacagctgacacccaggccctgccccatcctaccctacaggacatctcttgtagggtgttttgatcttcccgggcatctttattgctaccaacttaatagtgtttcagcaaatgtttatgaagctccatctgtaggtgccagcaacaataaaatgataaataaggaaaataacaggaaattacatatgaataggcacttttaatacaaggtgacgagggctttggtgaagtatgtgtaagatattaggggaacaaagaaagtttattacttacctactatctataagcactgaggatacaaaccaatattccctaagggatacagagatattctctgcccttcagaagcttatagtctaaaaaaaa

SEQ ID NO: 379378 - DNA, 624 bp, Homo Sapiens
  misc_feature (433)..(433): n is a, c, g, or t
ccagagacattctagcaagtgcagcagccccttctttctctgtaacagagatatcatttatgtggagatccacaacctttaacagggatccaagatctttgcagttcaatcgaccacataggaatttccaggcaccaaaatgatataacttccttgcttccttgacaaagaagccatcatgggtgtgatccaagatccctgtcgtagtgttgatgatgttagtacatgattttaaaggttagaaccccttctaaatgaatggtctgtggaagattttagtatcttatctgatgcctggtatgatgaggatagaaaatttttccatttttatgtgcctcacaggctgtttgggcattaattttgctttttgagccttaagtgtgttagtaggatggagaaactgtgatggggaactgggaaccctggatttgtnctgattttaggtcactgttccctgggcctgtttttgtgagcccttacacaggaagatataaagagagttctttcatttcactgctaaaatcagtatgtagtatggggaatgtatttgggttgtttttaaagaaaaggggaacagaatcaggagagtgggcaaaggcaataaaatcaaagttcttattaatt

SEQ ID NO: 379379 - DNA, 536 bp, Homo Sapiens
taaacattctcagtggcctttgaagggtactctgagaaggaagaagttggcagagagacatgtgatgatcccgtaacatcacaagttcctctgatactgatatatctttgatactgatacagatcctttatctgtgggcacgggggtggtcccctggggttggggggaatatccttactcctacagggaaggacagagttcccaaagaccctgaagcacagacctctcttcctgtgcctacctgctcttgatgactgagaactgacccaaaaagatgtacaaattcaggtaagcatctagccctgcgtgtgccctaaaccaagagctcctttctcttagctgtcaatacataaagtcagcgccgattcacagaggcatcagggaggcattgcagggtatgatgaagagttggcttttagcaaacctttaaccaaactcttggctttgcagttctccaagtttagcacatttccccagtgtatcagtagggattcttcgatcacagaaaaaaggaataggtctgactaacttcagac

SEQ ID NO: 379380 - DNA, 545 bp, Homo Sapiens
gccggggtggcttagccgttgataacagaagattctgagatgggtgagaagtggtccacacgtggccactgtcattcctctggcataatggacttgggctcaggaggtcaagccctcttcaaggagcatgagctgaaattgctaaactttgggagttttccgtgacacccttcaaagtgctcacggtgtggcatggatcagctggggagggttgatgtggttttgccctgtggggtatctatctgtgtacttttgtctgagggaggcaactggggccacttaggccggcaggtgcccactgtgattggttgacatgataccaagcaacaggatcatccagtcaccttcaatgcagggaggatggctgacaggctccctggggtgacactttcatgcaatcagatggtcgagttgggactgtgacatagagccatgtggccacactaaatttcccccccacccttcccctgttccacaaccgtcattgtctgttcttgccatccagtggccactgcctccaccatggctgaggctttctctaagac

SEQ ID NO: 379381 - DNA, 479 bp, Homo Sapiens
aagatgcagctggagcagcagcggcgagggcagataaccatcgaaaatcaccatggcgcaaaccctgcactatttatttctatttattaagaactctttgtaataccttaatgttttccccggtgaaatcatcttaatttgagccccacattttctttggataagattattacgtaattgcctacttactggcccactattttctatacatttgttggtcaaacagagtgtctgtctcttccagcctggcacacagatcattccaccaggcagaggctcctggttggctccatggagccataccgtatataccctatgtgccaaaaaggatgaataaagctagactaagcattagctttttactgcagagatgaacgactccacctatcagaggactggattgtttcctcattaggggtggcaaacgatggggcacccttgggctgttttcctatggattggattaaattggataccag

SEQ ID NO: 379382 - DNA, 494 bp, Homo Sapiens
aggctatcaaaactgcttttgtgattctcagtaggatctagttcaaagccatctcagtgctagtgattggtaattgttaatttgatggtaattaccctacttgtaaagttgacattcatactggctaatcctccctgcccctagtcgtggacaatgaaacagtgagtggctggtgaattagatcagattcaaacctaagcccatcccttgaagcctaatcttcactgctgttcccttagggtatctaaatgtgttatttataaacaattttgggggctcctgcctgcaaacttcggtaggtgttggtcttccccacctctacaactgagccaaggacttgttctgaaaggtgagtaataaataagggaacaaggtttctattttctgtgtttgtaattaccagattttcacctctgtttatatattattctgatgtaaaagaacctcatagttatataaaattagaccttttgtaaataaatataatttattag

SEQ ID NO: 379383 - DNA, 421 bp, Homo Sapiens
  misc_feature (113)..(113): n is a, c, g, or t
tagttatgaacgactgagaacccaattcaaaccagctcaagcaagaaaagaaattgattggctctagcaactaaaagtccaggggaaggactggctcccagttacacttggantccagcactcaaaacactgcattggcactcacactttttctttcactattgtgttgttcctcccatgctggctttatgttgagcccactacatgttggccctagctttagaaattcctcaggttcattcaagtttagcaaaagaagtattagaatcctttcttgcatcctcaaaaatcctcagattcactcgaattggaccaatttaggtcacatgcccggccctgaagcaatggctatggcttgtgatgtggtgattggtttcatagatcaaactaaaaagtagaggttgttgccagatccacagcc

SEQ ID NO: 379384 - DNA, 387 bp, Homo Sapiens
tggtttgggtttccaaaagccccaatttaaatttggtaagggatatattgagtacctcccccagacccaaggtttttttccttgccagagaaacttttttgttttattccagtgcctcatataacaccctagcacccgtgccttgtcagttagcaatcaaaattaaacattgtaagaatgaatattttgaagtcatcaattccctagttattatatagagtagatacataatgagctcaccattctgtacttttgctgtatttttcatgatgatgtgaattttgaagtaaaaacagtctagttatattttgtatatttcacattaacatactgccagatagagttgcttattgtaggcatttctgcgataaatatattttccaaagc

SEQ ID NO: 379385 - DNA, 493 bp, Homo Sapiens
ggtcgggaagaaaaataattctgcaaggtattttgttttttattaattcgcgcttggccacctcatctgtaaagagattctaaaagcaagatctggaaaagtgcttcgtagactccttgacggagtttgacctcctttgtacgctacgtgaacatgccctcacctttaagagagtcttaaaggtaaagacacgaaaacacttcctcccagggaccttcccgaaaacgttctggctctcatctggtgcggcatgtgtccactttgcctttaaggagttcttaaaggcaagggcctggaagtgctgttcctgagatggattctcttgacttaccagtccaccacggcacttcccctttaaggttattaaaggtaaggggtggacagactttctgcattcagataatgagcagtggcaaccccttctggccagggccaggggggcaccagcaaggggccaccctttcccttttcaataaataatttttgtactgcc

SEQ ID NO: 379386 - DNA, 516 bp, Homo Sapiens
tggcagatcaagaactcatcatgagatcatgtccttcccaacatgtacattaattttttcattctccgttgaggatgtcctttcagggaacataagtgaagggctgtctttttctcatccatccaatgctgtgttagggaaaaggactcactcaaattaacccatgtcagtggttggcaggggtccttaggtgtgtggtgaccacaggtaacagggatgtgtgacagcaggtgctgaaggtcgggtatggaggtaggtgtttcatcaggtgctcagcccgtcaggccaggcagcttccacatacgccactttgtctctttcctcatctgttttctttcacagcacttacaactgcctgaacattgtttatttacttaaatctagtttatcaaccactagaacacgtcttcctgaccacagttttgtgtctttattactactccatctccaacattgagaacagtgctgggaactcaatgactatttttttgaataaataaatggattaaatttttt

SEQ ID NO: 379387 - DNA, 535 bp, Homo Sapiens
gtgcaatcgtagctcactgtagccttgacctcctgggctcaggtgatcctcctacctcagtctcccaagtagctgggaccacaagcatgcatagccacacccagccaatttttgtttgtttactttttgtagcagagaggtctcgatctcctggcttcacatgatcctcccgcctcagcctcccaaagcactagtattacaggcatgagccaccgtgtgtggccaccactgactttctgaaccccaagtgtattagccaccataacaaacaccttttgtctgatacattctgtgggatcatattccttttttatatataattttaccttttattttaggatttgagtgggtacagggtacaggtttgtttcatgggtatatcatgtgacactgaggtttggaatgcagatgatcccatcacccaggtactgagcatagcaccccacaggtagtgtttcagccctggcccctccatctctccaccctctagtattccctagtatctactgttcccaactttgtgtgcatgtataga

SEQ ID NO: 379388 - DNA, 496 bp, Homo Sapiens
tttagtttacacacagcctgtttctcatatttatgttaaattccagccctagtatgcatgtctactcaagttagtaacccctagactgagctaatgagctaagacatggtttcctggtgatccatgggacctgaggagaactcaggattcttagaggacttggagctctgtagaccagattataatggtttaagttctaacttcacctgggagttggtgtgttttccattccccacagaagctgtacttcaagctatgttgatccctgctcactttctcctttctaacattcttgcctcagttttcctccaatggaaccctctacttctgcttgaggaacagtcattgcccttaatatcagctccccaccagaccataagctccatgagggcatggactatctctgttctgttgcctgccagatcctgagcaactggcaatagaagttcttaataaacatggctggatgagtaaataaagtgtcagtcctttaacc

SEQ ID NO: 379389 - DNA, 510 bp, Homo Sapiens
  misc_feature (478)..(478): n is a, c, g, or t
  misc_feature (496)..(496): n is a, c, g, or t
taatatttttactgtaaagggcttatgatttttatttctactgccattaattttttagatggatttgtttccccttacacaactagaattaatgtatttttcaccagttttccatataccttaggtcttgatcgtttgtccttaaaaaggggatcagcatgagtatagacagtagaaatgtatgggtagtctaaccacttttatcagagacagagcagggctgtggtctcactctagctgagcagagtattaacttggtagcaagagttcctgatacaaatagatgcaatgactgtaaatggtgtcagcagtacacatggataatcagtatttgactgtaatagtatagtagttaaatacagcacttaaaaataccacagacacagttaaagcaaaaggaaacaataaaaggaatgtcatgcatgcttattttaatctcacattctttatctgtcttaaagtggaaatccatttgccntataaataccgtgtaaangactttaaaaaaaa

SEQ ID NO: 379390 - DNA, 306 bp, Homo Sapiens
  misc_feature (106)..(147): n is a, c, g, or t
  misc_feature (208)..(208): n is a, c, g, or t
gcaagaagaatctggtaatcaggcatatggttccaagtgaagtataagtcaccagaaagcaaggaaggaagccatcccctggcccagagggggagaatggggtggnnnnnnnnnnnnnnnnnnnnnnnnnnnnnnnnnnnnnnnnnntttctcggctgctgaagagactgagtgttcctgcagatatataacaaagatgaagatgtgnccaccgttggagacaaatggggaccagagaccacatgtcagaggtcaggtcaggtgttcaaatataaaggggttgccctggctgggcatggtggctca

SEQ ID NO: 379391 - DNA, 470 bp, Homo Sapiens
  misc_feature (79)..(79): n is a, c, g, or t
  misc_feature (82)..(125): n is a, c, g, or t
actgcctttttaatttaaaaaaaatggcctcctccctcaggtattaaaaataccttaaaagtgccttcaagccctgtgnccnnnnnnnnnnnnnnnnnnnnnnnnnnnnnnnnnnnnnnnnnnnncccttgctcctagggaactcctatcccccccaaacacagtgggccaaagggtgctcagatctaggccagtttgggatgtgattcgatcaagcagccattttaggacatgtactaaacattagagaaatcgttttaaaatactgccaattaattcagatttccaaagacgactggtcccattcctaacaaagttatcacctttgagtaaacaaacaaataagtgaaccatcacccctcactggtgccaattcatctttaaggagtacttttgtgactatccatgcaggctgttctgtacaatcacagcatacccaccaaatcctgaggccattacattaaaaaaaa

SEQ ID NO: 379392 - DNA, 401 bp, Homo Sapiens
  misc_feature (23)..(23): n is a, c, g, or t
  misc_feature (33)..(33): n is a, c, g, or t
  misc_feature (37)..(37): n is a, c, g, or t
  misc_feature (332)..(332): n is a, c, g, or t
tttaacatgaatatttcccaaancaaaatattnctgnccaaataatcccaataaacacaaattcctatcattatagagcaacaatgaaacaaaatttcctgccccggataatcaaaagcaatcctaagaaatagattttattttaaatataatcctaatgttttcgatccttttgctaagccctacttaaaatattttaatgccttttcaagagtacacagcaaaaatctgactcgaaaggattcactggacatcaaaggcatgttaataattttctgttgtcctggggatttttctaagatgtctgtctgctgtacatgaaagctaaaagnccaaagtcttccattcagcccagaagttgattattcaatataaatagacatagaatgaatgagtcacac

SEQ ID NO: 379393 - DNA, 510 bp, Homo Sapiens
tgcccaggaaaacaagaactctgccaaaatctacattaacatcaacaagtattggaacacaagttttacccacctgaagatgagaggtaacataaagcccatctaaagactgcacttggtccctagcttccaagagtcttcattggcccttccctttcttctatatggaagctatcagatataatgcaaacattacttttcagttaagctatttgataatgtaatgggcaattcttgtattaactaaactgacttagctacaatgtaacatggtgtacatacatagtatgtacaatgtagcatacatagtatccacagatgcacctgtgtgcacacacaacagcctgcaattcttgagcctttaacaccaacttaccattgggcctactttgtgtttttaatgcccgggttatgtacaagggtgttgttcttggaattaaatcccgagatataatgatgtggcttatgttcagttacttgctttcactcatgatccatccttcccaaata

SEQ ID NO: 379394 - DNA, 389 bp, Homo Sapiens
  misc_feature (34)..(34): n is a, c, g, or t
  misc_feature (37)..(37): n is a, c, g, or t
  misc_feature (144)..(144): n is a, c, g, or t
  misc_feature (154)..(154): n is a, c, g, or t
  misc_feature (185)..(185): n is a, c, g, or t
  misc_feature (220)..(220): n is a, c, g, or t
  misc_feature (294)..(294): n is a, c, g, or t
ctcatattctctgatttgatcctcatgctttganaanagtcttgcaagggttgggctcaaggtttgtaatctataaaggcaacagcaaacagcccagatacactgaccctactctgggaactgagctcgagagcttatgccccnttggtagccncagattaactaagggaatgtgctgtcatccncagttaaataagataaggtcctccttaggctcccntttggctattttggaaggacatgcaaagtatattgcatatatttaaagtatgaaaagagtgaacatttttagcntctttgtaattgacattaacttaatggtcccacaaaataacttttgtttctttgcttcagtgactgagtgtaaacactatattacttagagcaaa

SEQ ID NO: 379395 - DNA, 397 bp, Homo Sapiens
  misc_feature (81)..(81): n is a, c, g, or t
ttcttctctaagacctggaaagtcagcaaccctctgggggcagcaggactgggcagatcccaggctgggcatgggggtggncagaagagcccgagaaattgggtcagttccctcatcagcacccagaggctcagctgaggcaagaagagcacccatcactgccctatttcctaggggctatacactcccaactcttggttgatctctttctttttaaaaatatttgccaccaccctggagtctagaccaacacacaaagatccctggctaaccctggcctatttagattccttcctctcaccctggaccttcccatttcaatcatgcagatggtttctttttgtaaagagttccgtttgcctttcaatttttagagaaaataaagactgcattcatc

SEQ ID NO: 379396 - DNA, 490 bp, Homo Sapiens
  misc_feature (16)..(16): n is a, c, g, or t
aagcttggcaccgggnaagcactctgcctggaggtgcgaccaacatattttgagatgaagaacgaaaaactgctgtccaaagcatcagaaccaaaataccagctttttgttccccagcttgtgactggcagatgcgctacaagagcttttcatagaaaatcacatagtttggatctgaacatcagtgagaaactgactttattacccactttatatgaaatacatagtaagactactgcctattccagactaaatgaaacacagcctattgacctttcaggcttgcctttacaatctagtaaaaatagctattcctttcagaatccatccagttttgatcctagtatgctgctgcaaagattttcagtggccccccatgagacccagacacaaagaggaggagaatttcagtgtggtctagaagctgcttcagtgtattctggaccatactaatactaacaatctggacttttcctgatgggacctgttt

SEQ ID NO: 379397 - DNA, 514 bp, Homo Sapiens
  misc_feature (37)..(37): n is a, c, g, or t
  misc_feature (60)..(60): n is a, c, g, or t
  misc_feature (81)..(81): n is a, c, g, or t
ggaaaacgggaaattctgccctcaagggacccccccngtggcctttaaggaccaatcccntccaaagcccctacccaaccnagaacccctgaaaaacccactggacccaatcctcatttcctaaaaaccttgtcatttccatgtagttaaaataaatggagcccatacgtgtgtgacccttttgggattggcttttttccctcttggcatatttctctggggatcatgtatatacactgatatggtttcaatcttggaggaatcctgattctgaaatccctagagtcccaaatctgatgatttcagggctgaacagttcccttctttgagtgatgaggacctgaaggctgagagacctgaggtgtcatgcccagggatcacccatgcacagcctgagctcacagcagagattccgcctccaggcccggagcactcctccgccatgaggtcttttacagctcagactgggcaaagctctttttaattccaccaaacctagaattgttaaaaaaaa

SEQ ID NO: 379398 - DNA, 260 bp, Homo Sapiens
agtttttctctagcttcacttccagctgttgcagacacaagagatgaatgtctgtttgatcaagaggaaaggagtaaactttgttctctcgtattatttctctgcattagtgaatgtgcttgcttcctaaatcctcattagcaaagtatcttcttatgaagaaatctgttctgtccttgccactggatccatctctataaagactctagcaaaaagttctataggcacaatctaataatatgcaaaaataaatgcatctt

SEQ ID NO: 379399 - DNA, 544 bp, Homo Sapiens
  misc_feature (445)..(461): n is a, c, g, or t
aaagttaattacgaacttgtaggaaggaaaggatccgaaagctcacacaggtctttcgttagccttcacaacgttgggcaggaaaatggttaaatcagggccggcccctgaaccctggacggctgcaggcagggaaggggcagcgattaatttacactacacaggaagtgcaggcctcccatcccctctgcccaacggggaaatcccattttcaattctgacctcaatgtggaagtgactcttcctgccaaaaggagaggagtacaagcgtcccctcccccacagcacagcagaaccagaagacagaacacaggcagatgcagcaccaggggtagcaaagcccaggcaacgtgcacagcaggcagctttatggagaaagttttccttagtggcaccttatgagacaactcttcctgtacatgcactgaaacagggaataggtacnnnnnnnnnnnnnnnnncccaagaaaatgctacttggtatggaacaggaataacaggagacacagacaaggtcagcagaacctagaaggagagtccagac

SEQ ID NO: 379400 - DNA, 424 bp, Homo Sapiens
cattcgagttaaaaataccctccctcaccccaccctttcctcagcagatgaaacagcctgacctattctggaaaatataatatccctgccacattcaaccccaattccctgcctcattgagaaatcagagatcctacggtttgggaactgaaagggacgttagagatatccctcccaattcaaagatgcctaacagtgaaattcctaattcaaaaaataaaggagtgaatttctacctagctgcactgtcatatgttattatcccaaatcttgtcaaatgcatcagtaagcaggagtgctgccaccagatcggcagggagagccaatgtttccacttcaaacctctcagaccagagaaaaatgaactggagatttggcattggaagacctccctctcgattggaagttaattttcttaacagtt

SEQ ID NO: 379401 - DNA, 603 bp, Homo Sapiens
agagagaaaaatgcagaaagggtttgtttgcagatgggcagttcagttgagtcctcattaaccaggcagaggggtgcagaagaagcctgactcagggtcaccatggagaactcctcatcccagagatgggtgggacaggaacttggctttgcttcaccaaccactgagcttgaaaactctttcagaggtggtttgtgcctaagaaacaccccagcagtctttcaagaacgttcctcttctgtagctttgccctgctacacagcctgaagtctgtcccctataaagaattatatttgtaaaaagtaatacattttcgaagaaacccggatcaagtggaatcttgaaagtttttttaatgaaaggggaaaaacaacctgaccacataaactgcacttccaaccatttggaaccagagtttatgtcctcattttcccattctcagaagagcacagtttttcaatattacaacttcctggcaaatagcacaagaaatgttcagacttgagatttgtgttccctttgtccagattattctgtatatgtcaccaaaggggttaacttgtttgcttggcatgaggaaaattataaatccgttctcaaact

SEQ ID NO: 379402 - DNA, 512 bp, Homo Sapiens
  misc_feature (78)..(78): n is a, c, g, or t
taaagctgataccaaaaggctcctgtgagcacggtcttgatcaaactcgcccttctgtctggccagctgcccacgacntacggtgtatgtccagtggcctccagcagatcatgatgacatcatggacccaatagctcattcactgccttgattccttttgccaacaattttaccagcagttatacctaacatattatgcaattttctcttggtgctacctgatggaattccctgcacttaaagttcctggctgactaaacaagatatatcattttcctttccttctctttttgtttggaaaatccaagtacttcctttgaatgatgatctctttcttgcaaatgatattgtcagtaaaataatcacgttagacttcagacctctggggattctttccgtgtcctgaaagagaatttttaaattatttaataagaaaaaatttatattaatgattgtttcctttagtaatttattgttctgtactgatatttaaataaagagttctatttccc

SEQ ID NO: 379403 - DNA, 475 bp, Homo Sapiens
  misc_feature (13)..(13): n is a, c, g, or t
  misc_feature (23)..(23): n is a, c, g, or t
  misc_feature (36)..(36): n is a, c, g, or t
  misc_feature (41)..(41): n is a, c, g, or t
  misc_feature (92)..(92): n is a, c, g, or t
tggaagcctacantttaaaattnggcccccggaaanaaaanggtccgggtttttcaatttccccccaaaatttccctaaacccctttatccngatatgggcacatcagtagtccctctccccaacctaatgcatagccatatcccctttttcatcatgtcatcaaagaactagaggttgaataaacatttgaacttcaatggctcgcttcttgcattgtaaagtaaccacttaggtgcaacttaaggttattctgtaacatttataaaccaacaagatgatgaaatgtcctgaggctgcaaaaagtagctgagagtaaactgcaagacagatctgttttaaaatacagggtcttccttccctttgacaaggagaagaaatgtcagctatctgtaagtctggctcttatggttgttaaaactgatgcggggatgaccaccaaatttatttcattaaaatcacctgaaacttctttt

SEQ ID NO: 379404 - DNA, 512 bp, Homo Sapiens
  misc_feature (20)..(20): n is a, c, g, or t
  misc_feature (44)..(44): n is a, c, g, or t
  misc_feature (55)..(55): n is a, c, g, or t
  misc_feature (64)..(64): n is a, c, g, or t
ccccccttggataagcccgngccaccttcccctccccggcccanaaaagccaggnaaacccccngtccttcaaatccaccttggcccctctccctaccccactcacagcccttacccttgagccttaattgagagaaaaagatgaaagccataaaactttgtggagtgaaaaattaggcaacccaaaatagcatccttatgaagggtaactcatggtggatgtgacaaagaaaagatgataaacctataaagggctaccatcctaatatttcagaacaggcttcccggtgataagcgattatatttcaaagagataagatgtgatgcatattctctttatcatgaaaatgtgaaactgtatcttcttgaaactgaaaataaagatgtatactgactatatggctatgtaatggttattaattatacagttttattttgcttatgagtctgaaaaatatgtgtacaagtgaaaataaattgataagaatgcaagttattttacgtaaaaaaaa

SEQ ID NO: 379405 - DNA, 503 bp, Homo Sapiens
  misc_feature (338)..(338): n is a, c, g, or t
agcccaggctggggagactgctctgggttccacgcggcatcctgcctaagccctgggggtcctagaggtcactggctcccttctctgcctgcatgtctcaggtcgccctctggccaattctgaagtcctgccctgcctcaaggagcagaggtggcagaggtgggcccaccgcacagggtaaatgtcccggtgtcacatacctcccagattgcagggaccctgcgtatgctactgctgctgtggaaaccagctctctctggctctggccttggggagagggagccacagtggatttaggaagagtctccagatgtagcttgagactaccaaacaggccntgacccccacagaccctgcctcttatgagcgcccagactgagccctgcttcaggctcccagccatgtggccagctgcttttcttctttaatttttagcatcagacgaatatttcaggaaaatattctcattgtaaaatctcaaacattaataaaatgtagtgaat

SEQ ID NO: 379406 - DNA, 507 bp, Homo Sapiens
  misc_feature (347)..(347): n is a, c, g, or t
ttggaggtagagaaaccaaaagcaatgttttcagaaggccttttgctttcttaaagatttcaaacgatgattgtagttaatctggctgcctgtttgaaaaaccatcagataaatgcccacaaggctctcatctttcagtagcttagctgctgcttgtcagattctaaactccaaagtgcttgactcttccagtgcccaaactaatccttgtttaaattatgtcttcagaagctataactcttatagtggcttgctaaatgataccctttggatctgggctgaagacttccagaatgcccaagtgaatttcaggagcgggctcaatgtttaaccaaattcacctttanccaagggctattcaatccatatctgggatgttttaaataaaactatcccaggactgtgggcaatattcaaagttaatatttgttgccaatatgtttggagtgcaagataaagcattataatgtctagacatttttgaaataaaaaagtcttctggttacc

SEQ ID NO: 379407 - DNA, 517 bp, Homo Sapiens
  misc_feature (12)..(12): n is a, c, g, or t
  misc_feature (40)..(40): n is a, c, g, or t
  misc_feature (47)..(47): n is a, c, g, or t
  misc_feature (66)..(66): n is a, c, g, or t
  misc_feature (131)..(131): n is a, c, g, or t
cccctaaaaaanaatgccctcctaactgggcgtggctccnaagcccngtgcaactcccaccctcangtaccctttttccacgggggaccagaacactggtacgtcaatcacccaaagcccaatctgctccnagctgccccacagatgcccacccaaaacctgcctatctcttcatcacccaggtacgattcctctttcccacagtggacacagcaggctattttcctagtttgtgcctggtcacgtggtagatgaagcctcttactgccccacttagggtggccacggctgcttgtgaatgccagctttgccagtggcatatctgtcatctgattgcggtggtgaaatggaattgaggcccaaggttagaagcagccgagacgccacttggatactgatttgaacaatgtagaagtcagattctgaattccaaagttatttctcataagtacccaatggcatctctccatctacaaagttgcagtattatgcaaataaaactgacctcattttctgc

SEQ ID NO: 379408 - DNA, 480 bp, Homo Sapiens
  misc_feature (139)..(139): n is a, c, g, or t
ttgtgggtagtcctttttgtaaaatttctcagttaatagttttatgttccaagttttaaaagggatgtcagcattctaagtagttctaaggaaagcattctttttaatacggtaaatattatttgtttaattaaatatntttcctcatgtcctctccctaagattcctgtcaatccttactacctttaaaaataatcctatgatccaaatacatgtgaaggtactttatcaatagtaattattttaacatattaattattattattaaattttgaaagatttccttacaagtggcagatatatgttttattttgtttcatttttacaaagtaagatcttaaatattctaaagtttgtattgtgacttccagtaatgtaaactatatgaggctaatcctcttttcctcctttttgtttgttaacctcatttgggataactgtaactagtattattttatttatgtaataaaaatatatgtg

SEQ ID NO: 379409 - DNA, 423 bp, Homo Sapiens
  misc_feature (358)..(358): n is a, c, g, or t
  misc_feature (364)..(364): n is a, c, g, or t
  misc_feature (373)..(373): n is a, c, g, or t
acaggctgaggccagactatttattacaacctactcaaggtagtttacaaccacctgctaatctttgctgccctcaccaataatcacaggaaaaacagatgcaccaaaagacaacccctaccccactggagaggcattgggtggccagtctccccacatgcaacccaaaggggcacagagcactttggttagctttgctgttaccatcccattgctgtgggtaagtcacacaggtaaagtgggctgcagccactaatccaccatatatgggcataacccagagacccagatgtcaggagagggcagagtgtgggggaaggcagggaaacaggatggacttcaggtgttcacttacatnatggtncttattatncaattattattattaggaggattttaaaatttttttaggccaaggccaaa

SEQ ID NO: 379410 - DNA, 489 bp, Homo Sapiens
tgattaggtcaggaaagtggagccctcatgaatgggattagtgccgttagaaaagggatcccagagagcgctcacctgttttccatgtgaggatacaatgagaagtcagcagtctgcaacctggaagagagcctcaccagaacctaaccatactggcaccttgatctcggacttccagcctccagaactgtgagaaatttctgttgtttataagccactcagtctatggtacattgttatagtagcctatattgactaagatagagtagatttgttttgattcttccttccgtctgttctccaaactcttaaaataagttactcccttcatgccatatcccacatcacttgcttgtataccgtgtaaatattttatatatacctgcctggcatcagtttgtgctgattttgtaaattttgaatgtgtttgttttagattttaagcataacattatggcacatatcttaataactttttatggttacaat

SEQ ID NO: 379411 - DNA, 401 bp, Homo Sapiens
gcccaaaaaatgttgacatttactatccatcaaagggttttagtgatatcactaaacctataaaaagcagatgacacgcatctgccgaaaaagcaacagcacctacttcaaagttggaagttatcctaagaggattgtggtcagagaaaacaatttaatatgtgcagctgtggaaaggtttatttctacatcattctttgaagtgacttttcatttagattaaatgtctgttcttctaagttaatttcaatcattttcagtaccaacatttcttgtgcatgtgcaaagccatgctgaactgttggctccattaacaatagaagaactttgcaaacagttaaataattccaattgtatatcaaagtcatcagatgtttcaaatagaaaattgatcaagcttc

SEQ ID NO: 379412 - DNA, 502 bp, Homo Sapiens
  misc_feature (18)..(18): n is a, c, g, or t
  misc_feature (138)..(155): n is a, c, g, or t
tagagacggtttcgccanaatggcccggttggtgtcaaaccccggcctcaaagtgcatccgcccaccttggcctccccaaagtggagcccccgtgccccttgtttgtgacctgtcaatataaatatgcctcagtaatnnnnnnnnnnnnnnnnnntgaaaaaggaaatatgtttaatattaagactttggccttttagtgtaaactgatattcaaaaatttccttcatagaacatttgcttctttgcttgatcatttttctaattctgtacatctaaaatgcccagaatttgagttgctgttatagtctactaacatagaactttggagtaataagatgggaatttgtctctcttttgccaagacaagcattcgtaatctaacacagtattgttgccacgagtacgagtatgtgatagactgttgagaataaagaaagcaggcacagttggtcagtcctaagataaaggagatgttttttcttatatgtttgtgcattaaag

SEQ ID NO: 379413 - DNA, 474 bp, Homo Sapiens
tttcctgccaacaagattgagtatcttttccattgcttctctcagtctctgtctttgaatatctgaatgttctggcccttcaacaaattctttaaatcatgctaaggaatttcgttttatgtggacacactcaactttgatattcaggagatgtttttacaaaatgactaattgaaaaaagttgaaacaaatgattttaaaagcttgcagtaaaaaataaacctcatagattccagcaaatatttgttggactaaaattatagcatttttaatgccagaaaattataaagaatttggagattgagctgccttatttctaatgaacactcctcttcatcttattaagtcttcacagtttttccagtggctataattatggaattggtgacctatgttttatattatcaaggaagccttagattcactctgatctaagaaattattgaaattgaccctttttacacaaatgtcttt

SEQ ID NO: 379414 - DNA, 508 bp, Homo Sapiens
  misc_feature (24)..(24): n is a, c, g, or t
  misc_feature (38)..(38): n is a, c, g, or t
  misc_feature (55)..(147): n is a, c, g, or t
gtgtgtgtgttgggggtggggggntgtaaagagggganctcaactaatgatgccnnnnnnnnnnnnnnnnnnnnnnnnnnnnnnnnnnnnnnnnnnnnnnnnnnnnnnnnnnnnnnnnnnnnnnnnnnnnnnnnnnnnnnnnnnnnnctctaagactttgggatacaaaaacataatttactttccttcatttctggaataaaacatctcttcttcctccccctactttctgttctgtgcccctgtttgatctctgttggtcctgttcaccttcagccttctctgctgaaggaggaaaggcttggttttataaaaagtgacaatattcagaccacataagatccttcttgcttcattttggattaaatattttaagattttctgattttcttgtatgcatatgtatttacctattatttgactttattgaataacttcaaattgagtatatttgaatgggaatgggcattaaaaagtgctaagctttccctgcctttcagaaaaaaaa

SEQ ID NO: 379415 - DNA, 444 bp, Homo Sapiens
  misc_feature (39)..(39): n is a, c, g, or t
  misc_feature (48)..(58): n is a, c, g, or t
  misc_feature (215)..(250): n is a, c, g, or t
cggacatagtgtttagtttccctcggcaaataaacatcnaggcaaggnnnnnnnnnnnctttaatagcatttactttttgtttcccctttgatgctggtttatttttgaatatagctgttgaaaataaagcaacaataaaaccaacgttgaatggattattaccctaatcttatttcttctctgtttttgagaagaggcataccagtgcacaccnnnnnnnnnnnnnnnnnnnnnnnnnnnnnnnnnnnnatgagagggaaataagaatggcctaagtggagggctaagaagtatgcacagaatgtgaatcccttttaaaattatctaccctgcttttgaatttaggcttcaatttaccatcttggctcaatacaggcaaaattttagtgcctcctttttaccactgggaaagtcaaatcaaagttccaataacagaaaaaaaa

SEQ ID NO: 379416 - DNA, 506 bp, Homo Sapiens
catagacacgtatgtgcacaaatgcaggcagatatatgtgtgctgttgtcatcctcaagccaggaagtagtgattttcttatcaataccttgcctttctttcttcccctggagatggataacaaggaaataaactcttaggaggattctacctccccactactggccattcccaagcatcagtccctttctcctgacccatggatgtactgactcacttcccaaagggtggagccttcccaagtccctgtgcccatgtgccaatcacagggaccccagcagggtttgtgcacagggagagcaaaagagggacagatcacacgtgatgttttgtatggatctttcccttctccttctttctccccacctcacctcccaccagtggcctctcccactgccagccagtgccttgctcagaacctacctcttcctcctacacagaaaggtatgaaacccatcagcgcttgtttttagctgggaacaaactgttcacacatttcattaact

SEQ ID NO: 379417 - DNA, 493 bp, Homo Sapiens
caaatgtaaagatgcagtattaagtgagagtggcaaaaagttactgtggtatatactatacttctctaataattttcatagccacatcctattgctattgcagtgagttcaggtgctgcaagtatccacttaaaatgccacacattttaatcggcactgatcacctctgtttcagcagtttgtccctgtagtaaattgcctacccacagtaaaaggtaatctcttgtggttctcatgtatttttcatcgtgtttaatgcaatactgtaaactttgaataataccataagactcgtataaagtgatgccacttagcactagtgatactggaagtgctcccaagaagaagagaaaagtctgacattacaagaaaaagttgaattgcttggtatgtaccatagattaatgtctgcagctgctattctgccatttcaagaaaaatgaatgatgtctgccatttcaggataaatgaattcagtgtaaggactattgtt

SEQ ID NO: 379418 - DNA, 504 bp, Homo Sapiens
  misc_feature (448)..(458): n is a, c, g, or t
  misc_feature (461)..(461): n is a, c, g, or t
aggcacagtgagacccttgctgggtcaggtctcctttgtgtgtgaagctggggcagagtatgctacgaaagggacccagcccaggccacagggctctcctccccagtctttatctgaaagccccagccaaagcacccctctaaaccggtcaccctaggggaaatgcaaaaacctgcaaaagatccacctgtattccctgtgtgtgtgtgtcaaaatgaccatttgccaaccctggctgtgaggtaatgtatgtaaagcaccgagtcaggtgcctgatacgcagtaggtgcttagcaaacggtagctaatactatcatcattgtcattgttattgtgacacccatgagcccacagacagagctgtattaagtaacctgttttgaatccagacattcactcccccacttgctatgactaccctcctttgatctatttttggtcataggtnnnnnnnnnnntcntctcttgggagcatataaacaaaaaacatagaagcaaaaaaaa

SEQ ID NO: 379419 - DNA, 534 bp, Homo Sapiens
  misc_feature (137)..(150): n is a, c, g, or t
agaaaaatatacacttacaaaatatgttacaaattggcacacttaaaaatatacaagattttgtagacgtcttaagagtgatccttaagctttaaacttcaattaattctacagattatttataaagcttaactctnnnnnnnnnnnnnnggcaaataatttcctaacatttttaagttgcagtgtcatatgtcaaacagaaacttaggttacattccataaaaagggccctctaacgcttttattttaaattttccttaaatgcttaaggggcttggggaagaagaaaaaaatgggaataatcattttctttagcaccataaatcagcaacttactaaagaggtgcattcagttctatggaaactaaggactagtacattcaaaactctgtaggcagcaaactccagtcagtgctacaggtagcccagtagagcatcttaagatttctactctcctgactgggagtgaaaaacaaaaggcctcttctagttttcattctaagcctttttttgtgctgtaaataaccagtcatc

SEQ ID NO: 379420 - DNA, 442 bp, Homo Sapiens
  misc_feature (19)..(19): n is a, c, g, or t
tccagccctccagtccagnggtacctaaatgccataaaaaggccaccgggggagcccccttgaaaaatgtaataatttcggggacaccccatatcccagagagtttggaatccaatgaagtcccagtctgggtccctaggaagaactattatcaacatccccatttaaatcctagtgcaggtggtcttttgataaccgttggtgtagaacatatatacatttcatgttttattaatatttattaataatttacaaggtcaaaaagatattattttgattgttattttgtattgagtctactgctttacttccattactaaattggctttgcataaatacagtgggccaggattaaccaggattattgagtgtctctgggctttagtgtactatggttttgcatacgtaagtcatattctttctggttttctccatgaaagcc

SEQ ID NO: 379421 - DNA, 502 bp, Homo Sapiens
  misc_feature (196)..(197): n is a, c, g, or t
  misc_feature (242)..(242): n is a, c, g, or t
agatcccctttaagaggcatttgtcatctctatttccttctgcttacagcccatgctcttccaccactattatatccaactgtctacttctggattttcaaaaagcaaatgttgaattaaaaatgggccatccctttggaaaactcctgttagaataacccaataactcacaccccaaggagattacagaagactnncacatgggctactagccctacatcccatggaaataaatttggagncagtgttcctagaacaaagacagcctacagggaagcactccccacaaaaacaaagaaaatgcatgctgttgcagacttcaagaggtccctcagtactctgccccaaatattactgattgtccctaaaaatatcatagtatgaataatataaaaaaccttagattagaataataaaatcgagctaatgagatgagtatttcaagcaccactacatcataggtgagatatatatagtgggataccccaggcagtgaatcctg

SEQ ID NO: 379422 - DNA, 378 bp, Homo Sapiens
  misc_feature (348)..(348): n is a, c, g, or t
gtagagattgcattagttccatatctccgcagagttctctggtagattaaatgttctctgtgcactaggccaaggaagttcctgttacctttgaaaatcattgtgtttgctctgattgtctacattagctcatatcagtcttttgaacactggttcaaatctgggtgttgggttaggatctgatgagtagagaatagtggaaagttgatataggaaggtatactggtttctggtgtgattctttagctacatttattccttgtcttatgtcatttcactggatcatgtaactgtcctggctttcagaaattatattagatgcccagcctttctcattcagagatgccntgtattattatgttatttcgattgcctacc

SEQ ID NO: 379423 - DNA, 485 bp, Homo Sapiens
gaatagcatgtacagcattgtttgtaatggctcccaaattggaaataatctagatgttcatcaataatagtctgtttaaagaaagtgtggtagagacatagaattaaatacaacgcagacattttaaaaatgagaaataccctatatatattgcctatatcccaagaatatcccaagattatgtgaaaaaagaagatatgccagatgaatattttaaatgagattcccatttgtgttaaataatgccccatagtaacagtagaaattatgtatgtttactcctatcactgtgcatgcatagatgatttcccgaaagatattcaaacaattaacagtggttactttagggtaatgctggtttgggggaagcagtggtatgaagggagggagcattcctttttactgtatacctgtatgtaatgtttcaggttttttcttaataagccatcttacctttataataaaaagttaatttttaaaaagtt

SEQ ID NO: 379424 - DNA, 429 bp, Homo Sapiens
  misc_feature (24)..(24): n is a, c, g, or t
  misc_feature (57)..(57): n is a, c, g, or t
gagctcaccccaagaaaaaaaggnctgggattgaacagagcaggaacacttggggtnaaaggagaaaagctttagatacaagaaagaggtggcccaatccccagaaagtacaggagcaaggactacacagaccgacccacagcaggggaaaggcctctccagctgtggagttcagaaagctactctgacccacaactgcccgtacgtagaacatcctgctgaaagaacaggaaaagatgctgatcacaccctgtacaaagatattgcggggagaaagtgaaccagataacctcccacagataatgaaagcacaccagaaaaacattcctccaggcagatgaaaactgtgtcctgatgtttctgagtgatctcaaaggaattagaaaaacgacagaaactactaaagaatggtataaattaaaaatgttt

SEQ ID NO: 379425 - DNA, 649 bp, Homo Sapiens
  misc_feature (23)..(23): n is a, c, g, or t
  misc_feature (47)..(47): n is a, c, g, or t
  misc_feature (53)..(53): n is a, c, g, or t
  misc_feature (77)..(77): n is a, c, g, or t
gccccagtgagggggattaaggngcccccactgtttgtgagcaacanaaaagnagaaaggttcctggtgtccattgncccccggtccgtggatgtgcccattcccaaaccgcccccggtatttttgccccgagtagcatattatgcaaaatggatacacaaaattattttaacatataaggtacccacagtcatagctgaagtaagtgtgtctgaagcacccaccaatacaactgtcttttacatgaagatttcagagaatgtggaatttaaaatgtcacttacaacaatcctaagacaactactggagagtcatgtttgttgaaattctcattaatgtttatgggtgttttctgttgttttgtttgtcagtgttattttgtcaatgttgaagtgaattaaggtacatgcaagtgtaataacatatctcctgaagatacttgaatggattaaaaaaacacacaggtatatttgctggatgataaagatttcatgggaaaaaaaatcaattaatctgtctaagctgctttctgatgttggtttcttaataatgagtaaaccacaaattaaatgttattttaacctcaccaaaacaatttataccttgtgtccctaaattgtagccctatattaaattatattacatttca

SEQ ID NO: 379426 - DNA, 531 bp, Homo Sapiens
  misc_feature (491)..(491): n is a, c, g, or t
gagacggaggctgacctgctctccgtcactcccatgaactgcccaagaccccggccactggtgccagctgccttgaaaggttccttgctgccctcaggaacgtggctgcgaatgatcttgcggaaggtctggcggaaactcgcggatacggtaggcgtagatgaagggattcacaaccgaattggtgtgggagaggacgatggccaggtacatgagccagagaggggcgtggctgcagtcggggcagaagaaagtgaagcagttgatgatgtgtaggggcagccagtgacttggcagcatggacctccttctgcagtgtggaccgtgcccgctcccccggcagaggctggctctccatctgcttcagctgtcgtcgcgccgccaggaagatccgcaaatagacacccagcatgagcagcaggggcaccagcacacaggcaaagaagttgaagtacaccatgtagttcatggggaccacatcctcaaagagnacaagccacttggccctccccgcagccctgggagtggttc

SEQ ID NO: 379427 - DNA, 489 bp, Homo Sapiens
aatttctaggggaaaaaggacaattctgctcttttaaaaaaacctaatactgctcgagataaatgggataggggctcttaaatttttactctatttcctgaaattgtctgaatcttttcaagaacatatgcatatattgcttgcatgacatcattctaatatactgtttttatactgctcagtaattttagatttcagaagaaactaaaatcccctatttttctcctattatagcttcccatatttcaaatgagttacttgttttaaaaagatcttacttttaaataagctactttttgtattaaatcaagtagcctcaaatcaaagtgctctcttccacactaatttttcctaatcttggatgctaagatatatcctattggccttcttcattttcaaaatagccaaaggatattcttagcaagcctagaactatttcacaacctcttgaattcttttacatggatttaaaaccttttgttgagtaat

SEQ ID NO: 379428 - DNA, 517 bp, Homo Sapiens
gcttgaagaccatagtgagaaaaactggaagcttgaagaccatggtgagaaaaaccagaagcttgaagaccatggtgtgaaaatccttgaacccacccaaatacctgctccaggtccagttcctgttccaggtcccaaaagccatccttctgcatcctcgggcaaactgctgcttccacagtttgggatggtcatcattttaatcagtgtttctgctataaatccctttgttgcctctgtagtttgatgcattgtttatctttcctattctttacttgaaataactatagggatccacaggagatcaaaaggaatgatgtattttttacgtgttggccaaagtcactggataaaatgagaattgtatatttgttattcattttgcaaattcagaaagttggtccagatatatgtcacagaacttttcacttgtatactactcttacaatggaaaaaaatcccgaaaactgtatacttctgattaaattcaataaaagattttgattagatatttaaa

SEQ ID NO: 379429 - DNA, 436 bp, Homo Sapiens
  misc_feature (27)..(27): n is a, c, g, or t
gcccgtggaatttacaattccgacatnagatttgggtgtggaccagaagagcccaaacccatataaacccaagatacctatacctaagaaacaatgcccagttcccctaaagacaagagatgtgaaggagcccagagaagtaggtggaatgacaagaggaaggggcatgaaggacaagaggaaaagcatgaagaccaaatgtacttcccaagtttttgcatgtaacaagaagaaaaaagaaataaagggttaagtcagttccaatggtggcagatagatcagatttttgtttaagtgtttagatgtcttttggcagagacaactggttatgccacacttcagcatacctattgcctacaaccttgttctgcatttcccatgagaccatgaggctttttattcaagatcattttgctctgaaatttacctttctctg

SEQ ID NO: 379430 - DNA, 555 bp, Homo Sapiens
  misc_feature (354)..(354): n is a, c, g, or t
gctatcggttttgacaggaagcacgatggtaagaataccactaacgaaaacctttgtggtgtctcaatgacaaatatgcagatgccaccctcctttgtctaatgtacggtgctttagggcaactatttaatataaagcaactcagaacttgtttcaggaagtgttgctctttcgccttacatgccaaggttctagggaaaaagctgaccatatgtaaaaacattgatgctcaagcacataaagaattacattctttaaacataggagtacataggatcaagtctctgcacaataattgaggatgtgttatagggaaaagtgagcacagtgctatttgtccactttaggtctttnggtgaatgtgcagtaggcttcaccccttaagggaatcttcatgttgcccgcagtaaaaataaaaatggactgctacaatgacatactgagagagttttaaatcatgctttacaaactgacattctgagctctgagacagcagaaaatgtatcaccagagcaagggaggaggcaaatgttctgaacaataattgaaatggtt

SEQ ID NO: 379431 - DNA, 403 bp, Homo Sapiens
  misc_feature (55)..(55): n is a, c, g, or t
  misc_feature (61)..(61): n is a, c, g, or t
  misc_feature (66)..(66): n is a, c, g, or t
ggaaagcgggtcaatgaaccctactgcaaaccacagccctccacgggaatgtccnggatcncatantctgttgtggaccgggagggctcccatcaggaaccccctcctaatttttttgcagtaagtttgactctgaagactgcaaaatagcctgaagctaatgttaccgatgattgatctgataaagaggatttttcaaactctggcaggcttgaaattattgtagttctattgcctctttccacagctacaagttctattgataaaccgtctcctatgatatgccaactttttatagccaactcaattggattgctgtttataattgcaaataaaatattacttgcttctgtagcactcagtactccaaaatctatgaaacgttcctctattttggggggca

SEQ ID NO: 379432 - DNA, 443 bp, Homo Sapiens
  misc_feature (42)..(42): n is a, c, g, or t
  misc_feature (52)..(52): n is a, c, g, or t
  misc_feature (86)..(86): n is a, c, g, or t
  misc_feature (375)..(375): n is a, c, g, or t
cacaaatccccccacttgggggtgcctgcccaagacagaggnggaaagacangggaaataaagactgatgacaagaaacaagtgtngatcccaagccccagatccccactcctaccaccgggtggggtatgagctgtgggcaattcactaatcctgtctggcttcaagtttcccccacatataaaataatactactactaccctctagttcgcaaagctggagtaggattgagataacctatacgaagtactcagaacactaagtgctcaaagttagcgatgagttcctattatactggagggaatgtaggtagtgtgaatatcaggctcaaatcccagctttcaccacttgggcttgggcaagtgatgtgaccntctccagattcggtcttcgtcttatctataaaatggtaatgaataaaatgcctccctcataaaaaaaa

SEQ ID NO: 379433 - DNA, 406 bp, Homo Sapiens
aggtgaggagatagaaaccgatacagacattttcaatgcagtgtgatagctgctttcatggggacacccagggtgttataaaagcccgataaagagccataaccctagaataagagccacagaaagtctttaagggaaggtggggcttaatatgaagtaagttttaagcccagggggagggctttgaggtggatgaaaggaaattcctaggaggagggaagagttagtgcaaaaataaagtggcctgaaataactctgtcacgtgagaggttgttcccctgttagactataaacccctcgaggacagggaccactcttaaatcacctctatacacttctcactctcttgcttatggtaactgttcaataaatgtttgtggaatggaatcatatttgagggcaatgg

SEQ ID NO: 379434 - DNA, 546 bp, Homo Sapiens
  misc_feature (62)..(62): n is a, c, g, or t
aacctaatcccacttgaactggtactgcaaatgtgacctcaaagaaattggttaatggaaangcctgccacctctgatctgcttctcccactttctcccagcgggtcctaccatttggccccttgttccctgcctcaaaaactggcccagccccaaactcactggttgccgtgggaaaagatgcctaaaaggtgtttgaagatgaggaagaaaagggaagttctgggagcctggtgaagaaaccccacaactcctcaaggtcagcccatggggaagagctaggagctcagaatccaaccagcaagaggacattttaaaacagctctggggatgccaggcaagaaggagatgacggggtagataatggttactttgtaattttctggaagatcatgctggttctactagaagacttttacctcacatgattggatgctcctcaagctgaacttcttccatttgtgatagtatttggaccatttctagaatatgttataagatttttataagattgtctttccaattaaagttttaggttaaagttct

SEQ ID NO: 379435 - DNA, 483 bp, Homo Sapiens
  misc_feature (96)..(96): n is a, c, g, or t
agaatatacatgaagtttaatgtaatttggtgaacgtttaagaaaacaactccagactgcctatgtagcaagggtcagaaaaagattaaaaaaacnagccccttggaccatcccttcaattatgtatttgtgatgataatattaatttatttaaaaatgatatttaatgacaaattatgtctgggaagtttgatgaacaaatcccaggcaatggcttacttctgtccttttatttgtatatcttgataaatgagatgtgaattttaaaaatcttgcgtcaaatatttctagttacattaatgctgatagcttaagaagataacttctacttaatgaagataattaataaagcattctaattaagaaaacttgaaatagctaaattaaggaaaagggtaaggccacttggcttcaaactttggaaaatatatgggtaaaatctttaagacattttccttgtattaaaacaggtgagttttcttg

SEQ ID NO: 379436 - DNA, 434 bp, Homo Sapiens
  misc_feature (18)..(18): n is a, c, g, or t
attggacattaactttanaaaccatggataataaccctaataatccataacattattccttaaaacctgaaagaatggattccctgctccccaatgtgtttttaatatcaacttaaactaaaataatttttttacctatttttggaagcttggaaattgagatgtagttgtctaatgttaacctaattaagagagccttggtgtgatttctcatatacagcatcctaaatatttaagttttaatgtcttctaaaatattattacattcttcatactatagttttttaacatcctttagaaaacttgtatcagcttcactttcaaaccatgctggcatcgaactcaggtgtagtggtatcagaatgttatgaaataattttttattttcattataaactccatttttacaataaacacttctcaaccaaaaaaaa

SEQ ID NO: 379437 - DNA, 484 bp, Homo Sapiens
  misc_feature (146)..(146): n is a, c, g, or t
acctccaagtgctttcttctcttggctgcaattgagcactataatttgtggctttccggagggggagccttggtggtcaggtggaggaggcaggccacattccaaaagtggagtggtaggtgttcccagacagaagtgcctgattncaagagtgaagtaggggtgtagggtgaaagttggcctacctaattcaagcctcacctgaggcagtgttgcctcaaacagaaaagtgccctctctaattagctgcccccatatgcgcttagattaatgacagcccaactaacttagaaaccccttccagagtaagctagccaaacaatagatgttccatggacatgacaaagagctaattttcttgtgctaaggaatttttagctcttgtatttgtggtggactgcctcatcacctaatgaaggtgaagtacattctccattttaggaggcagagttaaaacattttcctcctgtggatgtctgattag

SEQ ID NO: 379438 - DNA, 349 bp, Homo Sapiens
  misc_feature (11)..(11): n is a, c, g, or t
gggctgcagtntgtgcagacacacaggctgagcagtgaaggggtgtgagctggggatgtgctgagctgcctagcagatcccctgggacttagggtaagccttagagagcctcagttatttcgttgcacactggaaattgagagctgactgtatattgtatgccagcattttaagtatcgtaatctctcaatcattcatgctaatgaagggtagctagagataacaaagaaaagtgtaatcaccaaatcatttctttgcatcttcagccagagctgtgatctctttgggttccgccttgagtcctcatgtccattagcccagtctaccagaataatacatagtaggtgtt

SEQ ID NO: 379439 - DNA, 414 bp, Homo Sapiens
  misc_feature (59)..(59): n is a, c, g, or t
  misc_feature (345)..(345): n is a, c, g, or t
ggaacactggttaagagtcaactccttcctcccagcaatcccgaaagaacctggaaccnacttcctcaatgtcctaacattttcctccacattaaatgcccatttaatctgtagaattgcatctcccaataaaaagtagtccctgaaagttcccgctctttgttcccttggagatttttgaaacgacaactggaatgttatgttctgctcctccctttatgcttaatccaaatcctcctactgtttgtcttctgatggtcaccgttctttcaccagaatagaaaggctcaccagacacacatatcacatcctgttcctggatcatcaaaatgtctttggctaagngcagccgcactttgaaaggctcctggttaccatcctgcagcaaacaaattcctgtctttgtctcctcac

SEQ ID NO: 379440 - DNA, 369 bp, Homo Sapiens
  misc_feature (22)..(22): n is a, c, g, or t
  misc_feature (30)..(30): n is a, c, g, or t
  misc_feature (71)..(71): n is a, c, g, or t
aacctgtatgtgtctgggacanccctgcanccctttgctggcttctagcctactcactttcaagcatttancccatgagtttcataaaatcgtagaagaaaagggcttgaggcagtggtggggaaatgataggaaagtcatttctggatgattctgccatcctgcagatccctaaaccacctctccctctccattccctccctccagagaacagcttctccttgtctcctgtggaatagttccgcccacattcatgggcccttcctgtaccaaaactgtacaggtctctcttgctttaccaaacacttggcaaacaaatgtgccgtccttggaaaaattctgttgaataaaattttctctctttgatcc

SEQ ID NO: 379441 - DNA, 463 bp, Homo Sapiens
ttgtactggtctcctttctattgtaactgtcatcatcctaactcaagatccttctgtagctttccccggttattggaatatccttattacgactgccaccttttcctaatcccagtctgtttactactgccgggttaatttccccccaaactgcatgtctggggaataaccttgtggttatgacagaattcccacaaggaaagcaaacttggcaaggtgcaaagactatgaagacttagaacttaagagttctatggagatcttcagaaatataaattagctactcaacatatctgttattctgccctgattgcactgtaaagcaaaaggagagaggccattatggggaaaaagatccaaaaggactcatctaaaacacaagttgggtagaggagataggtgagtactattatattatgttcatggaaaatgagttcatgggctttcctctaatttttatttt

SEQ ID NO: 379442 - DNA, 307 bp, Homo Sapiens
  misc_feature (93)..(93): n is a, c, g, or t
  misc_feature (97)..(97): n is a, c, g, or t
tgtaaaaattcatgtttccctctgggatcattttccttgtgtctaaagaattctttagcatttctttcagtacaggtttgcctggtgataaantccnctgttttgtttgtcctagtagacatctttattttactttcatttttgaagcatatttttgctggtatagaattataaattggcacttattttcttttaatactttacctgaagatgtcactccattgtcttctgacttccatcatttctgtagaaaagtaggctgtaaatcttttttgttgtgccattaaaaattctcttttttctgctt

SEQ ID NO: 379443 - DNA, 313 bp, Homo Sapiens
acagaataaggatgagacaaaatcaaccactcttctgcctaccctgaaacagatgaataactgagtctttactcccttttttcagtttatcttatatgaaacatagatttactgagcgttaatcagagcctcacaagaatgtaatcatttgcctcactgcctaacccctctcccttttccctcctcactctctcccctaaataatgagtttccaaaaccctctttagaaagctcaggtcacagatgctcatgtggcttgcgttttttctctggcatgtctttaaactttggcccaataaacctctactgattt

SEQ ID NO: 379444 - DNA, 549 bp, Homo Sapiens
  misc_feature (27)..(27): n is a, c, g, or t
  misc_feature (43)..(43): n is a, c, g, or t
  misc_feature (60)..(60): n is a, c, g, or t
  misc_feature (67)..(67): n is a, c, g, or t
  misc_feature (91)..(91): n is a, c, g, or t
  misc_feature (110)..(110): n is a, c, g, or t
  misc_feature (126)..(126): n is a, c, g, or t
  misc_feature (138)..(146): n is a, c, g, or t
  misc_feature (149)..(149): n is a, c, g, or t
  misc_feature (162)..(162): n is a, c, g, or t
aaacattttaaaactttaagcgaaaantgactacctggggtanaatacgtacgacaaaantatgtgngaaccaaaccccaccttcgaaaanacccactcccacccagccnggaaaattttacccancaaaaatttctnnnnnnnnncanaacgttggggggnaagaagggaaatgccttgaggcctttaagtgtaactggtcctgtcctttatccttagttcattcccatttttctcccaacaaacaacactcaattggagtttctttactcttatgtgttaggctgagttcagtagagactggaacggtcaaggcttcagactgcaatgaacatccagctgtgttcatgtgacccttagctcaatgtcaccagttaacggcattgtgaatactgtgaagtcttcggggctgttgcagtgcaacactattaacctttacgctggttaaagagccaggttgccaggcaaaacctggacctccaattaagtatagtatttctctgaatcttaggatctttaataaatttatatttggtttacctagaaaat

SEQ ID NO: 379445 - DNA, 118 bp, Homo Sapiens
cttaacaataagcatttgcttggtattggtagatttggattgcatggtaagatgactgcccattttcaccatgtatacctttgtcaaataaagatttctgatctttggtcaaaaaaaa

SEQ ID NO: 379446 - DNA, 556 bp, Homo Sapiens
acaaacacacactgaaggcctgaggaagactagatgtcacagaggtccactcagtgacaaacacacactgaaggcctgaggaagacgagatgtcacagaggtccactcagtgacaaacacacactgaaggcctgaggaagactagatgtcacagaggtccactcagtgacaaacacacattgaaggcctgaggaagacgagatgtcacagaggtccactcagtgacacacactgaaggcctgaggaagactgaggacatgggctcagtggtggcttcccagtcatggtatcactggcatggacctctgtccggcagaggtgtggactggagaccaggattcatgctggtctggaacaatgacattgccaacttaagacacacaaagcagattttcagaagtgtctggtcaagataacatgctggccaaccacaattcctagagttaagagaaccttaaaagattaccgctcatgctaaaagtatgtaaagatcccatgtacagtatgatagtgtactttttttaaaggactgtcaatatacaaaactttaaagatt

SEQ ID NO: 379447 - DNA, 527 bp, Homo Sapiens
tgtcattgacaatggcaaccacattcagctccactgcctgcacacaaaaggatgctgctagttgctgggcaacgcggtcgtcacagcaaccagcactggacccagaggtctctaccgcaaaaggctcccccctcaaaaaagtaggaaactctttgctccccctcaaaggcctgccaaagccccaaagcaccccctagaaaaggctccctacctgtctgcgagtgatggcttcccgcaacagactcacgacatcttggccctcgcagtctgatgccttgaaacccttggtccagttcaggaggatgccctggggtgagaccgagaggaagtggcaggaagctggaggccccttcaggctcactctgcctctgcaaaacctgcatccatcacaagcctaggctttccaccctccccaagcacaattccttgcctactttgctgtatggttgaaggccttgccctctgcccgctccctactccccaggaggctttcggtgtgcaaaaacctattaataaccatctaacct

SEQ ID NO: 379448 - DNA, 480 bp, Homo Sapiens
  misc_feature (209)..(209): n is a, c, g, or t
tcttctagtcatcaccataatgggaaaaaaatactcttgtgaaaactattgctatatgcgttaagtgttcatctatgtgggtacatggctatttaactggtggaaataaactggccgatacatggcgtcattggtttgaaatcatttactgtaagtgcaatgatgcaaataaatccctaagtttctgatatataatattattaaagcanctgaataggtttgaaaatccaatacaatatatgcctatatattaaaatgatgcccttaagagtatgtataatgtacataaaatatatttatagtactctaatttatgttgtaaagtatgctcccttggtttttcttaatctttgtgtatttgcacctatttaatgtttagacaaagctgatggcactatgttttgtatcatgttccttgaaactgtaaattcagtgaaaaatatctcttgcaataaatttttgttaactatttaaaaaaaa

SEQ ID NO: 379449 - DNA, 521 bp, Homo Sapiens
  misc_feature (317)..(325): n is a, c, g, or t
tgtcaaaggaaaattattttatgcaaatggaaatattctgttccgagaaataatagatctatagtgatttcattcttgtgtttaactgggacaaggtttacctttaaaagatgggttggcccttaccagtactacttgttgaataaagaaggaataccgagaagatattaattgtacgacattaagctaatagccagcaacccacatcccatcctcaagagaggtcatcaataaaaatttgttaaggaataattgagtgggctgaattacttaaaaaggtattgaaaatgataaaataaaatcagtgcggaaggatnnnnnnnnntggcactgatgaaaaagtgaaatggtgacctcggcctacccgttttgctttctactcaaactgaaagcttttctacccaggaacttttttgcttttaatcataaatggaaatgttttaattggcctctctcactttgattctgaaagagttaccaacaaccaaagaataggagaaataaaatgcaaagataaattt

SEQ ID NO: 379450 - DNA, 510 bp, Homo Sapiens
tgcccaaaacaaatccaccatgcaggatggctgttaaagcaggcatagcaactgatgatcagctggcatagttcaaaaaaatcccgtgactcagccccttgccccacatgtcctttggcaggaaatactgcccagacctagactgatgtcctagtaccaggaagtcccattaccagagaatggttgatataaagccagaaattcagaaacccaggagagtttggggaccatggagcaggccaaagttggagaactggaatttgacctgaaggtgagctccttgtcctcttcctgcccaaagtcaatattaaccccttggattgaggcaaaactgagccaaaagggagaccaaagtgactagagctgtctgcattgtagtaacaggtctggccaaacaaatacttgttagttgaatggatagaagtaagacagggaaacattatagtctttccacttaggttcttcatgtgacatacactaggtatcatgttacctactcaccaaaaaaaa

SEQ ID NO: 379451 - DNA, 531 bp, Homo Sapiens
  misc_feature (316)..(316): n is a, c, g, or t
gtgtggctgaacaccacagcctcagctgctcagagcctggggcccatgatcggctgtgactctggtcctgcacagcagggggaaccagtccccactgcccacactcaagtaagaggaaaagtctggcagtcctccccagggcaaacctgcccttgagccagccaaactgctgtgtaccttcccctgagcaggagagatccttgaaccactgagtggcttacataccctcaggctggtagagtggctatgtgtctgtgcccaggtcccgagaaacagcccactgggtgacttctggcagacacagccccaggctganccgaggcatctgtgtgttctgcatcccctgcctgagaaacagctccattaggctgcccctggcaaattacatccccaggctgacctagcaactgtgcatccttgtcttaggtctgagaaacagccccatgggctgcccctaccaaatatcctcctaggctagccatcaatattctgggtctgagaaacaaccctgcaagccacctctggcagaaa

SEQ ID NO: 379452 - DNA, 515 bp, Homo Sapiens
gtgtggtggaggaaagaaaaagatggggacaaaggaaaggtaggagtgagaataaagcacgcatggtgaaccacaaataaaaatcctccgtccccactcaagttgattatgcagagcagtaattctaaatagcctctttcaatcagactgtggggcactcactactgcctccctgacccagggcccccaaacgtgctgaaatccacagctctgtcgttcttcttcaccactgcagatgttagtgtggccattcatttctcttactccacccggcatccttccagccacgggctgcgatgctcagacgagctaagacgatgctcagcgtttgtcttagctcctccaggagagaccccagctggagctgggcgtgccgctctccggttccctcaggctaagccggcagcagctgcgtggttgggggaggggacagactgcagcgctctgctcagatctcgagctggaggccatctttggcagggcttctgaagggcaatgcaagacacagcctgatg

SEQ ID NO: 379453 - DNA, 503 bp, Homo Sapiens
  misc_feature (114)..(114): n is a, c, g, or t
caactcgctctgctggtgtgtgccctctgctcctgcctggactctgccccaggcacctgcccggaaccctcacctttttggaaaaaaacccttgggaaacccaccctcttcccnactcactgtcccttgccttgcaaggaacagatccctccccagctccttaaaggcagccgcatcaggagcggcactcacagcagaccatcccctaggcccagaggggtctagggttggtgcacggccccaggcaactcggggagcttccatgcggggctttatccagaactcccgaaaagaaggcatttctcctcaccctagagggcaggagccgggctgttcttaccaccggaaagcacaagcctccctcagactaaagcagaactgcaagaagaggagactccatcccaagaacggggttcggctcctggattccaccacgcccagagcccgggattaacctccaggcttttccatcacataagccaataaagtcacttttttgtttc

SEQ ID NO: 379454 - DNA, 227 bp, Homo Sapiens
gcctccgtcacacacacgagtaacataggatagatatgtgtatgtgaacatgtggctcttgttcccagttgtgtaatggatgcattcccttaaagtttgcagtaaagtgaatgtttattaagcaaattgtttttccccagtgacttctactgtaaaaatggcattgtctttcagtaggctctgaatatagtatgttcccatattctttggtaagatgaccaatcaac

SEQ ID NO: 379455 - DNA, 406 bp, Homo Sapiens
  misc_feature (17)..(17): n is a, c, g, or t
  misc_feature (57)..(57): n is a, c, g, or t
  misc_feature (103)..(103): n is a, c, g, or t
  misc_feature (217)..(217): n is a, c, g, or t
  misc_feature (240)..(240): n is a, c, g, or t
  misc_feature (251)..(251): n is a, c, g, or t
aatttccaaaaaagacncctccggggatattggccaaaaccgagtaaagcccccacnggatcccatcctccccccctcagttattaaatccccccctaccctncatgacccagaagagaaaggaacaacagaaagataaaacagacacagaatgatcctggttacaggagcccaatcttatggatattatccagaaaacatgataaaagtaattccncagaaatgattttctctgccacntgaatattttnttttttgtatatagtcagcaaaaaattatggtttgcataaatggaaatgtacatgaattttaaaaattttaagatatttttaatttaataaaatttatataactatattgtatttatttcccttaattcttataaattaaaaacatcagaaaatg

SEQ ID NO: 379456 - DNA, 412 bp, Homo Sapiens
  misc_feature (205)..(205): n is a, c, g, or t
agccagatgcccccccaggccacttgccccccacttgcccttgagggcaaggatgtgtgtttccgtgcctaggacctaattctacgccgatttagatcttaagatggtatgtggcactttgtaaacctcttgggccaaatttttgttggttccccaagttcagcaacagagctgcccgaggttcagactggcagcaaggtccggnctacatcccagccacacgggcaaagctcggagcaattacctgattaactttttcctttgtttctttgccagtcaagagaacaatcggatgatgagactgaggagtcggtgaagtttaagaggttacacaagctggtaaactccactcgcagagtcagaaagaaactaattagggtggaagaaatgaaaaaacccagacactgaaggt

SEQ ID NO: 379457 - DNA, 500 bp, Homo Sapiens
tgaacctgtctcatggggcaacaatgtggcctcccctcactcacagctcaccctggccatgccctcaggttaggatagtctcctgctgttttgatggaggaagcttttgcccctagaaatatagaaataattttcggcccatgtgggaaagttaagttggtttaaaaaatggagagaaacattgcccttgtctgtccatttataagcccccaaaggtcattgtgtgattaaagaagacataggtgaagtgtgtatatataagtatattcatgtctgttttgtaagtgcacaaaaaagacctaaaagaacacagaatgcactgcgagcagaagtcagtcctgggtagagaagggaatcaagagggttgctgatggtggtcctctatgctcttccctacacaatccgtattctttgtttccagtataatataatgtgcatattgaaaattgttactagatgatggcatggatgcttggctcattaaagtgagattacgaagc

SEQ ID NO: 379458 - DNA, 537 bp, Homo Sapiens
aagaaactgcccctgcaggaggaaggagagatagatatcacaccacagccaaaaagtcattctccactttatttggtgtttggtcaggagctgactgtacttctgggtctagttagaggcagcatgatttagaggaatgtggagatattggacccagtccagagaatagaataaaaatgcaataacacaatcagaaggttggagggagataatctaccagaaaaagtccaaatattcatagaaaaaacactttttgtattttcctgggggatgtttccaaatagaagaaaactgtaacatggggaaaattaataaaataaccttggcattcctttttcataattagtaagaccatagtaatgaagtagcctgcaaaacactaattggctcatggtttttccacttgccagggagtcagcagagatttctccaagggtaagaggctactacaatattcttctcagtgaggttgggcacctgccgaggaaacgaggctaagatctttggcaataaatacattccgaagacctgcatcag

SEQ ID NO: 379459 - DNA, 547 bp, Homo Sapiens
  misc_feature (182)..(182): n is a, c, g, or t
  misc_feature (318)..(318): n is a, c, g, or t
aaaaaacattgaactaattaaattagaaggatacaatgtttatgatggagatgaacaaaatgaggttacataagttaacactagagattttagtacacactatacataaatgcagttattttgatagttatttctttgatacattgcttacggggaatccaactgtttacctatattacccngaaatagtcctaaatgcctaacatatccttttggataagattgtaaaatgtccactgaaggttcctgattgttttcccctacatcctaatttatcctgtatatattttgattccatgttttaactcccattagttncagtgcttattccacagaatgtgccttattcactttgcttattcactttttacctatccctaatgcttacattttaaaatcaacgtgtaaacacaattttaaaaatcaatgtgtaagctgaactttaaaatgtttaaaattcagttgggaatgaattagggataggtacaaataagaaaaaaatcaagttattaatcaaaggaaaaataaaaattatacaaagcaatgt

SEQ ID NO: 379460 - DNA, 506 bp, Homo Sapiens
atccaaatacaatgaagatgccttaattccacagatgccaaatgaaatttatggaatgcagaaatgatttcatactggaattaagagtcttttcatcataaccaagaaatagggcacagtggaatgacagtgctgtaatccaggggacataaaacatgagtaggcaataaaatattgcagaggagaaactacatcaccattaatatatggagaaaattagtatttgtggatgcaaaaatataaaataaaattatttcaatgtcagaattgtttaacatattaaaacatgagcccactatgtaaaagggaaactggaggcaggaaaaattattcacggaatcaatttaaattgtactaagataagcactgaacctggtaatggccttagaagattttaaaaacagagcaaatatcacaaacaattcaattcagaaaactgccgaagatcttgaccttttttaaaaatacaaaaatctacagaaaagttacccttctttacgacttca

SEQ ID NO: 379461 - DNA, 538 bp, Homo Sapiens
gataatagtatttcacataaagatgagaactaatgcattatatttggctgaaacagaaaagtgaatgtggtattgtgttagtgaatcacagagcaatgtgataactttgaacctattaacatatggaatttttcacctactaacttcacttttcaactgacttactttactaagatccctaacattttatcctaaatatttatttattgattaatgggagattatttgatctctcaaaagatatcttttaatttttatgtgctaaattccctgattatgattttatgaaaccctatattttcctgcacatttttaatgtttgattttgctatggactgtgcttatttcagattttatactcatcccaagaagctaatgtcacaaatacagatatagaaccgaaagaacgatgtcagttctaaattgtttacaatactattccccttctttacttgtcatggcctgatctgttcaatcctgacacttaaattattggcattaatacatatagtggtaatgaataaattatatttaatac

SEQ ID NO: 379462 - DNA, 563 bp, Homo Sapiens
  misc_feature (161)..(161): n is a, c, g, or t
gggcatgactgtacacaacctaagactatatatatattttttcattttcaaatgtacaaatacccatagaggtgatgtgcctggataagtcatttaaccataccttagtgaaataaaggtgagggcccctaaaaagtaggaattttcactttccattacangccatgccctttattatgcagtctccatttctgtgtgatatttggtaatatcacatgtcaaatacatcaggactttgtttattttggctaactctaactatacaattgctgaacatagctttctgaaatagaaattataagagaaacccagtatgcctacagcattagtagcctaaatcctagattctagaatccaataaatttatagtagttcttaagaagtttcctttaaagcaacaaatagattattaaggcaaatttagataataacccaagttagcaataaaaccatgtgacattatagattatgtccagatactaactgctttgaccataatatcccaatgacaataaaaaatgatccttggtttaaaaattattaaatggtacttatttttatgt

SEQ ID NO: 379463 - DNA, 476 bp, Homo Sapiens
  misc_feature (392)..(392): n is a, c, g, or t
tcccttctttcttaaagtaataaaatttaccatttagttcaagctggcaatgtggacagttttcacccagcttcccttacagctgtgagcggcccaaatatgttccacatcccctagccccatgcaaagtaggcagaagtcactggatacagctgcctaaggaagcctcatggaaatgggaatatcctcatctggtgtttttttccttaactatttgccctttgtcttgtcccttatttcctagaaaatatatacaccaagaggaggacagagaaaggatactaaatgaaacaacaggggagatacaatattatctggttgcactaatcctgtgctgcttatctctggatttcatgttacatgagaaaaattaactgccatgtggtttaaanccactcttgtgggaagttcctctttcagctgatttcagtcccaactgttacatctaataaatggtcaagttttaggaatcgttc

SEQ ID NO: 379464 - DNA, 489 bp, Homo Sapiens
  misc_feature (39)..(39): n is a, c, g, or t
tatccaatagacatagtaccaacccccttgttgtgacanccaggttgagaaccacagttttaaggaagctttctgctcattactgaagtcaggcaatgctgtcagccccacattttctgctggctgtggaaccacccggtgaatgctgcacagtgagagagggatgttattataaatcgaaaactcaaggcacccataccaataaacatgaataaaaactgtaggaagatgaatgtttggtgtggcaggcctcctgagaaaagtagctgatttttctgacatggattagatacttactcaaccgtcccagaaacatctgagtgtttatatatggatgaattccttgtggacagctggattggtcactttgcaaattatttttgcgacttccactacctcttgctcttaccccttccttttatcatctgattctgcactttctaaccaaaatgtggccccaagcctaataaaaatactatttctatattc

SEQ ID NO: 379465 - DNA, 472 bp, Homo Sapiens
gggatagccctgggattcatgtcatgccagttagggatccactcattgtaagcaatacaagtgcccccgaagagacagtgcattaattgtcaccccttaggagcattgtgtgaattagtgtgatttagcacatgcccagagggatgaaactctagctccatagggtaggtcctgattactcctggagcaggcagccagctcagctcatggggagctctgagaagtctctcaatgcctcgcatgcagcccctgctcaggagtcatgtgtcacttcacagtcttgctttccagtgggtcaaagcatgatgtttatgagaaacaaatacacaaaattctgacttgtgtgaatacagaacacgtgcaataaaacgactgcaatctatttttaaaatgtggtctgagaagtcaggtttaatatgactatgtaatatataaacaatatattttccacagaaaggaaaatataaataat

SEQ ID NO: 379466 - DNA, 533 bp, Homo Sapiens
  misc_feature (94)..(94): n is a, c, g, or t
caccctgtatataaggttttcttgaggtagatgcagcaatattcctggggtaagattctataatactcctgtattggcaagtggactggaccanacagacacaggcctcagccactgtcgctagggactgaaggaaagttcatggattcttaccccctagtcatgaaagctattctggccagccttgaatccatttaattttgcccacgagaacctttcatgacaattaacaagacactagtttccccataaaagtccatttttaaatatatagtatgctaattagcagtgtctgttgaattgccctatcggatagcagcccaccatgtgtgctgaccactcacgattcagacttaccttggaaaatatcacactgacgatacagtactttagaataaattgcatattgtatcaggctccgagactaatttgtactgaacccttgatatagattaccttttataacatcaccacctgtcatgaagcttatctgttttctgatttgaataaactttgtgttgtggcaaaaaaaa

SEQ ID NO: 379467 - DNA, 535 bp, Homo Sapiens
  misc_feature (228)..(228): n is a, c, g, or t
  misc_feature (240)..(240): n is a, c, g, or t
tgctttggaggccaagtccacttccccttgctgaacccgcggcctgcaaaaactcttaaacagtttctggaggacttgttctcctatctcttaacctgccctggcccgtaatgctggtggtttagaccctggctgggactttcaggttgtttccattaaaagtcatcttattaaatgaacatgcccaatctccgaggggcactagcagaggggtggaggaatggatgnccattctggganccaggagcagctgcactgttgccattcctgaagcctggtcaccaccagagcctccttaccttgctctcctcaagcctgtttgggaatcaccagtgtgcagaagaggaagctagggaattagggcaatagtggaggtggtagtaagaaggtctgctctggaatccagtggcaggtccagaagaatccacatgcaggaagattagggtactagagttcacatggggacggatgacacaaatctgagacagaattctccctagaagttccaatcactgaataaatattgtacctactt

SEQ ID NO: 379468 - DNA, 105 bp, Homo Sapiens
acttctataaattggctttttaaaaattattttcccataatttgtctgaagcttggagaaggaaaagagattgatacctactgttaattcatcagttcgttgttt

SEQ ID NO: 379469 - DNA, 496 bp, Homo Sapiens
  misc_feature (15)..(15): n is a, c, g, or t
  misc_feature (29)..(29): n is a, c, g, or t
cctggaaaacccggnaaacccctattttnaaaatgtcgctgtttgaaaaacttcacttacgcgggcaattgaatgccacagctgaggaagccctgaagctgcccatcccagccagaacgtggctctgctggccggagcaaactctgctgtctaacctgtgacccagtctgacccttacagcctctgacttaagctgccctcaaggaatttttttaacttaagggagaaaaaaagggatctggggatggggtgggcttaaggggaactgggttcccatgctttgtaggtgtctcatagctatccctgggcatccttctttctagttcagctgccccacaggtgtgtttcccatcccactgctcccccaacacaaacccccactccagctccttcgcttaagccagcactcacaccactaacatgccctgttcagctactcccactcccggcctgtcattcagaaaaaaataaatgttctaataagctccaaaaaaaa

SEQ ID NO: 379470 - DNA, 432 bp, Homo Sapiens
tttatttaaccctcacattgactcccctaaggtagctgtattgtccttatttcacgtatgggaaaattgagattcagagaagttaagtttcccagggacaccgcagatcacgaacagagctgggattcagtccaacttcagagctaatgcactttggaggaagagatacaatctttgccctgggggtcagtatctgatctgatgagaatgtaagagctggggccaaaacaagacaagaacaagagatgagaaatgataatagctaacacttcctggatgcattgctaggtcccaagctttgctctgcactcttacactgaatcttcagacgctagaataaaagctccatgagggcagagactttgttcctctggttctctactctgtatctgccttgagatagatactcaataaatctttgatgaataaagc

SEQ ID NO: 379471 - DNA, 513 bp, Homo Sapiens
  misc_feature (421)..(421): n is a, c, g, or t
gattcccttgcggccgcagccgctgccccgggccgggcgcccgcggcggcaccatgagtccccgctcgtgcctgcgttcgctgcgcctcctcgtcttcgccgtcttctcagccgccgcgagcaactggctgtacctggccaagctgtcgtcggtggggagcatctcagaggaggagacgtgcgagaaactcaagggcctgatccagaggcaggtgcagatgtgcaagcggaacctgggaagtcatggactcggtgcgccgcggtgcccagctggccattgaggagtgccagtaccagttccggaaccggcgctggaactgctccacactcgactccttgcccgtcttcggcaaggtgggtgacgcaagggactcgggaggcggccttcgtgtaacgccatctctttcggcaggtgtggccntttgcagtgacgcgggcgtgcagcagtggggagctggagaagtgcggctgtgacaggacagtgcatggggtcagcccacagggcttccagtg

SEQ ID NO: 379472 - DNA, 370 bp, Homo Sapiens
  misc_feature (54)..(54): n is a, c, g, or t
tcctcaccttttcttcaccagggactcttcttatcctgcggctttttaccgtcnagggtatactgtgtgttttgccggccaaaacaaaatacattaattaagtactaatcgattttatttaaaaaaatgaattaacagcatacaatcaattgcccacttagaaatgcagatcaacagaacataaggtaaccagtggaactacactgagttatatatattccagcccaaagcaaataaacttaaatatttctttaatcttgcctgtgttgcctgggacagcctgattacagggcagaatttgaattatgccaggccttatgaaatgttcagcagggctatagattcctatttctcatttactggatctcag

SEQ ID NO: 379473 - DNA, 384 bp, Homo Sapiens
  misc_feature (12)..(12): n is a, c, g, or t
  misc_feature (47)..(47): n is a, c, g, or t
  misc_feature (52)..(52): n is a, c, g, or t
  misc_feature (153)..(153): n is a, c, g, or t
  misc_feature (158)..(158): n is a, c, g, or t
  misc_feature (167)..(167): n is a, c, g, or t
cctccccctccntaaccaaatggcccaatgaagtcctttcctccccntgccngcaccccacaaacaaatgtttaaactgtttccagccttgtttgcctaaggttccaaaatcccattttcccaacatttgtagagcctaagaaaacgcctaanggtcncaaagcccntattatttctatattgcaaaaatttagtcacagtggaagaagggcagaaacaaaagtaaaacaagggaagatgtggagaacagaaaaggaaagagatgaataaaaagaggcattccattcctttattcattaatttattgattcattaaccaattatttgaggattttatatactagcactgttatatgctgaaaaataaagtcaaatgagatgtgg

SEQ ID NO: 379474 - DNA, 467 bp, Homo Sapiens
gtcttgtgccaagcccttgaagttaacgtagcgacgacgtggtccttgtaggaccaagcattcttggcattctgtcgagattgagattccagagcatcggatgaacgggacttatagctaaggcgtactcacccacccctcccttcgtctttttacgcacgcagcaactcgtcctcacgtgcataggggtagtggacagtgttgacttgaattgctgtccctcgttccaagcctttcctgtgaatgaacccgaaaacactcgacaggtcgtgaataatcgttttaatgagtgtgcaaagcgtgcgacggggtgcaccgagctgtcgggttaaacaaacaacttgtaccctgaccaaatccgattgttaaagtgcaaagtgatgtcagtaccatttccattgcctttcggaaatccacagatctgacacgcgggagtccaattttccccattaaagaaaaatagcaat

SEQ ID NO: 379475 - DNA, 456 bp, Homo Sapiens
  misc_feature (116)..(116): n is a, c, g, or t
tgggcccaggcagctgccaactttaagatatgttgattgtaaaatgtacttcttgttaaattaatgaggtgacccagtccatcagtattttaactatgagccagtagattggttcncaagcatattaaaggccaaaccctaaaaatggcttcaggtctcattgcctctaggttcttgtgttcattctcgctggacacatttccatcagtgcaccctaaattaatacaacagaggatcaggttctcccacgtttgggtgcttagggactaggaaagcaagaccatggttggtttagtagcaaactgtgtggaatcatatagactacaaagagtcaaccaatattgccttgtcttcacagccagaaaacagtcgccggaaacgtagtgagtactggctaacagtactataaaaaatagtataaatactatattatattaaaatatcctatatagtatt

SEQ ID NO: 379476 - DNA, 379 bp, Homo Sapiens
tggtcagcaaccagatgatatatttctcctgcctgggtctttattacaggaaagatgattgacatattactgggcccagcatccagatgatgtgactctcttcttctgttggtccttgcttacagggaaactgtagcatattgctacacccaacacctagcttatgtgattcttcttttaggtttgcccttcagggaacattgtgacatattgctgggccctgcactgataatttgtgactcttctgcctgtgatttgcccacttggggcattgtgacatattgctgggtttaacactcaggtgatgtaacttttatgcctaggccttgcttacaggaggcattttgaaatgtctttgtggctgggcatggtggctcat

SEQ ID NO: 379477 - DNA, 471 bp, Homo Sapiens
  misc_feature (166)..(166): n is a, c, g, or t
ggacctatggaagagttggaaatgaagcagggaagagtgagacacaccttgaacttctagactcctctccatttgtattcaaaccataaaaaccctagatctatgcaggtcccaggtccctgaaatttagaggaaacccagaagaaaatttgaaataccctttcanccagggcaagaaaaacataaggaatgggatccctgattgcaaagaaccattctaaattctaaaaccactctctgaaaaaacctcatcaagagatggctaggctctttgaagttccccacagtctaagaaggaataaaaaggaagagagacttagctgtctcagtcattccttagaggccttggataaccagactattctgggcaatcagtataatttagtcttccaaactgtgtttttcccatctcctgtggtccaaaaaccttgtaacagaaagcgattgaactccttcctaattctaggtctc

SEQ ID NO: 379478 - DNA, 179 bp, Homo Sapiens
catttaagtgttggaagatgctacctaacagccacgttcacatttacgtagctggttgcttacaaaacggcctgagcccctggttgggtgggtggtggattcttggacgtgtgtgtcatacaagcatagactggattaaagaagttttccagttccaaaaattaaaggaatatatcctt

SEQ ID NO: 379479 - DNA, 447 bp, Homo Sapiens
ccttaagaaagtactctttgcccaaatatgtgttatatgtgacaggttccattcttctcaatatatctgcattggtgaagaatgaacccatatacccaataagttataactttaaaagagtagaaatggatttaaacaacgaccacaaaaacaaatcaaatatccagcaaaacagatgagtgttgtcttttagagcaattgctttggaaaattcaactgatttcactgacattgattgcacaaaacacattttatcttctttaaaattgcctttcagaagcgtattagcagccataaccaactatttgcctcactctcttatagacgtgtgtttgtcttagtagattcatatagttccacagacatctagtcagcaacctcaaaagagtaaatggtctctatgattaatgtcctttaataaagttcagaattggatgagaaaaaaaa

SEQ ID NO: 379480 - DNA, 373 bp, Homo Sapiens
  misc_feature (44)..(44): n is a, c, g, or t
  misc_feature (173)..(173): n is a, c, g, or t
gaggtaattttatagaaaattattatgatcaataatttctgtcncattcaatttaactactagttttagaaacccaaattttaagagaacataaaataaatgagaatatgtccatttctgtaacataggaaatttcagctacataatgtcctgatgattcctttagagtgccnaatgcatctatcctcctgtgtttttattactttaaagtactgaagaatgcttggaaatttgcaacagcttgtttcaaagattacttaggggtcagaatttattatttctaaaaattgtaacttcctcagtatttcaatgtaatttacagcactgatcctagtcttacagaatttaataaagtatgttgtgctcctgaact

SEQ ID NO: 379481 - DNA, 469 bp, Homo Sapiens
acaaccccccacaaagactgtgaggcctgggtgacagggaagggaaaatcctaacagggagacatcttgagctcatgggcaaaaactcccccaataagaatttaagatggcaaagtttggccttcctctgggggcatgacccagacatgcgcagtaaggggcaaaatgacagagtttgacaaatatatgaccttcccatggggcttggccgggagtgctagcccagtaagggaaaattgccctaagagagcatgtgcataacttcaatccccaaaaggcccttccagatactggcaaaccactgcacatacagggagggaagagatggggaaaaaaataggaaataataaatctctaagagccctaagacaaaggtcaagctgggtactcaatcttttgacgtcccccttcgttccatccaagtgtacttttttttgcttcaataaactcttgtttctgccttaaatat

SEQ ID NO: 379482 - DNA, 466 bp, Homo Sapiens
cagactcggacatggtcagtggaaaggagacgcccaccctaaggattcatactcaccagagggcaaacagcaatgaagatgtctaggagatgaactagaaataaggggtcagaataatgctggcaaatcctcctacccaaaaaggggtcaattgtccagagacctagactggatacgaactagcagtacttccttcctgactgtgactcctactacctgccagccttcttccttgctctgcgctgggatcatactcccaaatcacattactaaatgccaacaattatctctgaattccctatccaggctcccctcatttcaccttcagcatatattctagtcatgaatttccttcttcacacaccccacatctctgggctttgtgccagaccatctctaacttaatcctctcatccctgttcccctttctccaaagagatgaagctcaaataaaatgtataactct

SEQ ID NO: 379483 - DNA, 533 bp, Homo Sapiens
tagagacattgttctccaccaaagcccggcacgatccagcaaggccagaccacgcagaggcactttgacgaggcagaggaagggactttctcaacctccccgccggtggtggatccttcaccaccccaataccaaagggattctctaaaaactacccggtgcctgagctggaatctagacaattagaagtgcagccctgcagccccagtctttctcccatggggcagggccccgggtggaggcaggacatctctgtggtctccaggctacagaactttgggcaaaccctctccctttctcaccctctgtctgcccaacataccagctgtgggaggctgggcaaaagagtgaatctctttgaaccccagtttcctcctctgtaaagtggggataaaattggtttaccctatgaggagttaatacatgctcacaggggatgatgtgagaactagaagtgaattcgtataaactgttcagaacagagcctggcacatggttagtgcctaaataaatgcctagttgttattgctgtt

SEQ ID NO: 379484 - DNA, 684 bp, Homo Sapiens
  misc_feature (116)..(275): n is a, c, g, or t
gagctttctcatttgtaaaatgagaagggtgatgatctcctagattcctttttggagaagcagggaaactaccaacctttaagcacatactgagtgccaagcatttgaaataccgnnnnnnnnnnnnnnnnnnnnnnnnnnnnnnnnnnnnnnnnnnnnnnnnnnnnnnnnnnnnnnnnnnnnnnnnnnnnnnnnnnnnnnnnnnnnnnnnnnnnnnnnnnnnnnnnnnnnnnnnnnnnnnnnnnnnnnnnnnnnnnnnnnnnnnnnnnnnnnnntgaatgcgtttttccacatccatctgtatgcttgtgagttctagtgctacttagtgaatcctcacccagaatagaatacatgacaagtcccttactaaaactggagaaagtcaaagtatattaaagcttggcctgcatatttataaacaagttttctctgacgtagataaatatcaagcattagggacagaagacgaataattgacaaagtattgtctaagttgctcttattgtgtagaactttcccattttaatggtgactcatactaccataaaaactttgtttggtatttgtttgtgtcttattatatagagtttgatgtaatgcttacatatggcataatgtgtctttaatatgatgttaataaacctttatttaatgcttttgttttttagcatataaaaaaaa

SEQ ID NO: 379485 - DNA, 532 bp, Homo Sapiens
agaggttgcagtgagccaagatcatgccattgtactccatcctgggcgacaagagtgaaactccatctttctagcggccttcaatagcccttcaagttttccctttttccagaaagagttgtcttcttattcaggtacattggcagtagccatcaaaatctgctctgggcatgtttcttatcagctcttcctcttcattcctgttcccagctcccagtcaattgctctggccaccttgcccactacccccaaggctgttcctagctgattttttcctgcaagcctcaccccacacaagtcagttgtatgcacaaggatctggatctggaaagtaaggccttcaatagctcagtaaatcattgctgaaccaggtgaaatgattttcccaaggtcatgcggcgagttgatagcaagagtagctctgggattccacatccccttcgatagggtttctcagagaagccgcagagtgttcagggctttcctcagtagatctgtcttcctgggccagggtgaggtagaaacaatagct

SEQ ID NO: 379486 - DNA, 479 bp, Homo Sapiens
  misc_feature (105)..(105): n is a, c, g, or t
  misc_feature (156)..(156): n is a, c, g, or t
ctagaaagaagcaaggcacatatcactgagcacttcctgggaacttatttttttgctgctgagggggagtcagtctttaaacaaattgccaattgtgttaagagnaaaaaagctttatatgcaaaagtaattgatgccaagatacaagacaatgancaaggccatatggccccaagaggtgccagagtgtaagcactctggcatcaaagataaatagggaaaaactataatcataatacaatactgttaatagcagcagcaactgggccttgtgtttgcactgtgtgctgcattgagacaattaaatgttctatgctctggatccaaattcctaggtgtgaattcagcctattgggactgtcgcttgcttactctataaacttggtgaagtcacttcatttcccaatttttccatcaaaacaaaaacaattcccatcttaccagctggttgtaagaattaaaagatttataaagcaagc

SEQ ID NO: 379487 - DNA, 296 bp, Homo Sapiens
tatttaaacttatgctccttctgtttctccatgcttcatgggtgactttgttccttttgcctgtcgtctcactgttttgggatggcaactccagtatcatttctttataagaggtaggacaaagaggaatgacaaaaggcatgtaaccacctgaatttgccccctatcaaagagctctcccaggaagcaccacccaaggaattttcactgacatttccccaggcccagacccatgctgcctgctaagcaaaatgaggattctgcctagtgaggatgaaaggaagaatgtgtaatca

SEQ ID NO: 379488 - DNA, 548 bp, Homo Sapiens
gatgctggcagaagacatgatactcctagatcagagacaaagacttcattacagcacagcaagcaaaacgaactcccttgtccctccaagtgctttggggttgacatagaggggcctcggtgggtactgtgcaattagtgggtttgcatcacagctgaggaatcctaagtttaggaatcctgaatgttttgtaagggatgaacaaatgaatcctgccctgaactttgcctcggaagagaaccactatctttattatattgggccataaacaaagctgcccctaccatctgtttccatgggagacactaactctatattcccagcctgtttactatcaaaacattattgaaaagagttcagaacaaaagcatagttagtatctttgctctcaatatgtacagaaatgtgagagacctatagaggtctagttctaatgtacctaatgtacactgtggactgtgatagcttatgggtaaaatgatgaaaggaccgaaaagcctattgatgagcttgcataatgtatatatttctgactcagataaaaaaaa

SEQ ID NO: 379489 - DNA, 507 bp, Homo Sapiens
  misc_feature (41)..(41): n is a, c, g, or t
cctcaacattctaccagtgggggcttggagcagattggacntgattcttaaaaataatgtgccactttttgccctgaagttgtgaagcaaactcatatctactacacattgtatatataaatagtaggctaagcttatagcactttttaaaacttattattatggaaaaaatttaaatatatacaaaaataatagaaagaatggacctctgtgtatccatccccctaggtcaagtattatcaatttacagccatcttttgaatctattctcccaccccactatccctcatggcttagtttgaaacaataccccagacgttatagcatttatctgtaaacgtttcggtatcccatttcctaaatccactaaaccattattatacattaaaaaactaacaataattccttaatttcatcaaatattcattattcaaatgtacttgattgtctcatgtttttttgaaacaacatgtttgaatcaagatctaaataaataaaacacattgt

SEQ ID NO: 379490 - DNA, 179 bp, Homo Sapiens
aggtaagatttgcatacagtgaaatgcacaaatttaaaatataccatttggtgagttttgatctacaactgtgtagctcaaacctctgtcaagaattagaacaatatcacctcagaaagtcctctcttgcctgcttctaatcagtcttcttgcacgtcaggcaaccattgtcctaattt

SEQ ID NO: 379491 - DNA, 394 bp, Homo Sapiens
  misc_feature (93)..(93): n is a, c, g, or t
  misc_feature (163)..(163): n is a, c, g, or t
  misc_feature (218)..(218): n is a, c, g, or t
  misc_feature (241)..(241): n is a, c, g, or t
cctcacatttaaagcaaagcaggaccaccacatagcattaggcaggttttgcacttaatctagggtgctacatgtaagacgtggcatttgcanttgtggataggtaaatttactatgtttttctggcaaatgaccatgaatgtatccgaggaagggaagccanacttttcaaattccacctaaaggcaccctaaggatcagtgccaaaaatccctganccactgcccatgtagaaaagagnctgtgtgttattgcccaactttaaatttatccagagaatgagtcaaaataaaaatgatatttaaagtctgactgaaaatagcaattatattagagaagaaataatgaaccaaatccccaaaaatgaacataaaacttaaagtataataataat

SEQ ID NO: 379492 - DNA, 425 bp, Homo Sapiens
  misc_feature (20)..(20): n is a, c, g, or t
  misc_feature (45)..(45): n is a, c, g, or t
  misc_feature (266)..(296): n is a, c, g, or t
cgggatactgtccagatgancctaccccgggcccattaatgttantctcccctccatcaataataagacttgggccttagagttaggtctgtcccctacaccccacagaaagattcgggaacacaaattttacaaacacacaaagcctagggctttcccaggcttttccattgtccttaaattgcctaaaattaaactgtccctttgggaagtttttaaatagcaaatgttttacacctcttgaaatttgcaacattttctttcannnnnnnnnnnnnnnnnnnnnnnnnnnnnnnccctcatgtcttctaatggaaaagaaaaatgaagttcaattatttgtttttctttatccagtatatatatgtatattttctgattgtgttgtttttctgtctaaaagtttggtcatgcttcaaaaaaaa

SEQ ID NO: 379493 - DNA, 543 bp, Homo Sapiens
  misc_feature (58)..(58): n is a, c, g, or t
  misc_feature (107)..(107): n is a, c, g, or t
attagtttgttcatccatcacaatctcaaatgctaagcagggcatttgaatctctccncagtgcaaatcagcgccgtcttttaaagttgagtttcttgttattctcncctgatgtaccttatttatcccacacccaccccaataacatatcgtgcctcactgttatctttgaggcaacccttgaattttacctcagccctggagcgctcttcacatgtcttgtcccagagcccagttcggactcattcttcagccgtgcatcagtcagtgggggctagcttaaactgtggtgacaaacaacctccaaatttcagtggctcaaaaatcttcttcctcatttatttacatctcatgactggtcaggtgagaggtagctctgtgctgtgtcatcctaacacaggaatccagaaggaaggagggaccgtcaagatccccattgctatagaaaagagaaaaaagcatgcggaatagaacgctgtttcttggagatttctcctgaaaaagtcacatgttatttcttctcacctccatcggcaaaaaaaa

SEQ ID NO: 379494 - DNA, 319 bp, Homo Sapiens
  misc_feature (27)..(27): n is a, c, g, or t
  misc_feature (38)..(38): n is a, c, g, or t
  misc_feature (59)..(59): n is a, c, g, or t
ttccaaacccctaagagtaccagcggntagtaagatancccttaggtttaccgttttgntaccgtcaagtagccttattaagaaaaagattcatgacttaaattcctaattcctcagttgatacaaaggcttataatcatgtgttttaaaattttgatttcattttcgttccttgaaggttaaagaatggaaactggggataaaaattaatacactgcagctttgccaaggtctgtgatatggttgtaaccttttaaagactactaaagtcataatttgaaatttttactaaaataaaacatatgtgtctatggttttc

SEQ ID NO: 379495 - DNA, 189 bp, Homo Sapiens
  misc_feature (33)..(33): n is a, c, g, or t
ggaaatgaatttaagggcatctaactcaacagnaaagggaggcgggcctagtgaggttaagctggtaggtcgttagagatggagctggcctccatttatccatttgtaactagaccttcaaagaccatctaggagcattagtataaaaggtaaaaatgatcttaggattctgttgttatttttgtgatt

SEQ ID NO: 379496 - DNA, 556 bp, Homo Sapiens
tcactaaaataatcagatatttcacatatttcctatcaacagtggagtatcctagcagaggctcctcatgaggcagcatgccttgctggttaaaaccttaggctcataagtcagaccacttacatataattcccagcctcatcacttggtgcttatgtgaccctcagcaagttgttgaatctttttatgtctcaattttctaatccagaaaagccagaatgataagaatatccttaacatatggattgttatgaattgtgccctaaggtaacacatgaaatcctacccaaatattaacagttattccttaggaaattgaagcccacacaattacctgttgttttattcctgctctgttgaatgtccacactgcatttttctattgatgatttctgtattaaggatgtcactagtacataaggaaaaacaagagtattaaatgctgaaatgtgtggtggagtggatatattatatttgttactttaggaaactagataatctcaacacgcttgaatatggacagaaaataaaagtattagcgaagtggtaaaaaaaa

SEQ ID NO: 379497 - DNA, 436 bp, Homo Sapiens
tagcatttgacatttaatgatggggtaaataaccttggttagaattaaaataataaaatacaaactaattttatttaattattcaagcccaggccatacataaaagcactgaggatcaaacataaatatccacaagggtgccagtgacagccaacaggcatgtgcaaaccacctctcacaatacgttttaaagatcaagcagtctttcaaagcacagtcatccatttgccgtggttttgtagcactgatattatacatattttatatatagttccattaactgaatgtcaaagctgcctgtgtgacacctaagaaaattcagtgagagcaatactaagacataaagatttttgttggatgggttggactttggagggccacggaccattatctaaggttttttaccccatcattaaatgtcaaatgctaaaaaaaa

SEQ ID NO: 379498 - DNA, 456 bp, Homo Sapiens
gatgctgggctctgcagcatcaatcctgtggcctgcctccccgacctggcagcctgtgtcccggacttaccccctttctcttaccacggcttctagtcctgagggtgtggcgggcggcgtggttaggcacatgtacttttccctgtttctactttctattctccgtgtttttatcacacctgctccccagattcccaccccctcaatgttcctctcacacgaaacccccatcagtccctttggttaattcttacttcctgttcatctctaaagtgttaaattataaaaatgatttttaaatattcaaagaaaaatatcacaaatcctactactcagaaataggtggtcacattacatcagacatctctttatgcatgtgcattcaaaaggaagagtagatagaattttgtaaaacagatgttgtatgtaatttataataaaaagtattagaggaaa

SEQ ID NO: 379499 - DNA, 420 bp, Homo Sapiens
  misc_feature (33)..(33): n is a, c, g, or t
  misc_feature (41)..(41): n is a, c, g, or t
  misc_feature (56)..(56): n is a, c, g, or t
  misc_feature (326)..(361): n is a, c, g, or t
cgacgcagtgtgccctcaggggccccgggaccngggacacnggacatgggtaagtncctgaactccctctcctgccctaagggttcctccatcctatcaaatgaaagtagtaatagtgagtattcactgaacacttccctatttggctgcactttttaatgtgtttcatattatgatgtgcccaggcagagctctgtaataagtcagtgcttctcaaactctctgtggtaaatgattaccttttttcttgaatttccaatttgccacagatcaatatttctgcaaagtactttaaaagttacttcctatgagcttttacagtgacnnnnnnnnnnnnnnnnnnnnnnnnnnnnnnnnnnnncactgtacaaattagttattggttataaattactacaaacacttcaataaatatttaac

SEQ ID NO: 379500 - DNA, 451 bp, Homo Sapiens
  misc_feature (265)..(265): n is a, c, g, or t
tttgatatttgacaaactttccaaaatcaaatgtaaaatcctaacttaaaggtttccgacctcaagcctaacttttggccattaaaccccttggaagcccaaatagggcccctggaagtcccaaaagaaacatattaggcctaatttggtatattaaaatccatacaggaagcctgatcaaatgaaaaaatgttgtttaaatttctttgagttgtatttgtataaatctgttattaatatgcatcccaaaattgtatcatattgnctaaaatgttgatagatcttgttatatgttattggtaataattgttatcctgttaaattattgtataccacagaaataatgaaatttctttgtcaattgcatcagtaatcatggctcttctaagtcttttgtcattcacagatgattattgttttacttggattcttttcaaaagtggtttgtaat

SEQ ID NO: 379501 - DNA, 2280 bp, Homo Sapiens
  misc_feature (346)..(346): n is a, c, g, or t
  misc_feature (1130)..(1155): n is a, c, g, or t
  misc_feature (1178)..(1419): n is a, c, g, or t
cacgagggacagcctcatcacaaagacatgtatagagtaaatcttttccacagcagaaaggacgtaatatgcattatatctggttataagtaaatatgacaacctcataatatttaagaaatttttatattggtttgctcatttgggtatgaggatcaaatcatgactgctatagccacataattttcacccggccagccagacacacatatgcataagcatatacatgtgtttgatgtaaaacagcttttgggaccagctgatccagatttttcttaggtgccacccatggggcttcaaaggaaagtctatttcttggactatgtggaacagtaaggaatggcantcaactaccccattttcctcattctccatgttattgtctcagagacaaaatattctctttacaccaagcattttttccctcaagatggatgtgtataacaacaagtgatctcttaatagtgcctcctgaaggatatcaagagtgcacatatcttttctacatagaactgaaggagcaagattagatttcgtgcaatcttagaacaagatgtgtataaagctgttgacagcaactaagtaacccaaacttcagaagtttcgttgtctagagccccttctccaattgtaagtccaaagagtatgtctagctctttactggtccatcttccaaaagactattacaatacagccttacaatctcttataatggaagtttatcattttttgcctcatttcacccaagtggcagtcaacagagtacatgtttgtatgtggtggggatgggaggcaggtctaacttctactgattcaaacagctttatcttacttagggagtatactttatcacttagaagtcaaaacattcttccagccaggaattagtgatccattaaaacttatttctaattcatgtcaaatcatgaaccaaaacatactcagtataaaaacctaatgtgagtcagtgtaatgtttatttcttcatactaagcagtgtttacttcaattttttattactctctccatctttctccagataagaaaatcacagatttcacaaaacctttcatatatgtatatacacatacttgaagacatcaattaactcaaagattaaggaaaaagannnnnnnnnnnnnnnnnnnnnnnnnnagatagagtttcactcttgtcannnnnnnnnnnnnnnnnnnnnnnnnnnnnnnnnnnnnnnnnnnnnnnnnnnnnnnnnnnnnnnnnnnnnnnnnnnnnnnnnnnnnnnnnnnnnnnnnnnnnnnnnnnnnnnnnnnnnnnnnnnnnnnnnnnnnnnnnnnnnnnnnnnnnnnnnnnnnnnnnnnnnnnnnnnnnnnnnnnnnnnnnnnnnnnnnnnnnnnnnnnnnnnnnnnnnnnnnnnnnnnnnnnnnnnnnnnnnnnnnntgagccaccgcccccagccagaaaaacaatttttaattttcaaggctggctctccattaataatctctcccatgccctggactagctatactttatcctgcaaggggaataagttatggattccattggtatgtctactttgttcacttcttgggctgcaatatctacacttcccattcacccttaccacttacttagtagatagtctagccacttgcaacaggttcatggctaccatttgggaatgtctataggagatcaaggagatccattgaaactcagcccccaaatccaaagtcactttccttttgatatctgtagtttcatcatctgtcataaccatgcctacttatcatctgtgaaacaccctttctacattaagggatactcacattatgaattctagttgtggttgttttaaaatatattcacaaattttctcatgctcggtcacttcctccttttgactatgtgttggatttagtgattcccatctaatgaatacaatgaaacaatggtgtttaaattatagactaggtcataaaaaattgtgtacttcctccatgtttatctctcttctatcacttcctctagtacaagccagctgccatgttgtgagcacataccacatagctccatggagatgcccatgtgactgtgatgaagagctaagacttcctgtcagtggccgtgtgagtgacccatgttagaaacagatccgccagcccaaacagaaccttcagacaactgcagccccagctggcatcttgactgcaactcatgagcgattctaagcccaccgaagctgctcttgaattattgattcacaaaaacttttaggtaataaatgtgtgttgtttt

SEQ ID NO: 379502 - DNA, 365 bp, Homo Sapiens
  misc_feature (60)..(60): n is a, c, g, or t
  misc_feature (82)..(82): n is a, c, g, or t
gtaagctctgtcctttccactgttttgcagttccgtctgtgccataggcaagtgtctccnaaatcctacttactgaaccctnccaatcccattttatttgtctatgtccatgggcaaatactgtcctaccttagatattatagctttgtaatgagtgttgtctatagaaaatgccctcctaccttgttggtcttcttcataagtgtctttttaactcttgaacctttgcattacattttggaaactatttgccaagttctaaaaaagaagtcctattgagggttgtttaatattgtaatgaatgtatgaataaatttggcaagaatggagagctttgcaaaataaagaacattgtatacattttc

SEQ ID NO: 379503 - DNA, 560 bp, Homo Sapiens
ctgctgtggactcttttccagattatggtgtttttgttccagttgatcatccaattctggccacaccattatggcatttgaaactaatccatgccatgttttgggctgtctaaatgatctgaagtctgacactagtgtgccttttatcacaaaagtcattcaacagtgtgctgatgttgaagttatttgatgaacctcccatgctcgtcaactgagcccatctgtgggcatctggtattgtggaacattggaatggtctcctcattaacatctcctaatcttcttccctcaccttctcctgatcaacacaccttagtaagacaattgatcattcaatgcccagtccttactgggaagggatcatttactctcagttgcttcctgagtaatgattaggagcaaagaggtgagagttatatagacttattttaaaaattcaggactctgcccaaatattcctgggcatgatgtttttatttttctcctaatggcaactccaagccagtctggttggttcatctgctaactgttgtgagtaataaagccttttgtcttaaccc

SEQ ID NO: 379504 - DNA, 126 bp, Homo Sapiens
cataggagtcttattcttgatagggaaaaaaccttaattagcatcaaccctggatggacttgcagctataaataggcaattcagattgctgtagtcttaatagaagaataaatttctgtcaatggc

SEQ ID NO: 379505 - DNA, 547 bp, Homo Sapiens
ccagtagtttcttctcctttactatagtacctggaagaatcttttagtttgctttaactctctcgtttcgtcctttacttatccaagggccattgcaaatcctaactctgattagaactgaaaaaaaatattttaaggttgtgccttatctggtacttaactattctgactgacttttaaaacttttcattcttgtgggtcttgatttcagggcacaagctatagcaattggacaagcaatggttgatggacgttggctggattgtgttagtcatcacgaccagcttttcagagatgagtatgcgctgtatagaccactgcaggtacttttcagtgtttactgccaattagaatgtagcaagcttattttatagtctttcttcatcagtgggaataaaaagtagtttattagaagatgatttttctaacattttttcctgctgtttgaggaaagttaaaactttttttacttggtaggcagcagtgatgaaaaagctgccattagaatcaaacattttattgtttactttaaatttgatcagacaat

SEQ ID NO: 379506 - DNA, 710 bp, Homo Sapiens
  misc_feature (63)..(63): n is a, c, g, or t
  misc_feature (159)..(159): n is a, c, g, or t
  misc_feature (267)..(294): n is a, c, g, or t
  misc_feature (491)..(509): n is a, c, g, or t
ggcaaatatccacaataataaacgcccaaattccctagggcggaccatttgaccaacccacanggaaaactttgggggaggccatgaggggggaacatcctcaaaatgcccaatgtaaaatttaacttacagcaatattcacccagcagaaaatgtctntcatatggaatgatttcatgttgcctaagaaaaagaattcaatttgtagtcctgatttgaatactagaatgttggctataatagttctgttcttacaacacatgaaannnnnnnnnnnnnnnnnnnnnnnnnnnnatagtgcatgttcatttctactcacaaacatgttcttggtgtatttcttatgcaaacaatcttcaggcagcaaagatgtctgttacatctaaacttgaataataaagttttaccaccagttacacataacggcgttggtatggtttatatggattcactttcatccttctagcaataggaaatacagatcattgtannnnnnnnnnnnnnnnnnncaggctctgctgaattgaaatggtgaaatcaaatcaccattctaaaaaattattacttatattgataaagcctggattctctcaacttgttttgctttgctttttttctttaaccaatcaatctcttactgatagattttgtgtaaaaagatatatactagtttcttcagaaagattaacaataaaaattgtgtttatttc

SEQ ID NO: 379507 - DNA, 539 bp, Homo Sapiens
  misc_feature (310)..(310): n is a, c, g, or t
agaaatattcccatcagacgttgtggagctatttcttgattgtgactgtgtgtttcaacccttacctatgaagatgtttgttcatctagcaaatatttattgaagactcattagatgttgggatacaaaggtagacataggtgttcttatggtctccttatggagtttattccagtggggagtataggtatttgataaatattgaaatttagactgaaacaagtattctgaaggaaataaacaagggctgacagagggaagaaggagtgaggcgagccctgggtatttacagggattagagtcttcagtncatagcatccttaatccccttgaaaagttggaatcacgaatcataattgcgtaaatttaagtttccttgctgccatctaagtcttcagtcttcatttaagattgattgctacatgtaatatgtgtctgatatttaatgtatgataatactgggttttacatagtcaaggataactaggacttataaatatctagcatgcttgactaatgagtttaattttttacttttt

SEQ ID NO: 379508 - DNA, 534 bp, Homo Sapiens
  misc_feature (113)..(113): n is a, c, g, or t
  misc_feature (277)..(277): n is a, c, g, or t
gactttctctgtgtggtggttatattcggggtgtctctgaatgccagcataaaaattcacggaattgaatagaaattggcctgtcttaatgacctatggtttcttttttaatnttttgaaataattaaagagagtttagtcacacagggaggtctaggtgaactgatgttgaagtttattactagacttttcagacctaaaaattttatttattgagtattacttgaatatgtcaaacagtatattactggacaaccttttacacattccctctttnctaaaatcgaattggacaatgacagttctctggttcagaaaattacattagcgcagaacccagtaacccttgataaccctgttagcgcagcaattcccgagtgtgtgctttgtgcagagcgttggactatgtactgctcttgatgtggggacagcggggacagagagctgtcattgaaatagacatctgtttaagaagcgatacttagatgaacctctgtatttctgaaaaataaatgtgaaatatcttaagagctt

SEQ ID NO: 379509 - DNA, 513 bp, Homo Sapiens
gtggttattgtcttgcttgaataattgacattcaaagttcctaacacagttggaatttctgcgttccttatgctgcagtctacttagcttcttccgtccctgctatttttggtttccccttttattcttagccacattctaatttctagaataagtattttcttaggttcctatttaagaactcaaacatattccttcccattgaaaatcaccctaataagctgaccagagaaacccgttaatccgggtacataaacatcctagtttcctgccttattttccaatgacttgaaactaaatatcccagttcccatttttggtcatctcttgcctatcatagttcttccaataaatttgttataattaccaccaactggtccttactgtacttaaaagcggaaatgtctttccactgatttctacttaggacttactccacctttaatatgacatatgacttttacctaatggatgtatactgtccctctagcaaattaaaattttctattaagt

SEQ ID NO: 379510 - DNA, 707 bp, Homo Sapiens
  misc_feature (61)..(61): n is a, c, g, or t
cgggtttgacttgagacaagcagcccttgcaaactcctttagtgagtcagagaaatatccnttaaatgtggtatatgttgaattcaaaacccccaataagcccccataaaactgtatttcccttttagtgataggaaatatatatatatagggcaacatgccatttactgtaaaaaggatgttttgacaaaaggaccagaagcattggacccctataaacttcatctatgttataggtctttgaatctgctgaagtttatgtctcttcttccagtattttacttctgttcaatgttataatattttactatacttaaggaacttgccacttcctgcttatgggtaccactttatgtaatattattaatatattgaattaaccatgatgttttgccaaaatgtcaattaaactgaaagcagaagtgacagccctgacagaaaacagtgaagcagtgttccttgtttttacccacacccaaagcaaattgttttgattttcctcccacaatgtgtgtagattaaaaagcattagctaaatcaaaagccgcatacaaagtgctggaaaccacattctgctcagtgaagataccacatcctagagcgaatgtgcaagtgtgacttaagtttatgctaatgtgcattcatcctataatccatctggttttgacagaggccagttaggttaactgaataaagatataaaatgg

SEQ ID NO: 379511 - DNA, 507 bp, Homo Sapiens
  misc_feature (162)..(162): n is a, c, g, or t
gccatagtctgtaggtgaatgaacaagctacatttctccagaattactcattttctttttaaagataaactggtcaatactctccttcctggtatggaggaattttttgtatatgagaagcattcatgaatataatctgccctcttgctttattggccatanggaggggaaattcactgctttcacacccttctgttttggctctttctccccaaaagataagaatctttatttagtatcataccaagaaattggagttcctttagcttcagactatcatcatggcttccaaattgttaggaaatacaagtttgcaagaccccaaggggacttaatattttacatcttactagccatgtcataggttttaagtgcttttaatggggaactgtttcactcatgccatatacctgttttgtttttctaaaaaattaatactgtaagttgtgagcaggtgtcttgtatcactgcgaaacccatgcataataaaaacttgttcttgagact

SEQ ID NO: 379512 - DNA, 464 bp, Homo Sapiens
aaaactatgggcaatgagccactgcactggggccgccatgctgtatttaggattaggcatccaaagttctcagcataagagactagcaggtgaatagctaacgtttacttggtgcctgctatgtgcaagcaagtctctgtgcctctttggacccaaaagtacgctggtatttgggatagcacaggagtggggaagttgggggccaggtctagctgcaatagggtccatgtggcaggagctgcttggagggtgatgacttgagttggtgccagatggggcagggtcacccgtgcacccgtggtagcacttcctggatgatataggagaggcacacaactcgctgcccgcatccttaggctgcccaccctgcttccttgagaactaccacaggcacacaccagggagccaacatttaaaaatgtttaaaaggtagagatttcttaccaaactcataccaaaaaaaa

SEQ ID NO: 379513 - DNA, 500 bp, Homo Sapiens
  misc_feature (343)..(343): n is a, c, g, or t
  misc_feature (466)..(466): n is a, c, g, or t
gtacacacacatagaacaaacctaaaccttagctgtaggtttagtgggttttttccccctgattacactgggagtttttaaatattctatcaacggtcacattggtacagaactgccatatctgatcattgccctggtgtctgattggtgtgaatgtggaggagtctttggaatcccaggccttccaagaaaaaactttaaaagctcagggaattgctggtgagagcctgtattcctccatttccttaattgagtccagcagctacagagtaaattcaaacacaggttaattaagaccactccattcactttcccaattttgccaagagacaaaaacacttgnttcttgagccagtggctctggagagaagtggcacacgcaaagccatgccttcaggactccctcaccccctgggctgcctcatccccacatgcactatgtgtcaccactgtgactcaagttcanggctcattccgttcacatcttcattcaagaaaca

SEQ ID NO: 379514 - DNA, 522 bp, Homo Sapiens
  misc_feature (17)..(17): n is a, c, g, or t
aatgtataatactatcncctttttaaataaaatgggagtatcatttataataaattaatataatctctgtaatttgctaatttacaatggaaaagagaatcaaaagataattcaaaatacctgattaaaggaagcctactattttaaaaaagaaatgcctaattttttattggtgcctcaaaccttaaaaggaatttatccatatgaaatatgcaaaaggaaataatgccgaaatgtacctgggccaatggcctgcctaatatggctttatggtgaatcatagtagacatgtatgcctcgacctcccaaataactaaagctgccttctgtcccaatatctcagaaagtcatttttattttaaaaatgcagatctagtaacttttctcataacctttaacatccctttttcacagagactgtcttaatgaatttaggccttttttggtgaacacattctttagtcacctcaatctatataaatattaaatagttaactattgaaagcctgaacacttgtatta

SEQ ID NO: 379515 - DNA, 539 bp, Homo Sapiens
  misc_feature (21)..(21): n is a, c, g, or t
  misc_feature (26)..(26): n is a, c, g, or t
  misc_feature (52)..(52): n is a, c, g, or t
  misc_feature (66)..(66): n is a, c, g, or t
  misc_feature (80)..(80): n is a, c, g, or t
  misc_feature (89)..(89): n is a, c, g, or t
  misc_feature (177)..(283): n is a, c, g, or t
caataaaagacaaaaaggaanccctnaggaaagtaagcttgctccttgttanagctatccatgctnagcccaggcaaagnaaatgcttnctttggccctggtgcggtggctcatgccctgtaatccccaacacttttggaggccaaggtgggcagatcacaaggtcaagagttcaannnnnnnnnnnnnnnnnnnnnnnnnnnnnnnnnnnnnnnnnnnnnnnnnnnnnnnnnnnnnnnnnnnnnnnnnnnnnnnnnnnnnnnnnnnnnnnnnnnnnnnnnnnaacaagcccatctgactattttacttttaaaatattggaggctcttatgcatttcacttttatcttctgtattatcagtgttctgtcaatactttcacatgtgatattttgtaaacttacatctggtcttatacagtataagttcaaggaataatgattcagaaaagaaaactcagaatttcttccctaagattttataggagctgtaaaactgcaaaggttattgtgaaaattaaagagagtcttgagtaatggt

SEQ ID NO: 379516 - DNA, 483 bp, Homo Sapiens
  misc_feature (297)..(297): n is a, c, g, or t
atggctgtagagccaacaattctggcagtcacttctgtcaaagctaaggcagggtgttgctgcaggcagcagctctggcaataacattctggtctcaggatctcagcaaagggatgtgattctagaaccagcagtagatatagctgcttcctgattgtccagtttcctaattgtgaccaatgtagcaaaccatttctacaattagctaaatcagtaagattgactttttttcccagaacttacactggaacatagagatcagcctaattgatagtgatagcagaaaagaagttatgncagagatatatggtgctattagtgttattaataatacagataacactgtttgcctccaaaacgttttatttaatttctcttcttaatatcaagccaaccaaatataatagtactttctcttttttattttcctttggctcttacattttgacttgcttatgtattttaataaatacaactggaacc

SEQ ID NO: 379517 - DNA, 487 bp, Homo Sapiens
tacataaggtcctagcaagaatcagctgacatgttcaagagggtagttaaaaagaatttaatgaaatgagctcctacaaagggaagaaggagaaaggaactaactagggaagatgaagcaagcacacaggaactaaccccaacaaaaagccattactaccttttggtctaaagaatcatgaggagggaggctgctgccggaatccagcaagaactatcgccatgttggaggggatcccgggtaagagctacagccttgtaggaagtcataacctctgcaaaacaatgccacaacagacaggattggaagacagaaggatataggtaccctgggctctctcctcttaccttcagatttcttgctggtaattattactgaaaccctggaagtcagaagctaaggaaacccaggtgatgaagttcatagtgttcttcctcttggggcaaaagaaggcaagagactaatgaagaggggaactgaagagaat

SEQ ID NO: 379518 - DNA, 500 bp, Homo Sapiens
  misc_feature (11)..(11): n is a, c, g, or t
  misc_feature (31)..(31): n is a, c, g, or t
  misc_feature (68)..(68): n is a, c, g, or t
  misc_feature (115)..(115): n is a, c, g, or t
tgtgctttcantgctttgggtattatttccnctgatgcaggaggatcttccctcaaagatggattttnttcaggcaaggtcagcctgttatatgaatacttatggaatataatgncatattttatgatttgatttcctctgttctctttgtttaccttaattccaaagttaactgcggccctttctttatgcctagtcttggcataccccaggagtaaaaagaaaattggagaatcatgaccttatttatgtatatctgcagcaaccgaatagtaaacataagcattgtaaaagataaaacttgagaaaacagtacattggagttatgactttgttgtgtcatatatacttctcactagagtatggtagtcaaatacaccttttttgcttttatccctgtctctccaaatatttagttaaagagtaaatgtttaagctggcttggctagaagtagttatttacctaccatattaagggataagatagaggaaatggaagg

SEQ ID NO: 379519 - DNA, 418 bp, Homo Sapiens
  misc_feature (15)..(15): n is a, c, g, or t
ttccccagagatgtncaaaaactcaagcttcaacagacattcctagagtaaaataaccaagatgtatgaatccccttagaggattcagggccccattccatgtacaatgtgagagcaccccagacccagtcttgtccccaagagtaaaagactcagtttaatatattagcctacatgttggcaaagagaccaatacaaaaaggataatggagaaagtctttgcacagaaattttgcattctggcatctctatctgaattgtgattcttcataaaatgctggactgaaggattgcatagaggcaggccttgtgttaggtgataaacatgtttttatacagcaacacctacagccaatttccctatatgcaagcaaaatttccagtaagaattaatagttggctgggtgcaatagctcgg

SEQ ID NO: 379520 - DNA, 348 bp, Homo Sapiens
  misc_feature (47)..(47): n is a, c, g, or t
  misc_feature (108)..(108): n is a, c, g, or t
  misc_feature (113)..(113): n is a, c, g, or t
  misc_feature (127)..(127): n is a, c, g, or t
  misc_feature (141)..(141): n is a, c, g, or t
  misc_feature (153)..(153): n is a, c, g, or t
  misc_feature (164)..(164): n is a, c, g, or t
  misc_feature (192)..(192): n is a, c, g, or t
  misc_feature (204)..(205): n is a, c, g, or t
aaaagggaagatgcccaattaactggaaaccccattggccccagggntgggggaccttgggttatcctgaaagaaggacaatgaccacctgcaaaggacgatttcaantgganccctggaggaggcnggcaaatagctcantccgcactcaantcccttcccanccgtctggtggaaggtgaggagcaaaanctcatgctgctnnagcctggggccacccaggcaccggcctccccgtgctgagcagagacagcagcccccttagctgcaggagtgtgccccgatgcgcacctgccgactttccttctgacgcagacatggtcccccctggggcaaggctgcagtttt

SEQ ID NO: 379521 - DNA, 520 bp, Homo Sapiens
actaagtgagtcactgtatataaaatacttggaaattgtaaagtaatatacaaaagatattaacaaagtattatccatggtaaacaaaccacatcagtagccaaacacagggtgggaactcaaccttatgttatagcttactcttaagaagaatatgtgaagcccaggaacatggttaaaggtacagaccagaaaatttcctgacatgtgataaatatttcagtgacttttcagatttatttcttgttagccgctgtgtctatttggtgctacaaaaactgaaagaaacaaaatccctgatgtaagggcttataataaatacacagtttggagatgaactaaggatattttacatttacgggaaaggattggacaatagtatcattttctcaccatttgcatgtacatcatgtctttccaattgttttcattatttttctgaaagagctgcaaaattgtgcagtggttcaacctgaccaaagtggtattatgctgctgggaagtaaaagtattagacacc

SEQ ID NO: 379522 - DNA, 647 bp, Homo Sapiens
tatttgggattatactgaacctatttgtccaataacctgagttttcaaataattttagttctataagtactataattatataaatattaatgaattcagattagctgaaaggaaaaaaagtagaagcctgactacttggtgctaactactaaagattttggcagaatcaatgttggatttggctttcctgtcccttccccatgccagccccccagagtgttctgccttgtgctgcctcccttcacctggagtgccacacccctctctctgccagttcagctcttcattcttcaaggcctgaccttgtctgacccttgtgcctctaaacccgtggccccacctctcttggttcctatgtcaggtgatgtttgtgtttttggttatgcccatctccatagccagaccaagcactctggaagccagggttgggtgcttatttatctgtttgccatgcagaaaatatcttgcacaaaattacctctgttaagggaatctgaagctgaatttagtttggctgagtcagggttgggttttttttaaaggggctgtgggggtgaaatgttgactggaagccacccacaaacacacacctgctggtttaggaaccccgctgtgggtggttctgagctgtttggcttcagttgaca

SEQ ID NO: 379523 - DNA, 426 bp, Homo Sapiens
  misc_feature (15)..(15): n is a, c, g, or t
  misc_feature (29)..(29): n is a, c, g, or t
  misc_feature (47)..(47): n is a, c, g, or t
  misc_feature (52)..(52): n is a, c, g, or t
  misc_feature (57)..(57): n is a, c, g, or t
  misc_feature (81)..(81): n is a, c, g, or t
  misc_feature (89)..(89): n is a, c, g, or t
  misc_feature (96)..(96): n is a, c, g, or t
  misc_feature (107)..(107): n is a, c, g, or t
aaaatccccaagcgnggtttaaaaaaaancccctcaagatgcccaangagangggtnaaaacggttggccccagcaaacanggtgagantgtgacnccaaaaataanacactcagcctaaaagttaaaggtgtcacccctcaaagatgatgagattgtgtcatatcactgggcctagtaccccaggtgttgagactttaatccttaaaatcctttcccatgggtgcattgttacatatcactgcgtcagaatcatatgaatgtgactcttctgcctgggccctgtcaacaggggatattatcacatatctctgggcctatgagctagatgatgtgtctctccagcttgtgccctgggttgtatgtatctcctttctattctggactctgccaagagaggggattattacatatttatgagcccagc

SEQ ID NO: 379524 - DNA, 552 bp, Homo Sapiens
catacgcactgggcattgggtaagggactccagaagcagcagctagaaagagaaaaacccctcttcaatccccataatgcttcttcccccttaatgcctcaaaaataaacccagaaaagaggaataaaaggattaagtgccttgaggcccaaatgagttccccttgattcaaataacccctgaatcagaggcagagacctcctgatgtcttggtttcccatcaaagtcctccctgtctgtctgtctctcttttgctctctcattccccaggcactctcttttggtttgtgggtcccaggagatgaggctggataggagaggaaaaggcttgagtctggataatttgtataagatgctgctgagcacatctcttcatgcgcagtccccaggtatctgatgatgttctgaaatggatagattgttttagagttattttgtgtcctttaaaaaaatcccatttatgcaatttacttggaatttgcttagcctttaataggcttgtgtaatttcctgctcctccagtacaataaataaaagaaagatgaaaaaaaa

SEQ ID NO: 379525 - DNA, 544 bp, Homo Sapiens
  misc_feature (161)..(161): n is a, c, g, or t
tataagtggcctctacctcattaaccatttccttgaacccagaccatcagggagctagtgagctgattcaagagaggaaagaacaattctccattcaagtcagacatccctcaaggggaacatgactattctgactcatttgagaaggggccaaagaaaanggatatgaggtggaaacactattatctgtaaagtttagctgatggaagaaaatggtgtcatttgcttaactttggaaaatgcagtgggtctctgggccctgagggtggtatgcaaaataagcccatctctccacctacagccttcccaaaaaacaggctgtaggcgtggctgctttttaagaagctggatgctaacttcagatggcacagaattcaagaccaaaactgcaataacttattagtcatattttccatcttcagttcctttgggggtaaaaataccacgaagaagataaaatggcttttctcacggtataggtcattgttgtgttttctgttcaaaaaaagcccacacaaccacattctctattataaaaagtaga

SEQ ID NO: 379526 - DNA, 532 bp, Homo Sapiens
atgtgtgagaacaagaactgagggaaagcaccttcccccaccccagacgtttttatctgaatgcatacaaggagtcctgaggtggtgatttggccagtgttttaacttgtgaacaagtactcaggtgtgaggacaagaatgccaaatggctccttcccttgaagtgaaagaaatggggagtcctagagcctctttatgcccaaagaaccgcagaagaaactgcattcccattaaatgggaaatacagtgctatttgcctaaaacttggataagagtgcgaacctctcatctctccacaacttcatgtgctgctgactaattttaaacatggccacagctggggcaaaataatccccaaagtagaaaaagtcccagtttaacaaagaatgtaatgttaaaatcacttataaggaattctttgaaaccaaatcctttgaaatctaattcctgggacttctaggtttttatagttaacatactaatttcttcaataattgttaactgcaaagttttaataaatttgtacctttaa

SEQ ID NO: 379527 - DNA, 486 bp, Homo Sapiens
  misc_feature (14)..(14): n is a, c, g, or t
  misc_feature (21)..(21): n is a, c, g, or t
  misc_feature (36)..(36): n is a, c, g, or t
  misc_feature (41)..(41): n is a, c, g, or t
  misc_feature (54)..(54): n is a, c, g, or t
  misc_feature (71)..(71): n is a, c, g, or t
  misc_feature (87)..(161): n is a, c, g, or t
cggactacccgggnactaacngtgtgcaccactacngccantgaaattttaaanacattttggcagagaangggaacctcactaagnnnnnnnnnnnnnnnnnnnnnnnnnnnnnnnnnnnnnnnnnnnnnnnnnnnnnnnnnnnnnnnnnnnnnnnnnnnagccaacctgcctggcctttatgaggattctttatgcatgttttacccattggttgcattgtcatttgaaattgttaacctaattgtcagactaatttgtggcagctgccctaaaccagagctgagggattgcctgctgtgctttcctcctgagcaaggggaagttgagccggagccaggtagtggcaatcaataatagtggtactgttgacctctagctttgtggtaaaagatattaactttattaactccagacaaaaaatatttgccctttgacaaatatttgttcattgctataaagtaaattgccatttaattatttcat

SEQ ID NO: 379528 - DNA, 189 bp, Homo Sapiens
ctttatggtaaagagacatatagggaatcaaggaataaggtttccgtacatctttcaaagtactaaaattttgaccctattaaaccatgataagttattacatgtgctgtaaaacctacagcatccactaagatgtctgcacacagagatatactcaaaaataccacagataaacctcaatggaattct

SEQ ID NO: 379529 - DNA, 486 bp, Homo Sapiens
gttcgagctggagagttcgaggccattttaggtaagctcaagtctttacaactctgcaccttctaccagtccttcctagctgtttcttttggatgaagatgattcttcttttcctaactctgaggttgcccctctttcatgtgcattcacattaactgtcagcccatacctgtgtacctcaacactcactggttgcctgccctgtaatactcttacaaaagatttaatgaagtgatggagaccttgggtgtctagcaactgcccattgtttgtcaggggaatgtgagatatatgtgtgggaaggtccctgagttcctcttggacttatcaaaatatcacaaaattccagtacaaagtatctttccacagattcagctgtgctgtgggtcactaatacttgggtcattttaagctgtggtgcagaaacctacagcagaggtgtgaatcttcttccctttggcaactttatgtcagttctgatacatt

SEQ ID NO: 379530 - DNA, 429 bp, Homo Sapiens
  misc_feature (117)..(117): n is a, c, g, or t
aactaacggtgtggataataatcctggtattgacagaggtttggactcctgaagcctgaaagtctatctgctgccacgcctgggcacatactgcatcatttacaaaactgtagagcncctgttgtgtgtgccagttgtgatttccttatagatttttagaattggaaggcatgtaaagaacacgtaatcctggtacattgccttcagtaggtaagtcagtatgaacttctaagaatttttgttttcctctgtattgggtctattgtgggtatgtccaacgtgacaggggaggtaagggaagtggcatcccctgagatagtgactgaaatggctttcatcatctttaagtcaaagtgagatgccagtaataggatatatgtatgtatgtacttgtgtctctgtatgtatgtaaataaacaaacatgctgg

SEQ ID NO: 379531 - DNA, 469 bp, Homo Sapiens
aaagtcagaaacggaataaccccaaagtttgaaaaaaacaggtggtcccctgtaagatttaagccaaggtgtttccctgaaatgtgtgccataagccaagctgctcccggaactaatctgtgtttaccttagattttgtgtttgccctatttgacatatattaagtacagggacaaactaaaggctaaagttgtttacatcatccttttaagccctctctcgtgggtgcacaaaactcatatcacagacttcccagtgacaaccatagaatgtctgtttttgctttatgcccaacaggggacatccccacctagatccatcccactgacttagcaataaaggcatagtctcaggtcctctctctgctttgtggtctctgcttgtgacagagtttcatgtggccccctgtggcatgccatgaccctcatttctggggagaattgtaacattaaactttcttttcaatggc

SEQ ID NO: 379532 - DNA, 402 bp, Homo Sapiens
ataaaatcattctcaagtctttaattaaaatccatagagcatttaacatgaacagatgtttaaactctttcagtgactctcatattttaaaatcctttgcacagcatcgtgaggctaacttcatgctagaaatctacggataacgtaacaccacaaaaatacattcggagtccattccaatgcaagtttaaaacactttaattggcagacaatgtaaagatatttaaaatcaaaaattacaaaatgagcacataaaagtcttcccttttgaatttttaataaaatacttctctgtataagatctaatgaaaaattccagttacttataaaatagttgagaaatcaattaagatatgtatctatatatgtatgaattacacttttgtttaaatgaacaaaatg

SEQ ID NO: 379533 - DNA, 525 bp, Homo Sapiens
ccttgatttaggactgggaataattctgacaccatatataaaagaagtttgaagcaataaatgggaaacagtgttgtttcctgagccttagaagaatgagtttcttataagccaatgtgcatttcaatttactttccctagaagtaattgcatttatagatttttaggacttttcctagaactacaagggtgcaagtaccaaatgtgctgatggtaatattataaagatgctctacatgcacactcaattacgcccacaccagccatgcaaaattaaacccggtaagagagtgacagtgatatccaagggtatccactactaccgatgctttaagatgttgtttaccatttataccttctgtgaaaaatagaaggtattttaagaaaagtaactttggtgatctaataaaagggtttggcaaactacaccctgggtccacatttggtctaccacccgcttttgtgctgcctgcaagctaagactaatgtttacatttttaaatggttggaggaaaaaagaaaact

SEQ ID NO: 379534 - DNA, 502 bp, Homo Sapiens
  misc_feature (36)..(36): n is a, c, g, or t
  misc_feature (42)..(42): n is a, c, g, or t
  misc_feature (45)..(45): n is a, c, g, or t
  misc_feature (56)..(56): n is a, c, g, or t
  misc_feature (77)..(77): n is a, c, g, or t
  misc_feature (110)..(110): n is a, c, g, or t
  misc_feature (132)..(132): n is a, c, g, or t
tcatgcatcctggaagtttttagtggcaaaagcctntccccnctntgcagctgtcncttatttataagccagaggcnctttctgtatatgcaactttcatcatagagctntgagagaaaggtctggcatttntggatgattctggccaacccagagctgcacagagaccctaacatttcatgagagagaaaatcaacaggagaatggccactgtgggcatgacacgtggcaatgtgatcgctaaccccacggaaccagccacttaccgctttctgaaacccagatcgtcatcccgcagtgtgatacaaaaggaagatcatcttgctagatgccaagaaccgtagttatgacactttttgtcattctgtttcctcttatttatacagtggagagtaggatgttttcaaataaaccttctaaatatgaaatcctgagaatgcattacttcaaaaatgctgcaccgttagcagccttttagttggttacattataaaacatgtag

SEQ ID NO: 379535 - DNA, 141 bp, Homo Sapiens
atcaatttcagtaagacaaaatatactaaaatgtttaaatagcctcattcaatcttacattttgacatttcagcaatcattctggcttacagtaattagatcccctgttacgacacatgccctttgttcttaataactagc

SEQ ID NO: 379536 - DNA, 399 bp, Homo Sapiens
aactggcattttgaggatattggtttaatggaaggaaaaaggaatggggcaaagcacagggtatttgaatcccaaagaccttgaccctcagcattagcaagtcacttgttttcctgaggcctcagtttccttactctcaaatgaggtaatatccgaaagtactttgacaacacactaaagcctgatgcagatttcctttttgaagtaattgtgctgtttctattcatattggatatggtattctatggtattggctatagatacatacattttaaaatgttatttaacagcatgtaaatgttcatttcatgccatgtgatcatgttcccctttatgattttttaaggctgtcttacaagcctaacagtgtactaagtcattaaaagatatatttaaagt

SEQ ID NO: 379537 - DNA, 537 bp, Homo Sapiens
tcctggccagtccaatccacattttaaaggacaaagccgaggggccaaatctcccctggataaacgcctctgctagagtcacagactggcctcggtgatcttagcactttaaactttcaataacccagtttccacatctgtacaatgtggacagaaatatatctatcctgtgggatggtagggaggattaaaccaaacagtgcacatcccaggtggaatgcagtgccaaggacacagtgcacactcaggtatggtttgctggatcctcagccgcagcacatgtgttccagacccgtttgctaccacaggtgtacttgtgtcaacggaaaatggaaaggcagaagccacacgcttgaggcacatgagctccacgaagctcagaaactttctctggggacagagggaggtgaatctgctaggtgccccgcctcacgcctcctatcctcacagtaacaaatgcttcaaatagcatcacctgtcagagtgtgttcagtttctagattgtcaggcaaaacctcacttaaaaagagaaaaaaa

SEQ ID NO: 379538 - DNA, 542 bp, Homo Sapiens
ctttgcacaaagtcactgtgatcatttcgaggaaatgcatgtggtcttttcagaactgacagatcttggtctgtctgattcatgtgctcattccacaagcatgggcaaccgagaaaatggtccttcaccattacttgaagaaatcagaagaaccaggttgaaaagccccttggaaaattatttttcttaagtttccacattaagtacattatctgttgtcatggcatcaaaaatacacaatagaaaaagtataggttcagggccatacaaaataacccacaatggagatagcattccactgataagagaaaagtattataatcggtcagaggtaggaaacaggaactctcaaacatcattttgcggttttcctggcttatttgcagcatcctttcagccacttcatcttgtcccatgcatttcaaatgtcagactattaagatgaattaattaaaagtcatatttgagtgaatatgattttttcccaaagccagctctatcataaattaatttttctaaaattattctactctagtcatcac

SEQ ID NO: 379539 - DNA, 525 bp, Homo Sapiens
  misc_feature (187)..(187): n is a, c, g, or t
  misc_feature (417)..(470): n is a, c, g, or t
agtaatcaatatgagaagccacaacgggtaagctttctgatttgaaatgaacaagctggatgtccaacatactcctgctctttgttcatttgcttttttgatcctgaagacctgacattgggagagatgggaattcaaaatgatggcaacaattacctcagcaatgcagtcctgtttttattttccnccctacttagttcattgacagtttcctcctcgccccagtttgataatatccctttcaacaaccatagtaccggtgttgcaaatagtttaggaaagcacccaaagctggatgaaattgtgcaaagtgtattctcagcatgtatattcaataccatgcctcttaaaaatgcttctcttaaagggtgcacgctgtagcatgaaatgtgtgcatatttaatgtatcttcctggnnnnnnnnnnnnnnnnnnnnnnnnnnnnnnnnnnnnnnnnnnnnnnnnnnnnnntacaatagaaatacatatttctgtatgcaaataaatatattatacacaaactctt

SEQ ID NO: 379540 - DNA, 532 bp, Homo Sapiens
taaaaaaatttttttccaaataaagtaatctcccacagttgtctaaattagatcaaagatcaagaaaagaacacaagcttattattgatatgaatgaaggctaaaagagaaagtaaaattagagatactgcctggggttttgactgaaatacccagtgtagagagttcctctctctaagaagtgtattgaggcttgaactttgatattaaaattagtgttaatgataatcttttatctagggaggcaacatattcagttttttcattcaaatgcataagtgtcctttggtatccatgaatttcctctgtagaaatattacatagtatacaaatatgtcctagaaatgtcttttttatgttaaacagatgttcaccaatacctttatttttcattaggccaattttaaatattattgttattctaagcaaattcaaatttcttgatatttgggtgatatttaatcaaggtactagcaaatttcgtcatctattttgtgtcctggaaaataaaggataaaatactataaaagtt

SEQ ID NO: 379541 - DNA, 477 bp, Homo Sapiens
  misc_feature (25)..(25): n is a, c, g, or t
  misc_feature (47)..(47): n is a, c, g, or t
  misc_feature (56)..(56): n is a, c, g, or t
  misc_feature (64)..(64): n is a, c, g, or t
  misc_feature (69)..(69): n is a, c, g, or t
  misc_feature (75)..(75): n is a, c, g, or t
cccactaatccacctacaaaacctnaatcccgaccctaggttggaancctaataangggttttnaagtnataaantatccatgaatttaataacctaatatccacaatccttgtcgcctatttgttaacatgccctttaattaattaagatacccatgaataatttatgaactcctgatgcctaagaaatccctgtcccttcctagtttctaccaccttcagattggagtttgcatgagcacaatagcctcagctctagaggtaatgtttttctccctctgcaaaatcaacacaattagattacttccttagtgatattattatggtgttatttcaatatttattataataatagatattgctattttaaaaaagctggtattttctgtttccatctgtgaaataggataatgtaaacaccacattaatacaagcatttatataaagtttgtgactataataaatgccaatcctgag

SEQ ID NO: 379542 - DNA, 467 bp, Homo Sapiens
ccatcggtgagatcaagggccacgacagtcccatcaatgccatctgcaccaatgccaagcatatcttcacagcctccagtgactgccgggtaaagttgtggaattacgtccctggactcaccccctgccttcctcgccgagtcctggccataaagggccgcgccaccaccctgccctgaccctccccaactctccctgtctcctctttcattcttcccctctttccttttccctctctttccccacttcgatctgagctgcttcttaacggtatgagattattttactccttcttcttcctttcccttcctgtcctgcctggcctagagaggtgccctgcctgtccctcctgcacccaccgtccttttccaagcatgaacagtgggacaggccccaggagatgggtgccagggagcagaagggggagcttcaggcctggacaaaacgaaacacccccccaaaaaaaa

SEQ ID NO: 379543 - DNA, 264 bp, Homo Sapiens
  misc_feature (40)..(40): n is a, c, g, or t
ggatttagcataagaaaagttccactagaggttgtttatngaaagtaaggtaattattatagccatccggtatatgaaagctttacaaaaattttggctgatggtcctcgcaggtctgttttattagtcaatttataaactcaaagtttatgtcttcaacttgaccatctcctttgacttccagattcgcctcttccccacaaaactgactctccacttggacatctaacaggcatcttaaatttaatgcatccactttggggg

SEQ ID NO: 379544 - DNA, 483 bp, Homo Sapiens
  misc_feature (19)..(19): n is a, c, g, or t
  misc_feature (111)..(111): n is a, c, g, or t
  misc_feature (217)..(217): n is a, c, g, or t
ggtggttggggtcccccanacaagggggtgttttaaaaaactcccgcgggtgaaattcctaaaagtgccaacccagggcctgaagaaacccaattgcctcgcctcgccaanaaggcctttgtgaaaaatcccacgtttacctacctgaagaggtttttcccctctggttctcctccccaaagtgtgcccccaagttggggtagcagctctgtggaanccaaaggcccagatggtggaggtgtcagcgatgtttaggctgcctgctgtgccttgcctaaagtgagcggccccaacactcaggtctgtgtaagagcacgttcctcagggctttcggagatgatgtcagtttctctttaagatggagctgttttagtccccgtcctgatgcagcttcccctgcctctaggggcttcctgggaccatgctgactttgactcctgaggagagtggaagataatgagaaataaatcttgagaaaacacc

SEQ ID NO: 379545 - DNA, 316 bp, Homo Sapiens
  misc_feature (55)..(89): n is a, c, g, or t
ctaagggccccaggagatttaggaggaaggacaagaggattaagacaccgctttnnnnnnnnnnnnnnnnnnnnnnnnnnnnnnnnnnngaacatagagattttttgtgtttaattcacaaccgagtcttcagtgcctagaacaggtgctcagtaaatatttactgaaggaatgaattcctttttgtatttcttgtatctatcaccagatgctcttgtatctagtacctgcttggcatacagtagatagaaagctttgctgagtgaatagctctgcctttcgtcttttttgatatgtgtacatcttttaaaaaata

SEQ ID NO: 379546 - DNA, 484 bp, Homo Sapiens
  misc_feature (18)..(18): n is a, c, g, or t
  misc_feature (23)..(23): n is a, c, g, or t
  misc_feature (38)..(38): n is a, c, g, or t
  misc_feature (53)..(53): n is a, c, g, or t
  misc_feature (61)..(69): n is a, c, g, or t
cttggaaccctgaaaaanggacnggcaaacccttatgnccaacaccttagcgnaaatcagnnnnnnnnntatctgccctaccccggtggtcctcctcattagctttacaaaagtggttgagttttggggaaaggctgttatcatttaacctataaattaaatgcctcccaaggctagcttggcttaagcagccaaggaataattaaaagcagtttgaaggctcaaggcaagaggggagttggctagatcagatctcccccactgccataattttctcactgttataatttttgcaaaggcagtttcagttctagtactctatctgggatgtaccttacttcacttacaaataagcacagatcatattttgtatctacataactaggcaagaaccatcctgaaagggtaacaaattctatgaatccatccaaatataaaaatattcacacgatgtttctgtaattccacacagttagaaaaaaaa

SEQ ID NO: 379547 - DNA, 472 bp, Homo Sapiens
aatcaatcgtctaaacagagccccctgttttttgtttcacctgggagtagcttctacctgatccccaggggaactctgggatgtcagtgacggctcaacattgcccctgaggcaagggagctgggctttccctaatcccccactccctcagtctcctggctaagcgcctgtccccaggggacttaatcacccaaacacttccccaagagtggcatctgctgaccactggaggcactggtacagtgaagcgacagaagggatcagagagggtcccaggtggagcacagcaatgtggctgaataataactatattaattcatatagttaattctcaagcaatggcaaagtgtaggcagcttcttgtctgcaaacgtttccatgatatctctcctgcagccagacgggtcttttcctgccgcctacacagaatggccatggagcatccccaactcttattaaaatggaaaaaaaa

SEQ ID NO: 379548 - DNA, 584 bp, Homo Sapiens
gcactgccacctgtctccctttctcatctgtgcccaaggagacccctgccagggctggattctcttccaaacagaccctgtttcccatcacccatcagcctttgggatcctttggagttgtttctacccattccagcacgttggatgaggaagtcagtgagaggatgtttagaggaagaggaagaaaatttggaaagatggaattcaccccggttgtcctgtgccccatgcccccggatgggaacagtgccagacctccggctggtaaagactttcatagaactggggctcccctggaggaaaactggacttccctaatgtctgaaaagaatcagatggacacatttgcagattttgatactatgacggatcggttattggatgaaatcattcaacacattcagttgtacaacctctccatatcccgaattaggtaaaaggaaaccacaggtagttaatgctgggggaagaggggggacatttttgagtgtttgctgtataaaagcaataatatgatgccttctgtataccactgagctaagctaacttgtgacttttaataaattacttttaaagacagaagt

SEQ ID NO: 379549 - DNA, 542 bp, Homo Sapiens
  misc_feature (480)..(480): n is a, c, g, or t
  misc_feature (483)..(483): n is a, c, g, or t
  misc_feature (486)..(486): n is a, c, g, or t
  misc_feature (505)..(505): n is a, c, g, or t
gtaattctgaagctggtgatccacttggaattgtagatagtttcaggaagctcctgcagggctgtccaccgttggtgtgtgcctcagtatttggacttccgaaactggaagtgaaagtgtctttataggagagaaacgcatgctgctctttggctctttctgtccaacttttctagaaatgactcaaagtccattaagatttgtgaatattgtataaattagctatggaaagtagcaggtcagatggaaaattcttttccacagccctgctctccgcctccctccatcttaggagcgcctgcctcaattcctcgtcaactgctttgctccactccatcccacaggtgtgagtggggggaagtttttcattagggaatacagtctgcgtgacatgggagaatggatggaagggagctttgctactctgctcttggcatgactccaggatttttttctggaatccaacctctgtcctcttanganaangaacctgtccttggttcanatggctgggcatgaggaggaaaatttccattagtgta

SEQ ID NO: 379550 - DNA, 256 bp, Homo Sapiens
aaaaagctttagcatatatttttttcatgcaaagtcataaatatcccttgaaggatacaagagccagtatcactgattgcctttgaagaagggaagtgggtgtctgaggggtacagtgtggaaggagatttttccctgctactctttcagactcttggaattttaaaccgtgatcgatgcagtgcccatatttaaaaatttaaataagagaaaataatgcgctgtgtattaaattcacatacattaaagcataccc

SEQ ID NO: 379551 - DNA, 441 bp, Homo Sapiens
agcaaagtagcgctgggcattcagtacatacccacgatgtgctccctctcttgatgcttggcccctggggccttcagggctttgggacatcttgtcctcaaccctctccctagatcagtctgtgagggtccctgtagatattgtgtacaccatgcccatgtatatacaagtacacacagatgtacacacagatgtacacatgctccagccccagctctgcatacctgcacctgcaccccagccttggcccctgcctgcgtctgtgctcaaagcagcagctccaaccctgcctctgtccccttccccacccactgcctgagccttctgagcagaccaggtaccttggctgcaccggtgtgtggcccgctctcacccagcacagccccgccaccatggatctccgtgtacactatcaataaaagtgggtttgttacaaaaaaa

SEQ ID NO: 379552 - DNA, 545 bp, Homo Sapiens
agggtctcaagaggactttgcagagttggtgttatgtcctgaaggataagaatgagcttgctaagcaggcaaagcagggatagagggcatgctaggaaatgagaataacatgtacaaaggcaacctgcaaaactaagataacgtgtctgtgaacagcgcctttgttaacccataaactgctttacaacaatggagtatttatactgttaatagaaagctgcacaaggggttggcgagagtctctgtggctcactcactcaaaggaataccattttgattaggctgcatcacggtatacagtgaccaatttaaggatcatctgtttagcaaagcattttaaaattttccttctctaactagtagggaaccatctcacaatcacaactaaagaaaaatggaagtacttggaagtggcttcctatgtattcctttaatgtctcatttgctgctgctctttgaacaagtccactccaatctccatcccaaatcatgcattttgtcctgcatttagaagtttacactgatacccttcttctttatgaaat

SEQ ID NO: 379553 - DNA, 488 bp, Homo Sapiens
atgatttcggtaagggcacctctgcagaatttcagcttccccatcaatctctcagcctacagaggttcaaaagccagagtccatgcagatgttgcagtgagtcctgtgtcacttggtagaattttacatgcattgtatatagcaagctactgatggcttccattggatgtttggctacactccatcccaccttactgttaggatataaagtaacatgcttacagactacctagcttcttccggccagtttcttcatcaggcatggtaggccatagctgccctttcccacagataagtatggttcctattaaaaatgctaattagccctggtttgatcagtatacattgtatacatgtgttgaaataccactctgtattccataaatttgtacaattattacatgtcaactaaaaataaaagggaaaaaatttgttaatgttttacctgtagagcagattataaggataataaagacattctcactcag

SEQ ID NO: 379554 - DNA, 716 bp, Homo Sapiens
  misc_feature (78)..(78): n is a, c, g, or t
  misc_feature (659)..(659): n is a, c, g, or t
ggccaatcttctaggaaaatatgaaggtactcttcatgataggaaaggattggttttgccagggcagcttttaagttncatttctgattgtctttaaataaccactctacctttgtcccttgatctcaccccttgctaaaattttataaacatattccagacatactgcatgcaaaaagggaagtataagaatattaagattctcatgccctggacatgaatagaaaacatgtacataatgtgttctcactgtcagaacaacctatagaagtgtaaagctggaaacccctcagtagagagatatacacttttaatccaaagaaaaaaaacagtgaggcctgttacttgactacagtttccagggctctggtgtagctatattttaggcataactccaaggagcagcctacacaaatttggatggagcgagggaggcacagatggtggtcacgtgaaggcacagaccgatcgagtgggctcggctacaaagtctgtacatttaggctggtgtattcctcctgtttcaagtactgccaagtcccggctcttccccgtctttccaaagtcttgattcatttaattctcctgaaggaggtggaagaggaggagggttgcacaaatcttactctttcgtggtttagaggcagacagtcaccatncttggcgtccttgtcagattttaaatgtaacattctgataagtgtaaagcctgtgta

SEQ ID NO: 379555 - DNA, 608 bp, Homo Sapiens
  misc_feature (16)..(16): n is a, c, g, or t
  misc_feature (439)..(439): n is a, c, g, or t
  misc_feature (462)..(462): n is a, c, g, or t
  misc_feature (492)..(492): n is a, c, g, or t
  misc_feature (522)..(522): n is a, c, g, or t
  misc_feature (557)..(557): n is a, c, g, or t
  misc_feature (563)..(563): n is a, c, g, or t
  misc_feature (597)..(597): n is a, c, g, or t
tggtcggctacccggnacttcctgctgaaacccgatgctgtggacaaggagtatgagtttgaggtccatgagaagacctacttcaagaacatcttgaacagcatccgcttcagcatccagctctcagttaagaagattcggcaggaggtggacaagtccacgtggctgctccccccacaggcgctcaatgcctactatctacccaacaagaaccagatggtgttccccgcgggcatcctgcagcccaccctgtacgaccctgacttcccacagtctctcaactacgggggcatcggcaccatcattggacatgagctgacccacggctacgacggactgggggggccagtatgaccgctcagggaacctgcttgcactggtgggacggaggcctccttacagccgctttcctgcgaaaggctgagtgcatcgttccctnttttatggacaactttcaatgtnttacaaccaggcggtgaacgggaaacacangtttgggagaacatcgcagtatggggcggncttaagttggcttaccacgctattagagttggttncggganggccccaggagcaccatttcccggttaaatacanactgaaccagt

SEQ ID NO: 379556 - DNA, 525 bp, Homo Sapiens
  misc_feature (93)..(93): n is a, c, g, or t
  misc_feature (104)..(104): n is a, c, g, or t
  misc_feature (397)..(398): n is a, c, g, or t
agctttcaatttgcatactgcaaagttttgtttgccttaattaactttcttttataatgatgatcattttacaggaaataaactggttaaaanctacaggatgnacagaattatatccagagttgaaacaaacgcccatacctaagcatttttttccaaaatcctttgttccatagacacttgattgagtacttaagttgaacatctaggtctatgaatgacgttggtcaaatgttttattgttctctgtttcggttttagcaggagagatttgctgtttcataaaagaaattgggagagtatatcattttatgcctgtaacttattatagcattggaataagctgttctttggaggtttgagagactttaccagtacaatcattccccccctcccnnaaatataaaaagataaaataaaaagccggtcagtgtctgttgcacaaaattacaaccgctctctgcttgtatttgcctagttctccagaatgtagggaaaaataaaaattcaatgaattagaaaaaa

SEQ ID NO: 379557 - DNA, 492 bp, Homo Sapiens
  misc_feature (52)..(216): n is a, c, g, or t
actttcaaatagagcctaaaggttactgcagttcagagctgtctaaatacannnnnnnnnnnnnnnnnnnnnnnnnnnnnnnnnnnnnnnnnnnnnnnnnnnnnnnnnnnnnnnnnnnnnnnnnnnnnnnnnnnnnnnnnnnnnnnnnnnnnnnnnnnnnnnnnnnnnnnnnnnnnnnnnnnnnnnnnnnnnnnnnnnnnnnnnnnnnnnnnnnnnttctagttgcctacttaatgttccctggcccttaattttgttttccttcactatacacagaacactatgttagaagctgcaaagagttcagaaaacacttcatccactccttctactatgtgcaagaaataaaaaaaaccttaaccaactttaaatgagttacacggagcagcacatacagccctgagcaaatacatcaagagtacccttgcctctggggagatgagattcttatttaaagctgtagaacagtgctgatgtaccttcagaacagtt

SEQ ID NO: 379558 - DNA, 487 bp, Homo Sapiens
cagtgttaactctttggtgttgtccctttcaaatatggataactctgtgaacagtcttgactttttgtatcatgagacagagtgcctaagagaaacccttgcacctgggagcgctgcttggctctatctctacaacatttaatgaatttcttgtaaaccactttgagatacattgttttgggaaattcatacaattttcctcaacatggtactctactggcaggatgcagttttaaattttatgccatcagttatttattcttgtttattcaaatgactgcaataacaatgattcattcattaatgttaaggctaatacatttaagatcttgtttaaacaatgtttcttctgcaactggctactcctcttatattaatgcatacacttttgtaaagaagtatatttttatgaaaagaaactttgtaaaagtatgatgtaaattttcagtgcaatgtaaacaaaataaaaatggataattgcttttgt

SEQ ID NO: 379559 - DNA, 445 bp, Homo Sapiens
ccctctggattcccctaccagccccttgaggttctttagctttggtttgaaggaacattatcattggtgttagcctaattgtactgatctatgtgataaatgaggaaaaaaaagaaagatgaaacttcagaagacagtccgtatttgaataatctttagaagaacatctgtattttgaaaagaaaattatcatatgccccttaaaactgcaatttttcaaagttgaaaatatgtctctctctaattgaaatattaatagagtaccggtagtcagagttctttccaatttctgaactgaaattatgattttaaaacaaccaccaccaagctcttagagggtgatgactgtagcttaaaattttgtgactattgtgatcattgttaactttcataccaaatgtattgtttctctaagaatttttgacaatgagtgggtttactacat

SEQ ID NO: 379560 - DNA, 305 bp, Homo Sapiens
  misc_feature (71)..(91): n is a, c, g, or t
aaattgtggaccttaaagaaaaatattttatttttaatgccttttcctgggataagcattaaagatgcccnnnnnnnnnnnnnnnnnnnnngaatgatagtgatggtaaggcaagattctagcaaagagagatgggagataaatggctgagagttcaggtgaatatttaatatattaaaaattgtattaaagtttttcaaggtattttaaaaataactattttgatactagaaaaaaagtccattttttaatttaaatatgagatctatgtacaattttaataaaatcctgtccatgaaaaaaaa

SEQ ID NO: 379561 - DNA, 452 bp, Homo Sapiens
  misc_feature (13)..(13): n is a, c, g, or t
  misc_feature (245)..(245): n is a, c, g, or t
gttaacctataantgcccctatagagttacgttgtcagtcctacttagtggccctagcaaagaggaagaaacatagtaatttacgcaaattccaggtggaaaattagagaaagtttagagaactaaattagtgtaaaacttaaaagtatttcctgactataaattcctaccattaaaaacaaaaaagcacccgtgaacccacaaggataaaataatgtgtttgtccctgccctgccttgcatatncctgggtgaggctggttgatggtacattgttgtagaataattgcggaattttatttacctggaagtttgctgagaaaacaatgtctgaggtggtgtaagtttttggaaagcaaacatttgacagagttctcataattgattttcattttccaccctttattctgttaaagtttctgaaatattgcataaggccattctgaaaaaaaa

SEQ ID NO: 379562 - DNA, 468 bp, Homo Sapiens
  misc_feature (57)..(57): n is a, c, g, or t
ggtttcctggtggcagccagcggtaccggtgccaggaggcagcgaaggaatcacttncgacggccgctctctctgccatacgagtgtcgttctgcggggccatctggctggcagcagctctcagccaatggcaggatgttgtaaacctcactcgctgaatgcggcaccgaaaatcttgaaaattaactgcaaaaataaaatcaaagctggctccgagatggtatttcttggcctggcataagctctccggatgaacttgctctgccttgttgatagatgcctcttactagtttggttttttcccaggagccagttggcatcttttaacttttccttgtaaaatccaggcagaaacattttgagagctttctggagtttttatttgctaattaaaatgtgagaagggaacacagccacaggtagaggtctagtgcaagccacagctgtgattcagaagaagaaaaaaaa

SEQ ID NO: 379563 - DNA, 445 bp, Homo Sapiens
  misc_feature (67)..(67): n is a, c, g, or t
  misc_feature (126)..(191): n is a, c, g, or t
ctgcctaacacagtgaaacccccatctctcctaaaaatacaaaaaattacccgggcattggtgcggncgccctgtagtccccagctcctcaggaggctgaggcagggagaatagcatgacccccannnnnnnnnnnnnnnnnnnnnnnnnnnnnnnnnnnnnnnnnnnnnnnnnnnnnnnnnnnnnnnnnnagaaaggtaagcagtagaaaggctgttacaacaggctaggcaagaaataatatggatcctaaactagtgaaaatgagaagatggattacagaggcattttaaaaaggtaggctatagagaacatactaaagtactaaagtcattaagaaggacaggaacaaagcggatcttttgcatgggatgggggattatgaatatgattttttagacatacacattcccccatcccacctctacctgttttatttattgct

SEQ ID NO: 379564 - DNA, 526 bp, Homo Sapiens
  misc_feature (344)..(385): n is a, c, g, or t
gagcagcaaatcttctttttaaaaaatagtatgaatgtgaatactagaaaagatttaaaaaatagtatgagtgtgagtactaggaaggattagtgggctgcgtttcaacattccgtgttcgtactcccttttgtatgtttctactgttaatgccatattactatgagataatttgttgcatagtgtccttatttgtataaacatttgtatgcacgttatattgtaatagctttgcctgtatttattgcaagaccaccagctcctgggaagctgagttacagagtaattaaatggggtgttcacagtgacttgggatacaccaattaggaaattaaataagcaannnnnnnnnnnnnnnnnnnnnnnnnnnnnnnnnnnnnnnnnnttataatgtgtctttttattaaccatttgtacaataaatgtcacttcccatgccgttattttatggttcatttgcagtgacttttaaggcagtactgtttagcactttgatattaaaattttgcttatgttttgctaaatt

SEQ ID NO: 379565 - DNA, 258 bp, Homo Sapiens
gaatgactccaggactcatagttctcctggaacatggttttccactgtagccttagaagaggaaagcccatctatggatacttatgtttatgagaatagagacttgactgtttaaatgtcagaggaatagagagtttggcaagccagaacaatcctatcagtgaacggcctttggaaaaaatgggctatttttagtaaaagttttcataatgacatgatttaaagtaaaataaattagacttttgatttcaactctgt

SEQ ID NO: 379566 - DNA, 452 bp, Homo Sapiens
  misc_feature (185)..(222): n is a, c, g, or t
cttaaataaactgtttattcagaaggaacaattaaagaaagcaactatgatatggattacaaaaacaaacaagcatagatcctctccaggctccagggtgagacggccccacgctgcaaagactgccagccctgggctgggtgcatcagtgggctagcatgtgtgtgtgagcgccgacacgtgcnnnnnnnnnnnnnnnnnnnnnnnnnnnnnnnnnnnnnnggggtgtggacagaaatgaatgactgtgtgtgtctgcagcttggccccttccccaccccccaaagtagcagcggctgtgtgggccccgcagcagcaaaagtgaggccttcttcttcccctccccctccgcagctctcgctctgagaccccatctcctccggcggtagtttggccaccctcactcacaaagagcccccagtgatccccgtcaagacatctgggggaagagg

SEQ ID NO: 379567 - DNA, 523 bp, Homo Sapiens
tcccttggtgagcgggatttgaacaggcccattgtggtcaaggtgtcaggcctttggtaggaagctgtatcagacttggcaaaaatcagcagttcaaactcatccatagagaaccaaattcaaaaggagcctactgcttctgtttgttttccttttgttcatccttcctctggccttcctctgtggagacggcaccttcacaaatggccttagaatgccgttctgaagttcaacagaatgagacaaccatcaaatgaatatcagaggtatttattattgtcacagcttacctaatattttaaagaaaaaactagtaactaatgtttacaagtccaagtagacatccagcccatgtagaatatgtaacttacacaagggtttgcatctttcttttgtaacgagtgcggtacgcagccctgtatatattttacaatgtctttacagaaaaaaaatcatttaatgtggtgttgtacaataatgcatttttctaatttttttccattaaaatctctatggcacgttt

SEQ ID NO: 379568 - DNA, 519 bp, Homo Sapiens
gatgtgtgaagagtgtgactttttggctttgtcatttttgggaaataggagagttaggattccgggcaatcttctttatattgaaaaagcccctcaaagtaactgtgttgtgtattgcctctagtttattttcattgaaaggactccattcttccacagctccttgggttccggaaagtgagcactagtaatggacgtcatgtggtagtgagtcctattggaattaaagtcaatgtcatcctgtctcaccctagtatagattttttgtttgggatcgcagttttcctaaacatattgctgtagttacttaagttgctggtgtggaaaatttttggtcacgaattcacacttttacttacaatttgacagttaaaacagtatagaattgtcacataaagggtaaggtagaatgtatcacaaatgcaatagtgataatataatgcctttattgcagaatacacagattgagactttgtaagattgcaccacaagtcattcactttataggcagaaaaaaaa

SEQ ID NO: 379569 - DNA, 506 bp, Homo Sapiens
ttgctgtttttaagataaaaatgatttcagcactttaaaaataaaaagttggaaatgatcaatgaatcaaggatcatcaagaaagaggcaagaggaagtaagattaagccacaaagagtatcaactgataggtggcatttcaaggaacttcaggtgttgaatatctaaagcaccaaatgcgtgtggacagcagtgaagataaagctggaaatgcgccggcagaccaacacatgatgagccctgtaggtggtggacaaagactatgagcaagccatttaggcaaacatctgaagaatttaaaaatcaaaggcaaacaaataggactgtttcattaagatcacttgcattctaacaggttatgatgaatggaaagctgatggttcctggttggaaaaaagataattttcaatttggacatgtcacatttgagatgcagttgacacactcaagatacataatatattgtctttcaaaattgcagaaacctaataaaccatgatcttaat

SEQ ID NO: 379570 - DNA, 437 bp, Homo Sapiens
  misc_feature (12)..(12): n is a, c, g, or t
  misc_feature (46)..(46): n is a, c, g, or t
ttaaaacccagnatccacagccccctttgggccccaataaaaaccntggagttaccaaaagtttggagatacctaattttaagtaacattcccattttattaaaagtaactggattccatttgacttttttaacccatgtaagaggatggtgttatttcaaatatctcgtggtttcccattcctgaattttgtgcacggcagatgcccatatttggggaaaaaatgcatagaatatgcatcattaatattgttttggcaaacaggcattgagtttcagaacagtgaactatttttagtacatatggcaatttttttcaccttattaaagtgagatgagaacagaccttaaaatagcttttacctcaccatccaaatacctattcagattagttggttgaatagccagcactttgaagtagagccttaggaaaaaaaa

SEQ ID NO: 379571 - DNA, 309 bp, Homo Sapiens
  misc_feature (18)..(18): n is a, c, g, or t
  misc_feature (199)..(199): n is a, c, g, or t
cctaaaaatcctgaaaangccttcccaaagtgggaaaagggctgaattcaagtgaaagaagaaagcgtcgacaaaaaagcccagcttgtgtctgtgtcctccgtgtgtgttttgtgtcctcatgtttcacccacagttaaatggggttacttcgctttcccagaccatcagtgtcatcatcttcatttttccccctttnccatttcactgccaaactgttatcactgctggagtaaaagctaggaatgcaagtagtttcccagtttatagctggttgtatcaacccatgacgttactgtttatgaattt

SEQ ID NO: 379572 - DNA, 330 bp, Homo Sapiens
aggaaggctcttcccccagtcaccacattgctttctatttccctttcttcaggcttttccccaaaagttactgtctctgtgaggcctttttggactgacaagcttgaaaaaatggtcacccagaccacccacccctagcccccttttcctgcctaactttttagcacctatcacccatttaatggaaaataccttcattataaatcttttatttcccatgaggataggtaattatttgttgttgggggtgtctttgtcagcatctagtacagtgccctggcagatggatgctcaataaatattgatttaatgggttatgagggtgttaat

SEQ ID NO: 379573 - DNA, 477 bp, Homo Sapiens
agtaaatgtttgaagcaaactaaaaagacgtgggcaatatttaccaaaacaaaacagaacccaaaaaattgtacatcttgatccttagcaaatatccttaattgtagagaacacttaataaagagatggtattttaatatctgcagttcctgaggtagggtgtaacttagttctacattgtgatttaggaatttttaaacctttcttcttcaggggagaagtgacccaggcctcgagtttagtgctaaagccactagtgtacttatgctgtcacctaaccaccacatgcgacatggaggcagaggctaaatataggggctttcttaagaaagtgagaggaaattagcaagcattattagtgtttgactactgctatcaagtgaattcaaaggaaacaggtttttatgccatatttaagttacagaaaccaggcatgcttagaatagtttctaaggtgacagagtgagactccatctc

SEQ ID NO: 379574 - DNA, 538 bp, Homo Sapiens
gtcccttcttaccttcgccctctgccatgttgacattcttatctgatggcacaggctgggagttcaggacccacttagatggggtccgttcaggggaataccagcgttccacatttttcccttttaaagaaagggtcttggccctgaaatgttccccatccggacacaggctgcatgtctctgtgagtgtcaaagctgccatgaccatctcggtaacctactcttactccacaatgtctatattcactgcagggctctatgattagtccataatgtaaatgcctggcccaagacgtatggcctgagtttatccaaggcccaaacaattaccaaacattcctcttagatagaagacagatttctttcccttggcaaagatcttctactaagatatgttacaggatgttttacattctcttggtcttataataacaccacgcccaatccagtatttgatgcgtcggtggtcactcggaaggttgttattttaaaaatacttattgttctcagtctgcagttctcacagctgtaaaaaaaa

SEQ ID NO: 379575 - DNA, 364 bp, Homo Sapiens
  misc_feature (64)..(64): n is a, c, g, or t
aaagttaagcaacttgtaaaaatgtttccagtaggaaagttcctgtgatgagactgtgatgccntgatggtcaacatcagcttgttggcttttaccccagataagccttttgaccttttaccccagataacagccattgactgtccacgattgtcatcatgcagctatatttgtcataagcatcatgtgcttggatacattatgtcataagcataaatgtcctagagtaaattgtacacgagttgcattatgtgctagatgtctatccaaaggaatactctggcaattcatttggcaaagtaataattttgtgtgcatgtgcaagtatataccaatttatgcaataaaaatttttgaagtatgg

SEQ ID NO: 379576 - DNA, 442 bp, Homo Sapiens
ggtttagaatctgtcctgacgggtggcgtttggaagcagcactttacaaaacgcctggtcctctcccttctttgtcaaacctggtcaaagttaggacttgagctttttttggaggatctgaggagcagtggggagtggggaattagccgcccaagtccttaaagctgtcacgtgcatcagtatttccacctccaacgtcagtccaattcctattaatgctttgctttgtatggatagctaaagatgttttagaagataagggttgaggctaccgatcctaagtatttgcattttaacatggtgatttctgataaataaaaggataacctttctgggttcttaggagcaaagaagataatggctgcggaattgctctacagcataatgtataagaaaatcgttgggtcattaataaataatgcaattattttatcacaaaaaa

SEQ ID NO: 379577 - DNA, 449 bp, Homo Sapiens
  misc_feature (12)..(12): n is a, c, g, or t
  misc_feature (27)..(27): n is a, c, g, or t
  misc_feature (40)..(40): n is a, c, g, or t
  misc_feature (51)..(51): n is a, c, g, or t
  misc_feature (74)..(74): n is a, c, g, or t
  misc_feature (83)..(83): n is a, c, g, or t
  misc_feature (351)..(351): n is a, c, g, or t
ttaacaaccccntaataaagcagaggncaagatcagagcncatgaagagcnctttgctttcttaaaatatgccncctcccaanaatgtagggcccaattatcactgcggctataagctaattatcagatacaaaaatatggatcacaactaattatcagaatctgaccttatttccaagtcatagattcctataaactaggttaacattagagatttaagcaggaactcaagaactgcagtaacccatggaaatgaatgtttatatttctaacaaatggctaaggcaagagatgattttctgaggcttatgtctggtgaaattttccagaagttcacgctctgcaaggccnttattagtagaacatggattgattgaacgggtccatttcaattagtaacctgaaaccttctatttggagataaagatgactgcttccatttaaaaaaa

SEQ ID NO: 379578 - DNA, 518 bp, Homo Sapiens
aaggcaccaccgaattgtccccaccttgaggccaagggggcctgtcatcagctgtgggctacccccggtcaggcaaggcataaccaccgggcattttccagcaatagcaactatgagctgtttagtagtcaatgctctgaagcagctgcaggctggctctcctaaaggtctcccaagcagaggaagagaaatcatagcgacggattcttaagggtgaaaaagacggcggtcccacagaatctggctacatccctctggaacatttgcattttgataaaggacttgcttttggagctaaggagtgaatcatttattgcaaattatgtggcattttcagaagaagtaaaataatatatagaaatgtacacaaaggaaagtcatatctgcaaacgagtcccttatctgccaagcctctcctctaccattgtaattaaccactgttattagctcctcctgtaactttcctgagtttctttacccatatataagcaaacatgaatgtgtgtattcttgctgtc

SEQ ID NO: 379579 - DNA, 415 bp, Homo Sapiens
  misc_feature (16)..(16): n is a, c, g, or t
  misc_feature (31)..(31): n is a, c, g, or t
  misc_feature (47)..(47): n is a, c, g, or t
ccaatggagggccccntatacgggataaccnccttaattggtccaangaattggaaatccatatagaatacattttcctttaaccagcagagttcaggctagtagttaacactaaacatgaaaattttaaaaataataacctaaaaagtgctaaaatttttggaaaacaagatagacacttctaattaacccattggccaaaaaataattcaagtacaaataagaatttttttgattcattttgagatactacatattgacacatgtggaaggcagttaaaacccaacttagagagaaatttataatatatttttaaaaatatgtattagaaaaataaaggctaaaaatcaattatataaacatttaatctaagaacctagggaaaaacaagtaaataaaacctaaaatatatag

SEQ ID NO: 379580 - DNA, 516 bp, Homo Sapiens
  misc_feature (424)..(473): n is a, c, g, or t
tggggaggatcatggcggagggtgaaaggcacttcttacatggcagcagcaagagtagaaatgaggaggaagcaaaagtggaaatctgataaaacccatcagatctcatgagatttattcactaccacgagaataacatgggaaagaccagcccccatgattcaattacctccccctgggaccctcccacaacatgtgcaaattctaggagatacaattcaagttgagatttgaatgtggacacagccaaaccatatcaggctactcgggggtttaagaattcatattaacttgctctgccagagaaagcacaatttataattcagatcttccagcagttacaaacttttcctaccccaggcagatgcacatgtcttttatcagagggggtgagaggagaagaacggagctgtgcttaggtatnnnnnnnnnnnnnnnnnnnnnnnnnnnnnnnnnnnnnnnnnnnnnnnnnncccaggccaaggctcatggcatctgcacttctctaacgttgaa

SEQ ID NO: 379581 - DNA, 566 bp, Homo Sapiens
  misc_feature (25)..(25): n is a, c, g, or t
  misc_feature (35)..(35): n is a, c, g, or t
  misc_feature (55)..(55): n is a, c, g, or t
  misc_feature (63)..(63): n is a, c, g, or t
  misc_feature (76)..(76): n is a, c, g, or t
  misc_feature (81)..(81): n is a, c, g, or t
  misc_feature (114)..(114): n is a, c, g, or t
  misc_feature (146)..(146): n is a, c, g, or t
acaacggaacccctacaaaagccgnccctaaaaangggcccgggccaaagggaanaagggccnaaaggcccttttnccctncccaaccggggaccccggtccccaccggaaaantaggggaaatggttgaaaaagccaagttaccnaattccattaagtgccctatttccatgtatggcccactgcccctaacccttaacagtaagttatacctatgtggttatccccccggttggaagccctttgatttttttatgtacccagaaagagtttgtgattcaagcgaatgagcatcaattacccctgtcaccttgttggataatttggagtattttagctattagcaagctattagcataacagacattaaaatgattaaaatatcagtgattactttaatccctagggctataaaatgattcttttacaaaatgcataatattaaaaaaacatttaatttgttttagaggatcggcttttgtttccaaagattcttttagcacctactgaaaaatatgacatagtgtaggctgcagtaactgttcttggatggttttcaaaaaaaa

SEQ ID NO: 379582 - DNA, 509 bp, Homo Sapiens
  misc_feature (42)..(42): n is a, c, g, or t
ggttccattttcccttaagagtgatagtggattggaacatanctaatttcagaagaggggacttttaaaaattgccactcataaggaaagaaagaactttttcacatatttttgaaagaaacgatggtgagaagatattcttgataatagagatatgctaacatttgctttgggtgttttgtaggttagatttttttggtgtgtacctttataggcttgcatattgccttactttaaacagctgaagttcctaagtaagagtgttcatatatgtgaaagagttcttaaagtactatatagttttgttattgtattgaatatatattgttctaattcctagagtatgtcatcttctatatactctatacagcaggaatccttgctgtacaacaattatattaaagaaaactctcagttatcctttatggtcttgtcaatcaaatgttttggtcaatgcatattactaactttcatctaattaatgcacaataaaatatacttagtgtgat

SEQ ID NO: 379583 - DNA, 544 bp, Homo Sapiens
gagctatttggaagtgacatagccaaaatgctggaagaacataattactttcactcatcttctcacttcagaacaaaggttaaaacactatgtttcatgtttactctatttgtaaatgtacatataatagtatgttactttatatggatccaagtgattgcaatgaataattcttacaaccttaatattggcataagagggtgtctttacaatatgtatttatgagttaatttctttaaggaagagccgtaagtataagaactgatgcagaagaatataagtatgtttatgaatgagaggaactagtttctgatcttgattctgaactgatacataccacaataaccaataagccaaactacaaccaactagtttgttaacaagattagtgctattgggtatgtttcatagaattatttttaatggcacccaaaacttagtcttgaatggagcacttcacagaatgaagttttctgaaatatggaagaattagtaacgcttctatttgcattagtttttagggactcagatcatccttattcta

SEQ ID NO: 379584 - DNA, 550 bp, Homo Sapiens
  misc_feature (83)..(83): n is a, c, g, or t
  misc_feature (120)..(120): n is a, c, g, or t
  misc_feature (398)..(409): n is a, c, g, or t
  misc_feature (462)..(477): n is a, c, g, or t
ttccatcccacagatgaggaaatggccaaaaagatgaatattgtgagttagcacccccagctggaatggaatcccatttctgnacctgtagtctcgggtgttcccccgggggtgcctgcnagcgggagaaaactccctaggagaggcatcaactgacaggagttaacaaaggaggagcagatgggactggggcttgagtggcgttcaggagagccagttttaagaccacctggatcagcctccctgtaagccagttatcagtatccaagtgctttaacacaggcttctcagaagaaatcatttttattcctaccattatttcataccaaagcatcattatgtgctacagttccaatttcttacacaagaatgaaaagggttaccaatgcagcaagttnnnnnnnnnnnngaagaagaagaagactgaatgatttaagctgtttctgaattgttcctgccatnnnnnnnnnnnnnnnntcaaggcaccagttttgaaatgggagaagcattctaaatgagactgttagcttgccctttgacatcgatttct

SEQ ID NO: 379585 - DNA, 433 bp, Homo Sapiens
  misc_feature (25)..(25): n is a, c, g, or t
  misc_feature (57)..(57): n is a, c, g, or t
  misc_feature (127)..(127): n is a, c, g, or t
  misc_feature (164)..(164): n is a, c, g, or t
  misc_feature (191)..(191): n is a, c, g, or t
  misc_feature (223)..(223): n is a, c, g, or t
acacaaatggcattattcataatanccaaagatgggaataactcaaatggccatcgnctgataaatgaacaaacaaaatgtggcatatccatacagtggaactggccataaaaggaataaaatgccnaataccatgcctataacatggatggacccttgaaaancatgatggtaagtgaaagaagcccagntcacaaagggcccacatatatcattcccattncacatcaagtttcccagaacagagaattcctatacagtcagaaagtaaattagtagttgcttggtcgtgggggatgggaagacagggtagtagttaaagggtacaggatttctttttgaggtgatgaacatgttctaaaatttgctgtggagatggttgcataaatctgtaaacatattaaaagtcattaaattgtacacttgaaatggg

SEQ ID NO: 379586 - DNA, 252 bp, Homo Sapiens
ttaaaaagcccattgtcaactctcttagaacttcatcaagtaaatggtaccttgcaaatgtaggttgtgtctgaccttctttctttttgtgtgttggtgcctcagatgtatcatgtgctgcttgaactgattctctacagtgttccttcctagtctcaagctgatgatgtgctcaaagatgtatcaaaatccatgtaatgacaccttttagatgtttctaatatgtcaataaatgatatattgcaatccttc

SEQ ID NO: 379587 - DNA, 496 bp, Homo Sapiens
  misc_feature (303)..(316): n is a, c, g, or t
ccccccacctcccagggcagcccagaattcacctaccagggttcaaaggctggctcccttgactcaaggtcaaactatctgggtggtgcaattcatgctccagttgaaaccaacccttgcccaactcttttcttgccctcttctttttctcttactccctttccctcggagcccactcctcagtatatccctatgcgtccaaatccccatctcaggctctgctccaagcaaccctggcctaagacagcactattctatacatgcatgtgtgtgtacatgcaaacatacaactggcacacattnnnnnnnnnnnnnncccatatacaaggaaatccgggaagatctgggagagaatgatcttccaaagaagataatggagaaagagtatggattttataatgtagaagttagagtcatctcagatatagagtgggactgctttgaagttgaaaattaaaagatactttagaagtaaatgtattttttattaaatcag

SEQ ID NO: 379588 - DNA, 505 bp, Homo Sapiens
gggcagagtgcatgcgttattcattgttataatttcagtagcatgcatggattagtttgtcacttcacttattaagtagtttttgagcccactggataattctgttatataagccttggacaagttagtagtggattaacctaatacttatcccccccaaacattatcaaaataggggatattcttttctttatgtattacttaagggcaaactggggcacaatttcaatgactgactcatgcattaatgttgagatgcaatatgaagatgttttatgaacctactttcccacttgcctaactagggctgagagactattaaattagaaaaagaaacaaatgtttgtttaaaaatgttctgcagaaaatcttatggacttccttaagtgtaatagttatgataacccgatttaaataagaaacatactgaataaccacactatttttctaaaactgttagaagtctaatgaatacaaatgaaaattaatctgttcctttccttac

SEQ ID NO: 379589 - DNA, 569 bp, Homo Sapiens
caaccctgaaattttaccagtaattatttcagcacatataactgaaaataaaaaatggcagaaggactaaagaagaaaaaggaattctcttcttaggctatacttaaggctgtttatacaatgctaagataactgcaagacttctccaacttttagagcagtagtatttaagaatattgccacacaattcctgtgtcaaagataaccctcagtttcctaactttcagtcacagagacaataaagcaggagcccagtttcagacttcagtcaaaagaacattaaaaccatttcaatcactttaatcaagaaatggattaagtacaaaagtatttcataacttgaggaatcaactctaagaactcagctgtgtgtttttatatgtaaagaatgaatatataaatctttattctttcctaaatttattaattttatgacaattttatggttgctaaaagcaggcataaaaatttagagaggaaatctgtggagttgttactattatggaaggacttgttttcactgaaaacaatttgaaatatcttctgtacctcggccgcgaccacgctaa

SEQ ID NO: 379590 - DNA, 549 bp, Homo Sapiens
  misc_feature (17)..(17): n is a, c, g, or t
  misc_feature (21)..(21): n is a, c, g, or t
aggaagtttccgggctnaagnctggcagagatgttctctagcttagccaaggcctccacggacgcggagggccccttcttcatcgaccgccccagcacctatttcagacccatcctggactacctgcgcactgggcaagtgcccacacagcacatccctgaagtgtaccgtgaggctcagttctacgaaatcaagcctttggtcaagctgctggaggacatgccacagatctttggtgagcaggtgtctcggaagcagtttttgctgcaagtgccgggctacagcgagaacctgggagctcatggtgcgcctggcacgtgcagaagccataacagcacggaagtccagcgtgcttgtgtgcctggtggaaacttgagggagcaggatgcattattattcagaggtcctgtgttttctgcaggataagaagatgttcaagtctgttgtcaagtttgggccctggaaggcggtcctagacaacagcgacctcatgcactgcctggagatggacattaaggcccaggggtacaaggtattctccaagttcta

SEQ ID NO: 379591 - DNA, 579 bp, Homo Sapiens
  misc_feature (204)..(204): n is a, c, g, or t
cttcactggcaccccgggccccttgaagggccaggctgcactccccttcagccccctggtcatcccggccttcccggcccacttcctggccaccgcagggcccctcgcccatggccgctggcctgatgcacttcccccccaacgtccttcgaaaatgccctccgccacagactttgcccggcctcatctccctggcacgcaacnaccagtcacaacctatgcagcgccccacttcttccacctcaacaccaagctgtaggccagcccatggtgttgtgtacactgtggagtcgacaggggcctacaacaggcaggtactgctgccagggggctctgaactagtgcctgctacccaggacaccccggccatgcccctggctgggcagcctggcacaagtgaagaagaaggcagtgggaaaactgggtttatctcaaggcagcagcctgagcccaggagcagaggacccagttgttataaggcgctgggagaggaagggcagctcccactgccccagagcggagctcgaagcacccaggttgcccacggaaaatccaataaaaagacaccagtgtgaatcc

SEQ ID NO: 379592 - DNA, 458 bp, Homo Sapiens
  misc_feature (367)..(367): n is a, c, g, or t
  misc_feature (384)..(384): n is a, c, g, or t
aacaacttctggcagaggaacgtggtgacatttcattatgatgtctaaacttagaacttctggagaatttggaaggatacattattcgagaatcatcctttggattcttcaaagccacaggatacattcaatgtcagtaaccatattcttgatccctgtaacatttattggcgtttcgcgtaggtctctgataaatgtttgacgtctttgtgtgtcttcacactttgttatcctgaaactgtgtcatgtagacataaatggtcacagtttgtcttaaaagtctttagggaaaaggtgatactaggcacttggggctaggaaggtcgtgcagagcaggagggaaggaaaaagggcccactgctgtctnaccaaatggaatggggnagattttaaggatctttccaaaggcaagttggagtcctaggaccccttggcccccaagtttttgttaaccatgg

SEQ ID NO: 379593 - DNA, 403 bp, Homo Sapiens
  misc_feature (367)..(367): n is a, c, g, or t
accagcagacctgactgtccccagcagcttccggaacaaaaacagcgacaagcagaggagtgcggacagtttggtggaggcagtcctgatatccgaagcttgggacgctatgcaagggacccaaaatttgtgtcagcaacaaaacacgaaatcgctgatgcctgtgacctcaccatcgacgagatggagagtgcagccagcaccctgcttaatgggaacgtgcgtccccgagccaacggggatgtgggccccctctcacaccggcagactatgagctacaggactttggtcctgggcttacagcgacgaagagccagaccctggggagggattgagggaggacctgggcggatgaattgattttgcntcaccacctttgttaggcccccaggcgaggggcaag

SEQ ID NO: 379594 - DNA, 350 bp, Homo Sapiens
  misc_feature (327)..(327): n is a, c, g, or t
tcaaacttctctcattcctctaaatgtacaaaggtttcaaagttgtaaaaaatatgtctacatagccaatgctcttagtatttttaacagcaaagataatctctgccaataattattaatgacaaaatagtgataactgttcaatgttgctttaacagtccaattgtagtaggtgagaaaacaaaaaagaagagaagctatgttgaatatttagtaatgttgggaaaagatcctcaccctaggacataaaatagttttaaacattttaaacatgggcccctctcttattgtcattgctagtggaaggagttcccggaaattggcctntttaccatgtaaaggtttttggg

SEQ ID NO: 379595 - DNA, 467 bp, Homo Sapiens
  misc_feature (454)..(454): n is a, c, g, or t
acagatcccacgtgggccctgttctctgtcattgccatctattctccaagaattctgtctcaatgagaagaaaaacagatcaacaggggagctgaggaatagatgggagctgcgagctgcagagggccaggactcggtgtgttccccacagcggccatctgcttggcttgtggagacgaccagctcggccacacttctgagattaggactccctgacgggccagcagaaggggctcttgtcaaatcccactttccctgattaaaccggaacaggaatgtctggcagagtagaaaatccagggaggagaggtgaggcctgcatcctgggagggaaggttgtcctgagatgttcctgccatttttgtccccaaaagcgggatgatactaagaggcgatggggggcaggatcccatcctgaaatgtgttcccgagagtttttggaagattttgaccntcattgcaatagt

SEQ ID NO: 379596 - DNA, 461 bp, Homo Sapiens
  misc_feature (22)..(22): n is a, c, g, or t
  misc_feature (39)..(39): n is a, c, g, or t
  misc_feature (74)..(74): n is a, c, g, or t
  misc_feature (243)..(243): n is a, c, g, or t
aaacgtcggctgctccaaggancttccctccgaaaaagnaaatccaggtaaaggcgggaagtagggggaaaggnacggaaggcaaagcgcgaaaaacaaagcgtgccgtaggacccgcttctcccagcccgcgtgcggagagaactctcgagagatttactacgacttccaggatgctctacgcgacccggtgggcggagcaccctaaatggcgattcccattggcccaagcatccgaagggncgtcccggagaaaaaacccggatgtgggagccagtatagaaaaaagggacaggtcctaggcagcctggcctcgagcagcaagtttcctcagacggcccaggaaggcccggacgccaacgtaccgctcgcctgccgccgatggtcgtttgcaccggaggttaccttccgacagggccgtagttctctcaaccggcgcctgctacttccctgagaccaaa

SEQ ID NO: 379597 - DNA, 610 bp, Homo Sapiens
  misc_feature (481)..(489): n is a, c, g, or t
aggtctatcttgatttcataggtccttctcaatccaaggtcaaaaactgagaatcttattttctgcaccaggaactcagggttatccccaacctatgccgctggacatgatggtcatccaacctgtgtttttgtgagtgagtgaatgtgtgactggttggcctctgagtggatgactggatgcgtgaatgtgtgagtgaatgggggagttaatgaatccctacctaactgtgaagagaagaaaaatgaggagcccctctcccactgaaacccataactgccccatcaaggtcatctttctttgactcaagatgacatctcaatttgatgcttgtaggccccaagctgataagggccacagccctcttcagagccacacttcctggggggcccacagagcagctctgccctccttcctcttcccctaaccctgcattttcttcagccttcatgttctattttagcttcacacacggaccctnnnnnnnnnaccaccaagtggtttttccaatgggattaaggccaagggtttcgaagttggggatttccttttgggtctggggatttccggggggcaggaaacatagggagccaacatctgggaaattggg

SEQ ID NO: 379598 - DNA, 446 bp, Homo Sapiens
  misc_feature (393)..(393): n is a, c, g, or t
  misc_feature (410)..(410): n is a, c, g, or t
  misc_feature (415)..(415): n is a, c, g, or t
  misc_feature (421)..(421): n is a, c, g, or t
tggatagtatcagctttgaacatgatgttcatttatcttctgtgttggaatcctctactgacttctgaacctagaacatattgacatcaatataactatcactaattctgtgaaattttattttatttaaaataataaaaaagtaatattagacttaatacaaactctaattactaagagaagaatgtgaagattttagcccaaggaatgaggcactcccataattaactcttactgctggcataatgtatagttaaacaaagggtgacagttttaggctgggaacatttaaatgtccaccagttgtggaatgctacagataggaaatttctgtaatgggtggcaacttgggacttgattacctcaggaaggaccttccagggtaaaaaagtncaatgtatcttgctatnacttnaaattnttatgatgtatgtatgtatacacac

SEQ ID NO: 379599 - DNA, 388 bp, Homo Sapiens
  misc_feature (11)..(11): n is a, c, g, or t
  misc_feature (349)..(349): n is a, c, g, or t
tcaccaacaanttgaaaacaaagatcctggggaaaccttggctccttgctgtgccatatctgaaggttcaagcaaaacctcccatcttgctgcttggtgtccgcatcttcagcagcctcctctgggctactgatgtggggagcagatacagacttggttaacttagtgagtgccacctcccgctcatcctcctcaaaaggtaaagagctaatggaggtgagagaagcctggatgccgcttggcaaacttgtgttactttctgtgtgtccaccctctagggagttccggtggagggcatgtcttcgaacaaacgggtgcaagacttcccgatcactgggcaactccagancctgcttcgggcctctgaccaggacgtacgagcttggct

SEQ ID NO: 379600 - DNA, 204 bp, Homo Sapiens
atgggacttgtagccgtttttaaactttcatttttcataatgtcacagataatctttttatctattatccactggctcttttctgagaggcatttgcatcaaatagtgctgtacagatcatgactgtctctagtggggaaagcagcttgaaatgaaaggttattcactcccctcctctttcgctggctttgttcttgattctca

SEQ ID NO: 379601 - DNA, 468 bp, Homo Sapiens
agtgagggcaatgaagggcgatggtggggagactcggtgggtgaatggggagaccagaaagaaagagtccacagagcctgggctgggcggttggaggctcctgtttacagccctctcttctttgtacagttgtattccaacactccactcgctaagaggccctgatcccagctcattcaggggagaacacgtcgtggggttcctgtcacgactatcacttgagattatattattatcctcactccctcgctgtctggagacggtcacaccttctggcaaattcaagaggcatgagtgggaccgagagcacatccagcatttgcatcacctccctgggcaaccttcccattagttaccagccacttacattccccaccgccgcctgtcatcccttcacgtctctgtgggccacccgggtgttcactgccagcaccaggggattggtttttcacgtaaaatgttccaaat

SEQ ID NO: 379602 - DNA, 473 bp, Homo Sapiens
  misc_feature (24)..(24): n is a, c, g, or t
gttaaaagggttaaaggtgggaanggacattccacatgccctcctaaaaatgtgccagtgcccttttcctaaaacactatatttggagactataattttaatcaagtgatgtcctaagttacagagcgcctgtctggattgctttattctgcaggtggatacaaagtgtatccatgtttcagtgcctagaaaacagtgagacacaaggaggcatctttccttatcactgaggcatctgttaaatatctaccctttcctttggtacttctacttctttgtatccctggggaaggcaattaacattaatgcttctgtaacagaggcacagagcaatagccgacaagatttgactggtagatctaaagttattgctgggctctgctggcgtggggctgcatcctacacaatttttcccatctccacttaaagtagaggaggtgaagagatagaggaaaagtagaagaaacctttca

SEQ ID NO: 379603 - DNA, 484 bp, Homo Sapiens
  misc_feature (364)..(364): n is a, c, g, or t
  misc_feature (437)..(437): n is a, c, g, or t
  misc_feature (448)..(448): n is a, c, g, or t
  misc_feature (472)..(472): n is a, c, g, or t
gcaagcgcattctacagagagtaaagtacaatcagagcacattccaaatggaagttggccttatagttaatgagtttcttagaacaacaaaagcccagctatgaagggtgactttggtcctgcgtgagttcagtctctggtgaggaagctgcaatgctttctaagactctggagagtctgggaaccttgaagcagccagatgcgtgatagttatttgcaggtgttgcctgaggaacgatgggacacgtatagcttttggtagtgctggttttgggactggggaacctaaaaccttcaagaggacagtttccctccaaagaattaatcagtggggaatgtttttgcaacaaaagtgttcaacccntaggcagtggggggcaccacatgggggaggaaacagcattttaggatgctgggccaagggaaggaagttgggntctttttaccntaaccagcttgatctttcggaccntaaaagttgttc

SEQ ID NO: 379604 - DNA, 381 bp, Homo Sapiens
  misc_feature (305)..(305): n is a, c, g, or t
  misc_feature (312)..(312): n is a, c, g, or t
  misc_feature (345)..(345): n is a, c, g, or t
  misc_feature (350)..(350): n is a, c, g, or t
  misc_feature (357)..(357): n is a, c, g, or t
tggccctggactgggtggtaggaccttctgttcggggccgccggatcaccagcgccgggggcttcctgcggtgcttctggtgatccccaatgcgtggggtcgcctcacccgcaacgtgctcggcctttgcttgctcgccctggagcgcggctactacccggtcatcttccatcgccgcggccaccacggttgcccactggtcagcccccggtgcagcctttcggggacccgtccgacctcaaggaggcggtcacatacatccgcttccgacacccggcgggcgcccttgtttcgcggtgagaagngctcggngcttcggcgctgcttcctgtcctgacctggggngagtncggcttnctttcagctaagtgaacaggtgcc

SEQ ID NO: 379605 - DNA, 399 bp, Homo Sapiens
ccataaaccttggggttcctgtttgttggggaaccaggcaattgaaaggcctcacagggaaggaaaaggttggtcctccctctcccatatggtggcctgtgatgtactcctaagtttgaagtgtagcccttaggctctttgtgtcctcccctagtcccaagggcaggagggatagcactgttactgtggcagtggccaaggggctgtcgtatgcctttgggagcctcttctcagggaaactctgtgtcactaacagtgggtatgcctcagccatggctggggtgactgttctgcattcatgagccatgggccctgcctagtgaagagtaggggtgggggttcctagggaggaggggctgcactcctgtctgtatggtggctgtggtgtgctaaaaaaaa

SEQ ID NO: 379606 - DNA, 403 bp, Homo Sapiens
  misc_feature (272)..(272): n is a, c, g, or t
  misc_feature (315)..(315): n is a, c, g, or t
  misc_feature (354)..(354): n is a, c, g, or t
tatgtaattggaatcatacagtacatactggcttcttttgatgaacattatataggcgagatccacttatattgttgctggtagttgtactttgttcattgtttttgctctaaagtattccatcatgtgaatatagcatagcgtaatcatattcactataggtaaacatttgggttagttccatctggagttgttatggatagtgctgcaatggacattcttttgcatgtctcttcatacacacatgtgcatgcacatgcacacggcatgcnatctctctgtttatgacacccgtggcattcacgttctgctttnaactgggtcctgccaaacagttttctatccttatacctnttacctacatttatcttcatgagttcgctgatcaccccactttttgttg

SEQ ID NO: 379607 - DNA, 432 bp, Homo Sapiens
caaaaaagtctgcatgcctatttagatgctagatctctcaccctttctagctctacaagtatagagggaaaattcgagacataaatagcctcacctttgtagaattgagctccctgaaggcccacagtctgcctctggtcttgtatctggaccagcattcctttctcattgtgctgagagttgggaaggccctggggtgacccctcgggaccatttcctgaggaaggtgttctgtaaatgacagggcttcttgcatcaagggccacttttgttaacctcccgtcagtatttgggttgggtcctaggattaggggccagtgtcctcactgtggagtggaattcacagatgaggggagttgggggtggggaatgaggagcaaggaacatgggggggccagctggggggacagtttgaggaacaattgatggcaa

SEQ ID NO: 379608 - DNA, 558 bp, Homo Sapiens
  misc_feature (17)..(17): n is a, c, g, or t
  misc_feature (23)..(23): n is a, c, g, or t
  misc_feature (84)..(84): n is a, c, g, or t
  misc_feature (100)..(100): n is a, c, g, or t
cggaattaacatctggnacggtncatgcagttaaaggaaaaagctcctctgggttactctctcggattataacagcagtggagntctaccacaatggcantcacccagtactataaagcaggtttcaaaaacatgccgccaagtgaaacaatgttcctactgtctgccatcctatgctgcccttcaaatggtttattgtagggtcatataagaaagacagggtcacccaaaccccaagtgtttgggatctgtaatggtctttctagtaagcgttttattaaattatgattcccttctcctgtaattcaaaagcacaagctaaatttaaaaaatattttagaaagtattaaatttctggttgagaattataacaacattgaaacttaaaagaaaaaatacatctgataataaggaaataaggaatactaaaacatacttgtatatgaaggcaatcaatctacttgttcacaattatgcttcttatacagctcatatctagttccatactctcttacccatgttaggttaggtgttatgtataaaaataaatcacctcca

SEQ ID NO: 379609 - DNA, 442 bp, Homo Sapiens
  misc_feature (318)..(318): n is a, c, g, or t
  misc_feature (426)..(426): n is a, c, g, or t
gtgtgggagaaaaaaaatacgactatataacactccaagataatgagttagttaaggactcacagattcatcatttaatcactgaaacgacaggcacgcaagaacaagatcaagcttaatacaataacgctagattatatcaacaaatggatgccaacgggttaagacgggaggcctacataaaatgggttcaattcagagtgtggactcacacaaagttgcgaaactcgctttattggttctacaaatccaagtaagtgactagacccaggcttgcaaagctatatgtcagacacactttgttgcaagatgcaaagntgtcatcctaccccttggaacaggaaatcaccccacatactagtttaattcttgttattcaggcacatctcgttatggctccatttttaacttattaaggttcctcanggagatgctacatttt

SEQ ID NO: 379610 - DNA, 466 bp, Homo Sapiens
  misc_feature (405)..(405): n is a, c, g, or t
  misc_feature (433)..(433): n is a, c, g, or t
  misc_feature (455)..(455): n is a, c, g, or t
cttattccagatcatctggatgatgcttaataccacaagcacctattcctctattcattcatttttagtgcatttggattttctggagcattggtcggtcctgagttgaaattcattaattgtcatggtctaatgagaaaaaataggcttaattaaaaaaatgcatctgcgtcaagtataggccaaatgatatcacagagtgctgtttttagaagggagaaaaatgttcgggaaatgggggtctttatgtaggcacgtgggcagctcagggcatgatgaatgcaaggggaatctggggccattgcagtcggcaccgtatttcaaattggaaagcaggcaacttagtttcagcaaaacaatataatcctttacatgccactaatgttattttgagttttattggcnttgcagttttggggtttaattagtgccntccttttattgttggttggggnctaccaggctt

SEQ ID NO: 379611 - DNA, 437 bp, Homo Sapiens
  misc_feature (424)..(424): n is a, c, g, or t
tctgctactcagatccactgcatacagaataagtcagaggaaaagcaaaatataggtctgtccaaattcatacaacttgtgggtgagttccaaagagcttggattagaagggctggacaaagagagaattcaatggggcccaaattagaatgcttataatgagacccaatctccaggaaaacaacactcacataagtttaatcatataaaatgatttgtaatgtctctaattaggatgaatcaactaggaaacaaactcagtgggtccaaaataatttttaaggagtattccgtaacctatattttacttttctgattatattaaggggctgccagccaggaggaaatacttaagatatggggtgaggaattccccagacttttatacaaaaggtttccacttttcaaatcatgtccgtggacntgataaagtttgg

SEQ ID NO: 379612 - DNA, 639 bp, Homo Sapiens
  misc_feature (22)..(22): n is a, c, g, or t
  misc_feature (34)..(35): n is a, c, g, or t
  misc_feature (55)..(55): n is a, c, g, or t
cagaaatattcacgtgcctganggtaggcgagannttccacactctgccgggaanttagaaagtgtacgataaatggatcgtgttgtctttctcaaatctaaaatttctcaattcggagacacatctggccccaatgacttcagaaaaaggaatgtgggccagaaatgctgttaagtattgggtgaaagcctgctagtctgcccactcctgcttcagtctaataactttgtgtataaacatctggcagtttcaccccagggaaggagctactcctctccttcccaggaaaacacaggtcacgacacacccagccctcagatttcagctgcgaggaggcggggggtgcggtcagggaggcaggcccaggagacgcctgtgggactggtcttctccccgaggcctcaggccagctgtgggcacagtgggcctttccacgctagggtggagcctggccatcctcacccacaccctggtgctgcccccaggagaccacacagtaaacactcggggcaccagattttgaggcaggtggggtcccacaggacgggtctaccacagtcctgtcccctgtgtgagcccctgctcacccagacaggcccggtgtggcccggcccagcagacgtggcgtgcctttgcgc

SEQ ID NO: 379613 - DNA, 589 bp, Homo Sapiens
  misc_feature (126)..(135): n is a, c, g, or t
  misc_feature (479)..(479): n is a, c, g, or t
  misc_feature (496)..(496): n is a, c, g, or t
  misc_feature (529)..(529): n is a, c, g, or t
  misc_feature (541)..(541): n is a, c, g, or t
  misc_feature (558)..(558): n is a, c, g, or t
  misc_feature (569)..(569): n is a, c, g, or t
cctaggacttcttcatgggtcttacagttctatgttagaccatgaaacatttgcatacacatcgtctttaatgtcacttttataacttttttacggttcagatattcatctatacgtctgtacagnnnnnnnnnngctgctattttttttgttcttgatctttgtggatttaatctatgaaaaccttcaggtccaccctctcccctttctgctcactccaagaaacttcttatgctttgtactagagtgcgtgactttcttcctcttttcccggtaatgggatacttctatcacataatttgccatgaactgttgggatgcctttttataaatacatcccccatccctgctcccacctgcccctttaggttgttttctaacccgtaggcctctctgggggcacgagggcaggaaagcagggccggggcacccaatcctgaggagggggccgcggttccttttcccccaggcctggcccntcacagcattggggagnctgtttacagtggcaaggacatggattacaaantcagggtcaggnaaaacaagggtttaaanttttttcacangtttttgtttcagtgttttc

SEQ ID NO: 379614 - DNA, 493 bp, Homo Sapiens
gcagtgctactcatcaccatcatgaaaaactcatgagcgtcagacgcgccacagggattcctgatcaggtaatatctgctattattatgacaagctccatagaaaaatgtagacagcagggcagaaagacattattccttataaataaaaggttcatctgtgcaatattcacattagaaaaatatacattgcttgccatagaccttctctggataaaatcagacgaatctaggatctgactccacttcactgtgagggctctggctccacggtgacgaccgactccacagcttctagaggaactccttctagcgggcccatccgcaggcacgcccctctgcatcagtcactgtgacaatgtcctcctcctgagacactattgtacctggaggggacaagataagcccatcggaagtctgaataaaaatctgcttctgtccctgagacagtaactcatggctcccattggaaatttcaaaagccatggcttcgc

SEQ ID NO: 379615 - DNA, 409 bp, Homo Sapiens
  misc_feature (44)..(44): n is a, c, g, or t
  misc_feature (71)..(71): n is a, c, g, or t
gggaagggagatgagaaaagggatgaatcccttgaaagacagcnggggaggtggggggataaaaatatagnccaaaccaatccctgtgaacacctacaacagattccttgaagttttcaatacctaatatttaaaagtgttagagttttgtggtaaagaaacctgcctcaactatcatttatagtcaatgagtagcataaatatttggaggcataagggacacaaccaagtaaaagagtaggcagagtgcagagggacagcataggtaactgagtgtaaggctatgaagccaatcataagctatccatggtttaaccagtgttgtggttaagtatgatgtcttgatgaaggtaatctcaactaaaatattagctccaccactgaccttggacaagttacataagctgta

SEQ ID NO: 379616 - DNA, 435 bp, Homo Sapiens
  misc_feature (415)..(415): n is a, c, g, or t
agataacctttgaagaaggtaaccaagcaggagggagaaggccctacatggcaatggtaacatcatctcaaagccaaggaaatgggcatgttgtttatatcgccacaggattttttttgtgtgcaatagtctacctttttctttccaaagtctatcatactatggcaaaagatgtagtcattcaatagagttatgcaattctagctttccatcaattacaaaaaatatgactatctaccttgattaattgggattgttatacaaacagccctgcagtaggtaaacgtccagtgtgtgggcagtggggggcatatgtttgtcatatccattaggggggagcacttgggggcccagagggacttgatggatttgggcccacattgtctttacttacacagctgtccatagcttcttntgataggcaggtgatagttc

SEQ ID NO: 379617 - DNA, 516 bp, Homo Sapiens
  misc_feature (20)..(20): n is a, c, g, or t
  misc_feature (31)..(31): n is a, c, g, or t
  misc_feature (106)..(106): n is a, c, g, or t
  misc_feature (470)..(470): n is a, c, g, or t
  misc_feature (491)..(491): n is a, c, g, or t
  misc_feature (506)..(506): n is a, c, g, or t
aaagataaaagcccggatgnaacttcagggnctaaggaatatgagagtttaatggaaaccaaaaattctggctctgattcaccttataaagcaaagcttcagcganttagccaaagatcttctaaaacaagtacaagttcaagacagtggctcatgggcaaacaataaagtgtctgctttggatcggaccctaggagagatcactagaatactggaaaaagagaatgtggcagatcagattgcatttcaagctgctggtggattaacagcccttgaacacatccttcaagcagtagtcccagccacaaatgtgaacacagttttaaggaattcctcctaagtctctctggcaatgcaattcaatgtttacaaccttcacctggcaattaactgtttcaggaaaacttgcagtgattgttctgtttaggtaacaaggtttaccttcttaatggggcctcctgattacaccngtttgacgggttatgtttccnggtggaaattattantttttggggg

SEQ ID NO: 379618 - DNA, 459 bp, Homo Sapiens
  misc_feature (17)..(17): n is a, c, g, or t
  misc_feature (31)..(31): n is a, c, g, or t
  misc_feature (45)..(45): n is a, c, g, or t
  misc_feature (58)..(58): n is a, c, g, or t
gtaccccttggcctggnccccctaaaaaagnggggtctttccctnaaaagctggggantttaaggggtccctttttggcaagccctttctggaacaggggaacacctgtttacctaaacaagcaaccctatctctcccaacccagtaacccccatttcccggcaaaaccgcattaagtgcctttcccccaccctccccatgttccttaataccctggaaaacttaactcatttctttaccctccaaaatataaaatctctggttcattaactgggtcagtctttttagaacttttttctccccaaagaaatatagtactgaggcattaaaacaggagtaactggaagatcagctatttcccaagcagcttccatagctaagagcagtctgcaagtatatgtaccaattacaaaatgaaagttataatctaccggatttaaaatcgtaatttctattctg

SEQ ID NO: 379619 - DNA, 524 bp, Homo Sapiens
  misc_feature (151)..(171): n is a, c, g, or t
  misc_feature (416)..(416): n is a, c, g, or t
  misc_feature (496)..(496): n is a, c, g, or t
tcatgtttaatagaaatcaaactgacttgtgttttaaaatacaagttgtctgctagtaaagttacatgatttaggtgtgttttaggttttctgcaacaattagctgtgaacccctaatgtagctaagtttatacaaattttataatcaaannnnnnnnnnnnnnnnnnnnnagagtatgtcaaaaacatatagtgtttgctttgtgaaatacatttgcttagagttataaaatatactgtgactcagaaattgtaaagtcagtttgcgttgtaaaaatgaatactaccagcatgtcaaaaggaaaaataatttacatttgtaatataaagtaaaattgtatttaatatatttattggaattttaaatttgcactaacttggaaaactttaaggggtattactaaatttaatggttnatgtggggcccccatacctatttgggccccaaaagtccttgggttggggtatggggtttgtgtggggtttccctcccaanggttattttggaggccggacccgccttt

SEQ ID NO: 379620 - DNA, 375 bp, Homo Sapiens
acgtgagccaatgtgcctggcctattcccttctctctttatgctaccacaaataattaccttctgtttattgtaagtgatgcatgtctaacaatttgtacaatacattttgaatatatttttccttccattattgtcttttcccaagaccatagggttgccttctctacatttgttctcttagaattcagctcccttttccctataatcttctaatgtaggaatatttaataggaatgccagaacgtcactcagtggggtactacttacctcttatttttcaacttttcagtttcttaagtttaggcgttttttggaatatggtaaagtggaatgtatggcgggatacattaattcgtttttataaaattttaaa

SEQ ID NO: 379621 - DNA, 407 bp, Homo Sapiens
  misc_feature (38)..(38): n is a, c, g, or t
agattaacagacgtgaagcccaaggggcccggcccaancccctcccccctttaaggctacccacaaataattacccttctgtttaattgtaagtgatgccatgtcctaacaatttgtacaatacattttgaatatatttttccttcccattattgtcttttcccaagaccatagggttgccttctctacatttgttctcttagaattcagctcccttttccctataatcttctaatgtagaatatttaatagaatgccagaacgtcactcagtgggtactactacctcttatttttcaacttttcagtttcttaagtttagcgttttttgaatatgtaaagtgaatgtatgcgatacattaagtcgatttataaatttaaaattctgtcatgtctacttaaaaaaaa

SEQ ID NO: 379622 - DNA, 417 bp, Homo Sapiens
  misc_feature (126)..(151): n is a, c, g, or t
ctgtaaaaaattcagaaacgaatgcagaatagcataagaatatatgaaagtctctattagaagttaaaattaatagggatagtatcaatctcttagaattcaaacatgtgtgttcacaatgtggcnnnnnnnnnnnnnnnnnnnnnnnnnncatctcttcatatcaattatctctttcttattactttagcatacatttcaaatatcccactgagctttgttctaagttcaaagtggtattcaatcactttttactaatgtttctatgacctcttaatggggatagtgacaatggaaaataatgctatttaaaatgaaaggatatgtacactactatagggtgtgtaattgggtgaacccagtgactgggagggttgtgagtccctactttaggtggcacccaggcaggttatgtcc

SEQ ID NO: 379623 - DNA, 422 bp, Homo Sapiens
acctacacaaatccattatattttaagagatgctcaatttgcatcctttaagtttctcatgcttccccttctccacttcttaaattcttaaaaagctataaactgcataagttcgaggaacttaggtcgtccataatattgctaatgaccagccttaaactagacaaccactgaagaacctggcctatgagctgagaaacttgggttcttttatggctggccattaacgacaagtggggctgtaccactgtgctggtcacttgaagttctctgagtcacctgaaaatgagggagtaattggagccaaaagaggtctgttcgtcatagggcagccaatctaggaattctaggaatcctccaaatttagtttaatattcacatactatactggggttacttcaaaacagtgttcatctgggctg

SEQ ID NO: 379624 - DNA, 507 bp, Homo Sapiens
  misc_feature (359)..(359): n is a, c, g, or t
  misc_feature (430)..(430): n is a, c, g, or t
  misc_feature (441)..(441): n is a, c, g, or t
  misc_feature (461)..(461): n is a, c, g, or t
  misc_feature (493)..(493): n is a, c, g, or t
tcacaatcaccaatttagaaaaacataaaaatatttgcaggccatatttatttatgtttatataactgcatactttaaaaaaaagcagcaagtgcagtcttggtaactaaggtctcactctccagttagaaaaacagaaaaagcactattgtttctagatttaactctgagcctcttaagttttgttgtgggggaaaacactttttaagctaggggtcattccccgttccctggactaggcttttccacccactcaaattatcaaatgtgggttttgtctcaggagtgtgcctgttaatattgtatactttaaaacaagagatcccctgctgaattccggtgtgggacatataggggancatgagggacacagagggtgggggctcctctttacccacttacttttggaggcaccaggattttcataggnccattttatcnttcttggggaggggcaaccnaggttttaggctttcctttggggggaaggggntgccccccgggtta

SEQ ID NO: 379625 - DNA, 507 bp, Homo Sapiens
  misc_feature (55)..(55): n is a, c, g, or t
aaatgggctaatgtaatggcccacccagtaataatttcaaaggtgaacgagttangtttcccaaaaagtgccataccttagactcaaaaggaccagagccaagtacctttgtcccagggcagctgtaatgcctcctcaaatttcaccagttgggttttgagaatgccatttgttctttctgccaataaggaagattgggagataagccacaaggaaagggttgaaatatggggccaatccttggcaaatttgctctttcctcatggcccagtgaggtgcatttcctcagtcaccatataagtctgagggtttgccccatgtaggataaccttttctaacaacagctttgaaaccgctgaggtagtggcctgtcaacaagagagtgcgtctacccaaacggaaaacacaaaccatggtttataaccttgatagggaggtagctggatgaaattcactggccaaatctcaaagagtccattaggcagatcgaagtgacctggaattgtc

SEQ ID NO: 379626 - DNA, 359 bp, Homo Sapiens
  misc_feature (22)..(22): n is a, c, g, or t
  misc_feature (38)..(38): n is a, c, g, or t
acttgcaggaaatgcccgaccnaatgtcaggtggctgnccataacgtgtataagaagctctctcaagcaacatgtggtgctaggtgatgaaggctctgcagcctgcaagttcagcaaggggcccctggataagaggaatcccacttcacttggagaagtggccctggtgacatccctatcaccagctcctcgctatttgctaagggaagcacctccacttggacagggctgagggctaggtctgggcaaaaaactcccgtcttgcctctcccagcatggagatggccagctggctgcacacctttaggtagaacagcaaaaggttcagttgctgctgcctcgaatccgtttcagagtga

SEQ ID NO: 379627 - DNA, 434 bp, Homo Sapiens
  misc_feature (21)..(21): n is a, c, g, or t
agggcctatccggtatccccnagatatccggggggatgtaaattttaaccccccgtgagacacatttaaatatgtatccaggccctacataattttggtagtccaggcaacattaagttaattaaatacagaacaataaagtgatccctcccaacatacccagtgagaatgaaaacctgtcaaccttgggaaaataatttgatattatcctagttatttgcctacatggacacacccatattaccccaggaatgaaacaccctggatatatgccagaggggagttttgcatatgcatatcaataaatatgtgagaatgttcaaaatagtgttatttgtaacaaacactggaaacaatccagttgtctgtcaaaactggaattattaattaaattgaggtatacttgtttaatacaatgtatatcaacatcctta

SEQ ID NO: 379628 - DNA, 432 bp, Homo Sapiens
  misc_feature (25)..(25): n is a, c, g, or t
  misc_feature (36)..(36): n is a, c, g, or t
  misc_feature (92)..(92): n is a, c, g, or t
  misc_feature (400)..(400): n is a, c, g, or t
gcggggtggcgaatcccctggctgncccggcgctcngccctcgggggaagggacgggacgcctcgcgacgggccgcgggacgcacccagcgnaagtgggtcccttgggaatctccccccatggtaattcccacatgagattaaatttttaaagcgcctcatactcgtgaccatctagcaaccattcagtggctgaatcctcagacaggcactctgcatccccagcagcctaggggcatgccatatgcccccacataaagatttgttgaatgaatgaaggtgtctaactccattgtcttgccctattaaagatgtatactttctctgcctagaccattatggtaataccctgaccttcctcatgatctttgcactcaattctcaactctgtgccctattgnaatggtactgaaatgcaaattcagttacagtg

SEQ ID NO: 379629 - DNA, 484 bp, Homo Sapiens
  misc_feature (17)..(17): n is a, c, g, or t
  misc_feature (30)..(30): n is a, c, g, or t
  misc_feature (36)..(36): n is a, c, g, or t
  misc_feature (97)..(97): n is a, c, g, or t
  misc_feature (113)..(113): n is a, c, g, or t
gagcccccaacggcacncggaacccaaaangtcccncccggtttttggaatgaagaccggcctacaacccgcgaagggagtccacctggccctacanttaaaagaacctaccngagaaagagaaatcctcccggggtagttaccttccccaaagcccaatgtgttatccctttaataaaacacttggactcgttccaaaactgaatgtgaaggtaatgggtttaaacttaaagtagaacccagaattcctctaaattttcaccgttcaaattcatattttgtgtagaaaaaatgggagtcatattacttgaatcaggatttataaactcacttgagtcattaaaactattaacatcttgtgaaggcaaaaatgagtatacttggtcatcaggagaagagttcaatttctcaaaagcattctgtattaaggaatccaggtcttcagttagctgcatgtccaaaaatgaatccatttttgaatctt

SEQ ID NO: 379630 - DNA, 530 bp, Homo Sapiens
  misc_feature (26)..(26): n is a, c, g, or t
  misc_feature (42)..(42): n is a, c, g, or t
  misc_feature (61)..(61): n is a, c, g, or t
  misc_feature (167)..(167): n is a, c, g, or t
aaattaaaacaacccgaggttccacnggcacccaaacctacnggagcttcggagaaatganccctcaacgcactcagaatcctaaaagttcctttcctgtttttgattgaagactgcctacaacctgccgatggagtccacttgcctacattttaaagaactactgnagaagagaatccttcccgggtagttactttcccaaagcccaatgtgttatcctttataaaacacttggactcgttcaaaactgaatgtgaaggtaatgggtttaaacttaaagtagaaccagaattctctaaattttcaccgttcaaattcatattttgtgtagaaaaaatgggagtcatattacttgaatcaggatttataaactcacttgagtcattaaaactattaacatcttgtgaaggcaaaaatgagtatacttggtcatcaggagaagagttcaatttctcaaaagcattctgtattaaggaatcccaggtcttcagttagctgcatgtccaaaaatgaatccatttttgaatctt

SEQ ID NO: 379631 - DNA, 615 bp, Homo Sapiens
  misc_feature (15)..(15): n is a, c, g, or t
  misc_feature (41)..(41): n is a, c, g, or t
  misc_feature (68)..(68): n is a, c, g, or t
  misc_feature (89)..(89): n is a, c, g, or t
  misc_feature (115)..(115): n is a, c, g, or t
  misc_feature (161)..(161): n is a, c, g, or t
  misc_feature (190)..(190): n is a, c, g, or t
  misc_feature (213)..(229): n is a, c, g, or t
  misc_feature (510)..(510): n is a, c, g, or t
ggggatataattccntcaaagacctgtattaggctacaggnacctctcaagacagcaatagatgctanagggtggtggaagtttatctncagtgtgctaaggaaaataccaccancacaaaattttatatcccagtgaaaatatcattccagaatggaggnaatgtagattctcatctattactacattnacaaacaaagacatttctgcacnnnnnnnnnnnnnnnnnctccaaagagtttcccaccagtagaccgcatgaaaggaacttctagaggaagtacaagatgatggatccccaaatgggcagaagatacaagaaaaaacgtttcacaaagaatatgtgaatatgtagacatatctaaatgaaccatgatcataacatagaataatgtcttatgtgtttaaaagtctattagattaaatttcaaaaataaactgatgagggaccagtggaattaaaattgttccaatgccctggtattgcccagaaggagtagtaaacatgtnctaagttttatactcaagaaaataaggcataactatatttgtttcctaaaaaggcaattctttatattgacaaaaatgaagaagaattttcttctacagaacaaa

SEQ ID NO: 379632 - DNA, 466 bp, Homo Sapiens
  misc_feature (16)..(16): n is a, c, g, or t
  misc_feature (35)..(35): n is a, c, g, or t
  misc_feature (40)..(40): n is a, c, g, or t
acaactcctgctggantcctctgggtaaccaatgnaattnagggcccttcctctttgggccctaaccactggaggggagctgtcggaaagctgctgctgggacctgcagtcaccactaaatggtcccacacctgtaagaggactcacaagtaagatggtgtggatttaagctctgcaggccctagaatctccagaaagcttctgctccagattctgaatctttaacatgcaccaggtttttaattcatccaccaaggatatctgtcgtttctccccctcatgcttctctgtgtctgagtgctgttgcaggcggttcaggcactccgtcctctctgcagaaagtcgctcaaccatcagcttgtccaaaacacgcatctgcatcactttcccatccttgccccggtacaatgtgtagagctgatacgccctgaactcatggggtgggggtggggatgaacaccgatgc

SEQ ID NO: 379633 - DNA, 493 bp, Homo Sapiens
  misc_feature (403)..(403): n is a, c, g, or t
  misc_feature (419)..(419): n is a, c, g, or t
  misc_feature (454)..(454): n is a, c, g, or t
  misc_feature (468)..(468): n is a, c, g, or t
cttcagaggcttcccattggctttccccaccatgataactcaagaccaaggaccctgagcttcttaccaatgtggagattgctccagctgcccaatatgtactcccaattatgcactcaggaactaagaaaatgactactggatgggtcagtgtattcctggacccactgtaagctggacattatccaggactctgcttattacctgatccccataagcccccacacttagagaggagccatgtgtattacatactttgggtaacacctgtgaaatgtctgggtattcctctttcctcaacataaaattcagtcaaggaaaatgggccgtggggacacaggaccaaaggagtaattcatttaatttacagtaaatattttgttttcagtatttgcagggtttnttcttttattaggggnccccaacaacctttttaaggtcaaccaggtttttnttggggtttcagtnttgaaggtaggggttccagggtttt

SEQ ID NO: 379634 - DNA, 458 bp, Homo Sapiens
  misc_feature (39)..(39): n is a, c, g, or t
  misc_feature (46)..(46): n is a, c, g, or t
  misc_feature (86)..(86): n is a, c, g, or t
gggtggtaagccaaaagttgtaatgaatccctccaatanaacgggnactaaacacccttcaatgttgtccttaaacactgaacttnctgcaagcatcctaaaatagcacacgcttcgagcgaaagaccacagcccgtgtgccaatgcccatttcaattgctctgcaccagctctgcctcgtttcaggctatgtgactttgggacagtgacttctcctctatgtgcttcagtttcttaattgttctgagtacttccttcaggaagccttcttggacctcttatgtctaggttagggcctttccctgtgtccccatgacactccatacttcacccagcacaacacttaccacacagttttatggatgtctggtacctgttttccccaacactagactatcacagtaggatccacaggcatcaatcttggtctctacttatgtgccattcattgaaaaaga

SEQ ID NO: 379635 - DNA, 414 bp, Homo Sapiens
  misc_feature (12)..(12): n is a, c, g, or t
tcaatgttgaancagcagaagggcgatctgctgcaaccttgccccaggtcccatcagcagctgcttgaatacaatgcttgagctgcggaaagccctggccagcggctcagggggctccagttccccagtgtagtccagccagctctccaacacatccaactccttctcaatggagtccatcctgtgcgtaacttcatcctgaagagattccacatgggtcagcaggttaaactgccactggtgctgggagctcagcagcccctctccacctctgtccagcagcttccgagcaggggcttcttctggtagggcctttttggagacatattccttcacctttggggagccgggtttggggtcactgtcccccttgctcctgtcttggtctagaggccagcccaggcgcggggaaag

SEQ ID NO: 379636 - DNA, 392 bp, Homo Sapiens
  misc_feature (300)..(300): n is a, c, g, or t
  misc_feature (336)..(336): n is a, c, g, or t
  misc_feature (360)..(360): n is a, c, g, or t
gtttaatctcataacacatactgcaaaagactggcaagtatgatagtaaaagtgattctctgaaaattagtgggcatttcaaactaaaaattattttttaaagtgtactggagataaaactggagaaataaagtactgaaactttattggaaagtgcatttaacatgagtaaaaatacatggttaatactaaagcatccaattatgttggatacttttttgtaaaactagtaactaccctagagaaaagaaagacatttttaactgtaaaatacattcattttttctttgatccaataantatttattgagtgtctactatatgccaaagcattgnacaaaaacacactgcttaacctcngggagtttatgggactttttggggaggccagt

SEQ ID NO: 379637 - DNA, 161 bp, Homo Sapiens
gcatgaaagcctacgctttctggcagagttctgaagatgccgggacaggtgaccccatggcggaagacaggggctatgggaatgacttccccatcgaagacatgatccccaccctgaaggccgccatccgagccgtcagaattctacaattccgtctctat

SEQ ID NO: 379638 - DNA, 389 bp, Homo Sapiens
  misc_feature (34)..(34): n is a, c, g, or t
  misc_feature (318)..(318): n is a, c, g, or t
  misc_feature (322)..(322): n is a, c, g, or t
ttagggttttaaacccatggagattccctaaacnacaatgaaagtcgttatgcctgaaagaggaaaaaggttcctgacccacttttcattttaaaaacattaagaacttaaaaggaacaaagggaggggaaagacaagaagtacgatgcccagcatcccttaaattattgtaaagtatgtttaggacatccatcaggagtcctgcataaatttaattcaatttcccaccatcgtcccacactacaggatccacacagagtagctaatttaacatttgtttaccaaatattaatatatataaatttcaggctgggcacnaagngcacgcctgtaaccccagcactttgggagccaaggcaggcagatcacttgagctcaggagcagcctg

SEQ ID NO: 379639 - DNA, 561 bp, Homo Sapiens
  misc_feature (13)..(13): n is a, c, g, or t
  misc_feature (31)..(31): n is a, c, g, or t
  misc_feature (92)..(92): n is a, c, g, or t
  misc_feature (368)..(434): n is a, c, g, or t
  misc_feature (479)..(479): n is a, c, g, or t
caactggtggtanccagggttccgtttgctnaagtaaaaacactgattttaaaacccaagtgggtacctttgtatggtggcacaagtggccnaatcaggctgaggaatcctacggcttggtccccaactgtgcagctgactcctgtgaaactgggccaagccacactactctctaggcctcaggggtcaaggagctcagaggagggccctgaggtctctttccggtgggtatgttcattcttcaactgttcttatgtcacagagggctccttgctggtgggcagtgggttgtaaatactttttaaaaaacactaagttccttatctcagatgctgttctactggagaagttctagattcccactgtcnnnnnnnnnnnnnnnnnnnnnnnnnnnnnnnnnnnnnnnnnnnnnnnnnnnnnnnnnnnnnnnnnnngcctgggcactgtggctcactccctgtaatctcagaactttgggnaggtctgaggcaggtggatgcacttgagactcaggagtcttgagaaccagtcctgggcaacatggtgaaacccagtttctac

SEQ ID NO: 379640 - DNA, 423 bp, Homo Sapiens
  misc_feature (12)..(12): n is a, c, g, or t
  misc_feature (69)..(69): n is a, c, g, or t
  misc_feature (90)..(90): n is a, c, g, or t
  misc_feature (136)..(136): n is a, c, g, or t
  misc_feature (171)..(171): n is a, c, g, or t
aaactcgtccgnctgcctgaaggcccaatggctcccatcctcaacctcctgactcccagaaaataaaangccctgaaaacctccccccanaacctgcaatctgtcgggcactcttcctcgttcaactccctgtaanccctttgggactttgcggtcccctaagtagaaaantccctatgggcctgtctccctgggggcctctgtctgctggtggtctgcttaccacagaatcctaaggggcaggagtgcctgggcatgtgtctgtgggagccttgcagtcagttgtgtttggacaagtgcaacagtcaggctgctgattcctgtggcatgcaggctgtagaggttgacaaatggaggggggtgttgagggtgagccctagttgattttttaaaatttaaactctggtaagaacatttaatatg

SEQ ID NO: 379641 - DNA, 795 bp, Homo Sapiens
  misc_feature (46)..(46): n is a, c, g, or t
acagtttgtttaaagcaatatgttttgggcccttgtgatcacctgnctgtcacaagtagagtgaaaggggtaagggggtgggagggtaagagttttgacaagttgtggcaaaggaaactatacttttcatttttaaaaatgtaaatagaaaagtttttaacggttttatatagatttcactataaataagcattttaagactgacaaatgttgaactgtacatacatttatcagcataactgcccagtttttttggtgctgaagtactgtaagtagaattcatcaacggtctcctaatttttgcatctacatctggggggaaaaagctgtgatactatagttaataaattcccactagagtgacactgaagatttaaacacaagcattcataagatgcgctgatctctggtggttgtcactagttctgctaggtgataatgatttacccatagatggagctgttggatattattttattgtacaaattcatgtttaaaaaactttgtgactgtttctagttaagtaattttttaacctttcttgggtcatagacttctttggtaaactatgaactctcaccaaaaagatacacatgcaacatgttaaatacatgttagactttgcatacaattttaggggctcatgggcctctaagcctatccatgtattccaggttaagccctctgttatgatcaatccattacttacagattaagtttttataaaataaagtatcttttaaatattcatggatcaagtaacaagagcaaacttgaataaagttatgttctaca

SEQ ID NO: 379642 - DNA, 407 bp, Homo Sapiens
  misc_feature (14)..(14): n is a, c, g, or t
  misc_feature (34)..(34): n is a, c, g, or t
  misc_feature (85)..(85): n is a, c, g, or t
gagccccaaagaanaacctgccagaaaattgganaagtttatgttttaaaaaaaatgactgtggataaatttcaggattatttgncacatttagggtacctacgagtttataaaggcccaagatggtgtgaaattggtcccttttacttttatatttttgcttgaatcttaactctggaaatcacctgatgtagaagaagactgtgatgagctcgtctgtggaacatcacaagtatcgaaaatacagtaatggatgtttcctttctaatccacatttattgtttcttttgaaatcacgtctaaaaaatatgactcagactatagccgttgtttcccaaacttcagtctctttagtactacttgtattatttccttaatatttatcttttaaattttaaagttttttt

SEQ ID NO: 379643 - DNA, 415 bp, Homo Sapiens
  misc_feature (17)..(17): n is a, c, g, or t
  misc_feature (24)..(24): n is a, c, g, or t
ccttgattttggcccancaatggnaaggggggataaaaacttgccatccccaattggtacaccccttgcaaaatcctttcccctgatgttgggagaaaatgggcccagtgagatcatggatatagaagtacagtcaatgttcagctgtaccctccccacaatccccacttccttcctcaacacaattcaaacaaatagactcagactgtttcaggcccccaggacaggaagtgcagtgtagggcaaaattgcaaaaattgagggcacaggggtggagatgggggggttgaataacaagctgtgctaaataattacgtgtaaatatattttttcatttttaaaaattgatttcttttgcacattccatgacaatatatgtcacatttttaaaataaatgcaaagaagcatacatcc

SEQ ID NO: 379644 - DNA, 388 bp, Homo Sapiens
  misc_feature (21)..(21): n is a, c, g, or t
  misc_feature (64)..(64): n is a, c, g, or t
  misc_feature (378)..(378): n is a, c, g, or t
cctgtgaatctcttgttaatntcttgatcataaaagcctccttatgaacatacatattcccgancttaaatccttgtttgagtcaaaatcatttttactcaagagggaacaattatattaatctagatttcccctggtaaatccataacatacagacctgaagttcaagcagaacctgaggtaatgtgagccctgggtaaggtatagtaaggatggagaggtaggtaaagaaaggcgagaatgattcatttattgagaaagatgagcaaggtggtcaaatagatttgcttctcaacaaagcgtgtagtttaagctacttagttttggtttcttttgaagctgccttccctttttcccatctctctattccaacataanagaaaaaaaa

SEQ ID NO: 379645 - DNA, 373 bp, Homo Sapiens
gagacccacccccggggcaatggtagcaaagacactgtctctgcaaaaaaaattaaaaggatacctgagagctcactttaatatcaagggtatttgcatccattccccaccctgttagctcttaagggaggagggaaatcaattccaaccatacttccctgtgatggaagatgtttcctcttgaaaaaatgccaatacagatttttaaaacctattgttttccaaatgcactttgtaagtttttgcttttaaaatagcttcttggaaccaattttattgtatttgtacttaatttttgttatcatctaaatgtgcattttctgactgtatagaagaagctttggtatgtaatttaataataaattagaaatct

SEQ ID NO: 379646 - DNA, 479 bp, Homo Sapiens
  misc_feature (410)..(418): n is a, c, g, or t
cgtcatttgcatttgaatgtaaggctcagtaaatgacagaactatttttcattatgggtaactggggaataaatgggtcactggagtaggaatagaagtgcaagctggaaaggcaaaaatgagaaagaaaaaggcaggccctttgtgtcctacccgttttcagtgctgtgtgatcatattgtccctcacagcaaaaaagaatgcaagggcataatgttagctgtgaacatgcccagggttgcattcacattcccgggtacccagtgctgatggggtgtgcccacgtggggacatgtccttggcgtgcttcctcagagtggcttttcctccattaatacatatatgagtactgaaaaattaagttgcatagctgctttgcagtggtttcagaggcagatctgagaagattnnnnnnnnntctcaaatgtatcagctttttttaaaggacattactagaaaattaaacagtattttttaac

SEQ ID NO: 379647 - DNA, 520 bp, Homo Sapiens
  misc_feature (20)..(20): n is a, c, g, or t
  misc_feature (97)..(97): n is a, c, g, or t
  misc_feature (227)..(227): n is a, c, g, or t
ggaggaccatccaggatccnttggcgtggatcaagcttgtgtacttgacccgtttttatattactttggtaaatattctggtccacattctactccngctttggatgtggttacccgagtatctgtaacccttgaatttctagacagtattgccacctctggccaaatatgcactttccctagaaagcccatattcccagcagtgaaacttgtgcttatagtgtatncccacctgtacatacattgtataggccatctgtaaatatcccagagaacaatcactattcttaagcactttgaaaatatttctatgtaaattattgtaaactttttcaatggttgggacaatggcaataggacaaaacgggttactaagatgaaattgccaaaaaaatttataaactaattttgtacggtatgaatgatatctttgacctcaatggaggtttgcaaagaccgagtgttcaaacttacttgtacattttttttcaagtgctaaaaaattaaacccaagcagctt

SEQ ID NO: 379648 - DNA, 386 bp, Homo Sapiens
aatgccttccctctggaaatgtgaagtcccaaagagttacccaacgctgcccctcctagtgaatctcagctcaagcatatggcactaaccgtgtgtttaacagggctgagtaagtgcctgccagtgtgaagtgaaatggaaggccctcgaggtgtttgtggctggccaccctgatcagcctgcaggtagtcccgatgaagccagggcacagggggattcgttccagcttgttcactttattctgccttgccaggttactgaaagtcccttcggtttgctctcaccagccttcctggaaatgtggactcttgaaagaaaagctcccggtgctcttgaagtatacctgcttgccaggggagtccaagaaaattttgacatgtattttt

SEQ ID NO: 379649 - DNA, 460 bp, Homo Sapiens
ggagcagagccagaggaccaacttgtagaggacatgacccattaagagacatcaacttcgcaacaaatataagacaaggataccaaggatcccccatgtgatgccagcctaggtttttatacccctccaacaaatggtgagcaggagacttttttggaaataattagttgtgaaattcccatttttctgacagccccttaaatttgaagttatttcatttgtagttaaggttatcacatccctgccaattttactagattttttcagagacaagcattcagcatggcattagtaatgatggtttaaactaggtgcagaactgtcccatgaagagaagaatgatatcagtatttaaataataaaagaagagacaatgtatggtttatagtgattcattttaagattgcttgtattttgattttgtggtttaaaataaatgcattaaggatcttttaagtta

SEQ ID NO: 379650 - DNA, 130 bp, Homo Sapiens
gacaatattcttaagtataaagaacatataatagttggaaaaatcttatgagcagaaatattttaggggatattttgttatatattcagtatttctataaatgttttcaaaatatacaaaattttgaatg

SEQ ID NO: 379651 - DNA, 471 bp, Homo Sapiens
  misc_feature (25)..(25): n is a, c, g, or t
ttggttggctggctcccctggcatnaagtggtttggtttaagctccagagggtcttattgccattgtcttttcctctgcccccttgagccagcctaaggcccctggagtctgtttctttagggcgggatgaactgacatgctcctacccatgacccaggctctgggcaaggctcctcacagtatccttgagaggtgggcatggaagtgcccatttctcaggtacagaaaccttcagagaggataaatagcttgccctgtagaagcaggactgaaacccttgtccgcctgactcccccagctactctgcccactgtagccccctgccttactgtcctggcacacccctcaccatcctgtataccttaaatatcaaagagggcaagagagaaagggctttaaagataagttatttttttaaggaacctttaatattatttttaagaagtaaccaaattagtgacgtgaaatgc

SEQ ID NO: 379652 - DNA, 367 bp, Homo Sapiens
aaaagtcccctgtcacatgcctaggcactaggggaagaagattcggtttcctacatttgggaaaccttagtggaacctagaagagaccagaagccaagattaccagatgagttagagcccccccaaggaaacaaacccaggtgatgtgggagagagtaactgggtcaggtgactttttaagggagtctgagctctggcactttttcctaagacctgaaggatgagaaggaaacagccttgtgaaaatgattaaatgagctagtatctataaaacatgacagctaatgcctgtcatgtgcaaaaaatggttaactattctaactccgaaaggaattaaacattgttttgcgcttttctcctagtccat

SEQ ID NO: 379653 - DNA, 422 bp, Homo Sapiens
  misc_feature (11)..(11): n is a, c, g, or t
  misc_feature (40)..(40): n is a, c, g, or t
tgggataaacnccccacctcagcactgaataaaaaacatnccgtgtccacaatacccccagttttggggcctttaaaaaaccgtcctaggtgtccccctcacatgcccttgtcctataataaggaaagcaagcagtagttggggtattgttagcttttgaaacaaaagcccctactggtcttctaattttggatattttaattaaagaatatctggacagtacaaagtgaattattaaaaaaccatttgtaactacctagattcaatcaggatttccttgatttgtgcaaagtaaaatattacaataaatttgatactgctacttgtataaaaacctatggtttaaaatgtgggggttcatcataatagtctcattgttagcatatcctaataaagaatttgaactaataaatcctattaat

SEQ ID NO: 379654 - DNA, 312 bp, Homo Sapiens
ttattccacccttgtatttaatacctatagctctgtcaatatcacatgaggcagtttttcaaatacgtataaacagaggttgcttattattaaaggaaagacaaagtgggactctttatgatgtcatgacccatgataactaagcacctaagaaaattatttaaaatagttatgtggtaggcagaaagacaaataatttagttttttacttttcaccagcatgtatcttagctaccttaaactgaaacatgggaggctgggcttaattcaaaatatattgctccaaggcaaataaaaaaatgctttatctat

SEQ ID NO: 379655 - DNA, 569 bp, Homo Sapiens
  misc_feature (24)..(24): n is a, c, g, or t
  misc_feature (37)..(37): n is a, c, g, or t
  misc_feature (63)..(63): n is a, c, g, or t
  misc_feature (150)..(150): n is a, c, g, or t
  misc_feature (292)..(292): n is a, c, g, or t
ggcccttacctcccaacctgagantaggtgaatgtgnttgctctggctgaaaacagactgaancgggtatacagagctggaaggggaccagggaaaacatcggataaccatgcatcctcttgcttggccaacctcctgaaaactgctccnacctttgaaagtttgaaactttagtccctccaaactctgactgctgcctccttcctcccagctctctcactgagttatcttcactgtacctgttccagcatatccccactatctctctttctcctgatctgtgctgtcttantctcctccttaggcttcctattacctgggattccatgattcattccttcagaccctctcctgccagtatgctaaaccctccctctctctttcttatcccgctgtcccattggcccagcctggatgaatctatcaataaaacaactagagaatggtggtcagtgagacactatagaattactaaggagaagatgcctctggagtttggatcgggtgttacaggtacaagtaggtatgttgcagaggaaaataaatatcaaactgtatactaaaattac

SEQ ID NO: 379656 - DNA, 624 bp, Homo Sapiens
agcaaagccaggacctgggtcttccagcttctagctcagtggcatttctgctgccccacaccaggactatccttcgtatacaggtatgaacctaaagccttcagtgtttcaatgaaaagttcacccaaggtctttctgttcagtaagtctagagctaagggctcctggcactctgttcagtcctttcgctggtaaaccacgctgccctccgttgctctgggcagaatgtcaaaccttcttatgtttttaaaatttataaatcaagcactcttatttaatattactgacagcccgaaggcagacgctcccactctcctggggaagagggtcttctaatctgccatcttaaggaggtaaaagggcttgattgggtaactcattgcaatgggcacgtatttattactgtctcccggccttttctcatgctgtttgtctgctggaattaccactagtgccaggccatttgaatatttgaccatttgtcttagaattctctgaatacaaatgtttttcatacctttactatgtactttttaagaatgaagactatgttgcatgttggtttgtactctctcctgcacataaaaaatgcttagtaaatagatacacaaatgttaaaaaaaa

SEQ ID NO: 379657 - DNA, 451 bp, Homo Sapiens
  misc_feature (15)..(15): n is a, c, g, or t
  misc_feature (398)..(398): n is a, c, g, or t
ctgtgcccccaacanacaccctgtgtgtggccatgttgaagtttccagtggaaagtccatatacctctgggcctccatagtttaatggcctgccacctgtgggaccatacacccagctacaaggaaggtgaaaggataggaccccgatgaagcctgaaatcacatttattcctaactacttatagccagcatagcactttgttcatgaaggctgagatagtccgctgaggcagtgaggaacttttgaagacgaacaagggatgtgggtgtcaagagagctgctgccaggtgggaaagaccaatttggccacataacccctgtcatctgccatccagatactaaaaggcaaagcaaagtgtaaattgaattttctatgtgacattttaaatagtatttnctgctgcagcctgtgattcagttaacttaccttcagctaagcctcaaaaaaaa

SEQ ID NO: 379658 - DNA, 423 bp, Homo Sapiens
  misc_feature (20)..(20): n is a, c, g, or t
  misc_feature (29)..(29): n is a, c, g, or t
  misc_feature (37)..(37): n is a, c, g, or t
  misc_feature (58)..(58): n is a, c, g, or t
  misc_feature (69)..(69): n is a, c, g, or t
  misc_feature (106)..(106): n is a, c, g, or t
taaataccccaactccttcnaatgccccnaacactgnacaaacatcccacaagccatncaagaattaancccgggaaaatatgacctcaccaaatgaactaaatangggagcagcaattaatccctagagagacagagatatgtgatctttcattcagagaattcaaaatagctgttttgaggactcgcaatgaaattcaagataacacagagaaggatttcagaatgccatcagataagtttaacaaaggaattcaaataattaaaaaagaattatgcagaaattctggagctgaaaactgcaattgaaatactgaagaatgcatcagagtctcttatcagcagaataaatcaggtggaagagataattagtgggcttgaaggcaggctatttggaaatagccaggggagacagaaaaaaaa

SEQ ID NO: 379659 - DNA, 235 bp, Homo Sapiens
  misc_feature (66)..(66): n is a, c, g, or t
  misc_feature (203)..(203): n is a, c, g, or t
tgctaacttgaagggatatactgtatttcaaataagtgtgtgacttaatattttgggatttttttntcctcctttaaaaactggacctgaacacaagctttgagttgatgtttgtaataatctcaggacctgaaagattgtagcatttagtgtgtcttaaaaattatgtactgtaccagccatggatttttgtaaatataccntgtctcccttttttgtattttagtaaaaaaaa

SEQ ID NO: 379660 - DNA, 389 bp, Homo Sapiens
  misc_feature (22)..(22): n is a, c, g, or t
  misc_feature (164)..(164): n is a, c, g, or t
  misc_feature (256)..(256): n is a, c, g, or t
cccccaggttagtgggggaagncagggaagcttcaaaaagtgggaagcatttgacgtcaacttgaaggatgagaacatattttcccaaaaggactagaagtattgtgattattattattcatcctccttccctctacccttgaagggcctcctctaacttgctnggtaactccttcttctctcttgtaaaaatcaaccaaagagactcttctaaatcttcagcccctggaaacaggagatttggttctggcctcanatttaaccctccctgcgcctgctgccccaggagtgcatagactcgccccttgttctggagcaggccaagaatgacccgtttccccaccttgttaagtatgaattggacatttgtacccatgcagtttccttgc

SEQ ID NO: 379661 - DNA, 367 bp, Homo Sapiens
  misc_feature (16)..(16): n is a, c, g, or t
  misc_feature (60)..(60): n is a, c, g, or t
  misc_feature (73)..(73): n is a, c, g, or t
ccgttttaaaaagggnaacaatgtgtcaaaaaacacaacattcccccaaggggccctgcntccccttttcccnatcatccaaaaccccaaccaaactgaacattcccacaagttggttcctgagacagagtcctcagggtcatccccctgcactcaggcctcattttaacattcaacaacttgataaacatttaaagacttcccacatggtgtgctgtaggatctaaactgcattcagaaagagaggacttctttcccattacaattagtgaagtcttcatcttgacaaagaaatgggtactatttcaggtcagagtaaacaatctagcatgtattctaaaagggaaagtgaggccggggagtggtg

SEQ ID NO: 379662 - DNA, 198 bp, Homo Sapiens
aaaccatctcccataacagaacacttagaattattagccatttgctgcaaagtatttgttttaaaatgtctggcatatacaccactaacatttaaatgcccaacattcgggtcatatatgtgaaaaaactagaagaaaagccctgttggagttttgatgtagagtgcaataatacatcaataaaggtattttaaaatg

SEQ ID NO: 379663 - DNA, 418 bp, Homo Sapiens
  misc_feature (44)..(44): n is a, c, g, or t
  misc_feature (54)..(54): n is a, c, g, or t
  misc_feature (216)..(216): n is a, c, g, or t
  misc_feature (224)..(224): n is a, c, g, or t
cgggtggaaaaaaaataaacccgggcattccatgggttttcctncctttaattntgttccgtttgttttggagggagggagcctgttttttgtgtttgtaccatgatccccacccctagttttcctagaatgtgtgttgaaaattgccgattatacaagtaagattttaaaaatgtaacctcaagtgtttgttcaaatcaggtttaatggtgttgncttctctncctataatgggatagagaaaattaaaatcacgtagtacagaagtgcaagaagagaatttatgaaggatgaatagaactacaaacctatctaaatgaaaaagaaatggtggaaactaagcctgaactttaacatataaaaaacacttattcccacagagaaaatgtaaaattaaaaatcatcatctttttttttc

SEQ ID NO: 379664 - DNA, 543 bp, Homo Sapiens
  misc_feature (21)..(21): n is a, c, g, or t
  misc_feature (39)..(39): n is a, c, g, or t
  misc_feature (55)..(55): n is a, c, g, or t
  misc_feature (140)..(140): n is a, c, g, or t
agacctttccaggtggaaagngaaccatactgggtttcngtaggtttttcctcanggcttcatctctatctttactttcccctggaatatgctaccacaaagttctttaattacctaccatactaaagttggcattccangggatatggactgtacatatttatgtatatgtacccatgttgttacatgtaaacaaacttcaatttgaagtgcagctattatgtggtatccatgtgtatcggaccatgtgccatatatcaattatggtcactagaaagtctctttatgatactttttattgtactgtttttcatttcacttgcaaaattttgcagaattcctcctttctacccataaattacatatatttttcttctttagtcatggagaactccccccctcatctcttccctattatctttccctgtgtactggtattattaaaaagacattacatacgcaagtctttctcgacaatcaagaatgttattaatgtgtaatactgagcactttacttcttaataaaaacttgatatagtagca

SEQ ID NO: 379665 - DNA, 391 bp, Homo Sapiens
agtgtgccagcctttgaggaatttccaaagggttgccttggcgtcttttccctgaagacacttcctataaggtatttagaaatctatcaggagtgagaatcagtccagtcagaaaattttaggcatttgggcaactgcattcagaaaacagctatttatttggaatgcataataaaagccatgagactgaatctccatgcctctttgccccctagtagccttcaagaagtctctaaaacagggttaccacagatttagccaggatgatgtgtagcagcttttcttggaacaggttgatggattaaaataactttttttcagctctaatgtttttttcttgaatttgccagtcacatgataattttcttcaaaaataaaactttataattgt

SEQ ID NO: 379666 - DNA, 476 bp, Homo Sapiens
  misc_feature (169)..(169): n is a, c, g, or t
  misc_feature (394)..(394): n is a, c, g, or t
tgtggtatgaggagcagaggatggggctgcgctctcttcggggaattgtcccaaacttagccaagaaggtcaagctggaaaactgtgagaacttcacctttgtctcgttcactcaggtctcccggaggcttggctcccacagctgctgccagtgagcccccactggggncgggccactgccctgtcacctgctcgggccagccagggttggagcagctggagctccttggaggcaggggctgaccaggtgtgacctcccggtctggcggctctcccccgggtgtggcctgccctccctttgacttggggtttgctttttaaaatgaaactagatgagtcttaaatcatttcggatggtttatccaaatgtggcgtcaacttcgttaagcttttnagaatcttaacacaatgtataattgttacatacaagagtgaggaaattcattttctctagtcctttctagcacaggttttct

SEQ ID NO: 379667 - DNA, 414 bp, Homo Sapiens
  misc_feature (91)..(91): n is a, c, g, or t
attaatagctggagcctcaatggagactgtcggagaacctaatttggatagagagaggggtgggagttgcctaaaacccaaactgcccaantgtaaccgtatgagttcctgagaagtttttgcctcccatgacccgctttggcagtctggagaaccctacatacccccttcacagaatagtgtttttaaatgcctagagataaattatattggattataaattatttcaatgacattgaaatagagttgtccccatattaagaaaacaaatttttgataaggaagtattttgctttattattaacacatgaaatgacagggtctagaattactgaaagtagtgatacatacagatgatacttttatatatatttgtgaaaactctaacaagataatctgcaacttctaggtatg

SEQ ID NO: 379668 - DNA, 170 bp, Homo Sapiens
ggctttgcatgttgatataaaatactgtttgtgttaaaaacaaagtgcaagttagtggttagaatggaatctatagaaacgaaatttaatcatcaaaataatggtcaacttgctgttctgaaatcctttttcctaaaatttcccaataaaaattagaaataggaataatc

SEQ ID NO: 379669 - DNA, 347 bp, Homo Sapiens
  misc_feature (17)..(17): n is a, c, g, or t
  misc_feature (24)..(24): n is a, c, g, or t
  misc_feature (45)..(45): n is a, c, g, or t
ccaacgccgaatggggnaagttangggacaacgccttgtccacangaacagacccccagaactgaagaaagaatgccccaatgtccccacaagtaatgaaatggttaaaaagaattgtggttccatcctacattaggaattgaaaaaactttttcctccctaagagcccaaataggaaatgcattgcccctttgagagcccacagactctcttgtcctttgttgccagcctactcggttctcccattatggtggaaaagcagcccactgacaacgtgtaaacaaatgggtgcccactgtgttccaataaaattttatttacagggttggatgtggtggctcacacca

SEQ ID NO: 379670 - DNA, 522 bp, Homo Sapiens
  misc_feature (217)..(360): n is a, c, g, or t
gaaatcttggggtcatccttcctttctgtcaccttctatcttcagtcaccaagtctttctgtctgttagcagctctaaaatctgacccttccttctccttcttactgcctctgctttagtttcttactctataaaatggagataatatatcactgtgtagatgccataatacaaatagcaagctcttatggcactaataattttttaatacatgttnnnnnnnnnnnnnnnnnnnnnnnnnnnnnnnnnnnnnnnnnnnnnnnnnnnnnnnnnnnnnnnnnnnnnnnnnnnnnnnnnnnnnnnnnnnnnnnnnnnnnnnnnnnnnnnnnnnnnnnnnnnnnnnnnnnnnnnnnnnnnnnngcattgtactgagaaccctgtatcgtaccgaggtacgtcatctgtgttcttctgtactctcctattttgggctaaaccaggtcaaactcctatcttagtgtctttgaaatgcatcaaaccctcacggttgtgcacatgtaccctaggacttaaagtataatt

SEQ ID NO: 379671 - DNA, 421 bp, Homo Sapiens
tttaaaagcaaatccccaggttagatatccctcctaccctgtatcccatggctgtctttcaagtcacattacagactcattgtgatgacccatgtagggacaatgtgatttcagaaacatggcctcatttgattttaatgtaaatataaatcagtgaagcagaaaaggagaatctccagaaaaacaagggatgaggctgtacagcaagttaaagtggaatcagaacccaactgtagtccattatttgtttcaatcctgctcttttctaccatatcacccagtttccaaatcgttcagcaaattgccatggtcaatgggattaacctttcccttttattctcaggaaatctcccttgtccattttgcaagactgtgtgattctttctactgttacaaggaataaaagccttcctaaaaaaaa

SEQ ID NO: 379672 - DNA, 333 bp, Homo Sapiens
  misc_feature (16)..(16): n is a, c, g, or t
  misc_feature (21)..(21): n is a, c, g, or t
  misc_feature (49)..(49): n is a, c, g, or t
  misc_feature (232)..(232): n is a, c, g, or t
  misc_feature (245)..(245): n is a, c, g, or t
gcccctaaaattggcnttgcnaaatagtactgaaaagttctgatgaccnccaagacaggttaggaaaatcggtctatagtggggaaaatgttctggtttcaaaataattgaggttaaaactttagccattttaattcccactttagggcagattctcttctgacttgaatttaataacttcatagaattggacattatcaacaaaaatattacttccaccgggtgtgatgcntcaggcctgtaancccagctcttagtgaggcagaggcaggaggatagcttgagccaaggagctcgagaccttcctgggcaatatagcaagaccccattttc

SEQ ID NO: 379673 - DNA, 470 bp, Homo Sapiens
  misc_feature (35)..(35): n is a, c, g, or t
  misc_feature (59)..(59): n is a, c, g, or t
  misc_feature (75)..(75): n is a, c, g, or t
  misc_feature (90)..(90): n is a, c, g, or t
  misc_feature (96)..(96): n is a, c, g, or t
  misc_feature (244)..(244): n is a, c, g, or t
  misc_feature (364)..(364): n is a, c, g, or t
gcccaagttcatgacaggcagagtaatttccccangctttatacatgctgtttgacatncataatttggagatgncttagaataaacatnaatatnctcagctaattagagcaaaattaattggagcccagtgcaagtgaatttgtcatgggcaaaaataattcccccacaaatgtaacagtgattcagattaatgaaaggacaatttcaattctctcataatcagtaggtataagtacttcancccagggagagggaaagttgcaaatttaaactgagatagtgatgtggcatctgtccactttgtaagtaggagcagcccacttagctgttatggcttatctggttgcctgttatgacttancctggttcctatggctgtaaaaggtattttgatataagaaattgacaattattgaagttcttgaactctgaaaagttggaaggattttaaaagttcttaaaaaaaa

SEQ ID NO: 379674 - DNA, 580 bp, Homo Sapiens
  misc_feature (24)..(24): n is a, c, g, or t
  misc_feature (45)..(45): n is a, c, g, or t
  misc_feature (77)..(77): n is a, c, g, or t
  misc_feature (458)..(458): n is a, c, g, or t
aaccccctgctgaggaaaaccccnaactgtgccttcagggaaatnacccaagctctaattgagccacctctcccaanaactccccctcctgctccccccaggctggcatggcctgaggaaaaaaggacacctgaagcacagccccgtgcatgagcggccttgcccatgcaacaggataaaacccccataatgcccacctcagcaaagcccttggttgtaaatcctagtttgattacatttgtaatcaaatgatggcccatttgttctgtttctggtttgtgaacccaactgaagacataagcagggcctcagctaaccccacaaatagcacatgtgtgcaaactggaaaaatgaacccttcttctgggaggacgccagcccaggccaggtcacccggcttggccagcagaacacagagtagattttggtcccgtttgtcccccagtggggtatctatncctttgcagggcacaagcctacatggtggctctggtcatatcattagaaaatagacagaaatgggctgcacaccagaatgaatgaattgaattgaaagggaggagtgatggtggaaaaaaaa

SEQ ID NO: 379675 - DNA, 440 bp, Homo Sapiens
  misc_feature (33)..(33): n is a, c, g, or t
agtgtggggctttgtgtgggtgaactctctggnctccccccaagcctcccctttccctactgttaatatcccttaaaagtgcctctgaagcccaaagcctttgtggcaattgtcaaatgaagtcccatatgcagtgaagtaccgtgttgagggaggacaaggtcacccaagagctgagaatgtttctccgactgatgagacctagatattgggtacatggaggtccccggtccctttgtgattcctgcagcctgttgcctccttgcctggaccccgcctcagctcagaaagccaattccctagattccaaaggccttcccagaccaattagcatgtcctgcagctgtcagctccctgtgcctagcctggacctcagctcatgtctagcacccagtctcccaaccccacacatattcacaaataaaagaaaataacaaatg

SEQ ID NO: 379676 - DNA, 347 bp, Homo Sapiens
  misc_feature (219)..(219): n is a, c, g, or t
  misc_feature (254)..(254): n is a, c, g, or t
  misc_feature (281)..(281): n is a, c, g, or t
agtattcaagagtaagtttatttcctgaaatcttatataccatcttcaatttcaatttttatttgacagatattaaaagctgatcaggaaaaatatttataataaatgaaaagaaagcatacatcataatatatacaaagacttgattttataaaacaaaatataatatagccatattgtatacatcaaaatgtttacagtgataacaagtccttggangggcaaaaatccttgtcttactcatctttatgggncccatattatagcagagtgcttgggcncaggaggtaggatggttaggtaggtgtttattggtaaaatggggaggtggaataatggtatggcct

SEQ ID NO: 379677 - DNA, 410 bp, Homo Sapiens
  misc_feature (146)..(146): n is a, c, g, or t
  misc_feature (187)..(187): n is a, c, g, or t
cccaaaaggccatagtgggctgaccccgggctagggttgtaggctaccttagcattccaactgtataaaaggggaaaaccccaggtcatactccgtgtgccgtgggtggaaaagccggatgtggaatacaggtggtccctgagtcncccaggaaccactgagctcccagctgttcacacccacactnctgcggcgcaagcaactaccctcgcccacggtttagccttggtctagcagcgactttaaccttgaatgttgcatttctgaaaaatttagaatctttaaaggacgttcctccggtgaataaaattaggcgcaattatagaatacatgtattatggccacggtagcaatgactgtattagggctctgctagttcttgtaataaatagacccgaaaagcaaaaaaa

SEQ ID NO: 379678 - DNA, 465 bp, Homo Sapiens
actgttctgtacaaacaaaaagtatgtaatacccattttaaaaaacccatttgaaagtagacaacttatcccaaaatagcaaatgcagaatctctgctcagtgagcttggatgagtggcttaacttctctgggcctttgttcctatctgtaaatgagaaagtttgtagatattgccaagatttcccaggctcaatacagtgtaattattttatgttttaaagatatgaaatctgtttactcaaccaattttttaaatgtcatattgtgataatgctctgcttttgcaaattgtgtttgcatgtcgattagttatatcaaatagttttgtggcatggggtagtggagcttccctccccacccccatatgtatcagtgaagcctttgaaattacttaaggcagtctttcatggaatgttttgattgagcaatgaaataaacagtcctccattttgtttcaaaaaaaa

SEQ ID NO: 379679 - DNA, 476 bp, Homo Sapiens
  misc_feature (22)..(22): n is a, c, g, or t
  misc_feature (56)..(56): n is a, c, g, or t
  misc_feature (64)..(64): n is a, c, g, or t
  misc_feature (70)..(70): n is a, c, g, or t
  misc_feature (91)..(91): n is a, c, g, or t
agcccccaaacgggcctaattnaaaatttaccaaattccattaaattttggggganaagggggncctgcngtgttgtttaggctgggcccngaaccccccggccctcaagcggaccctccgccctggccccctcagtaaattatatagaagagcaccttctgtataatttacctcagtttccttcatcacatatttcccaactgttgcccctaaataggtttaaaaatgtgatcatgttattagaaaatcctttcccattgaatttcagggatgctgaatttcagggagctaaattgttgacccttgcctgtagttgttattggttcagaagtaaattttattgatgctacaagtaaaaaattagatctgacttagtaaactcaaaagttttacaaaactgtattttactatgtagatgtatttctttaaaataggtatggatggatatttttatgaataaataatattgcattat

SEQ ID NO: 379680 - DNA, 383 bp, Homo Sapiens
  misc_feature (23)..(23): n is a, c, g, or t
  misc_feature (36)..(36): n is a, c, g, or t
  misc_feature (334)..(334): n is a, c, g, or t
ggcaaaaaacccccccaagagantcccctatgtgantgagggaaaattttaccctgaatatattgggaaacatttccttgtggttggtccttgttttttaagatgttttgaatttttacaaatgcccttcatttttttcctccctcttatttccttggcccattcttctcatattatattcttccttactcttgtagtgctatactatgggattctaagtaattggccttagaactgcccttctagtatattagattagacagtaactgattcataaccaattcagtttgtcatcatcatgtataaaaatgctgttttaccttgttttctaccntcaaccatctagaacatcaatgaagatatttatatactgtgaaaaaaaa

SEQ ID NO: 379681 - DNA, 406 bp, Homo Sapiens
  misc_feature (12)..(12): n is a, c, g, or t
gacggaaggccnccccccagtgtagttccgaaatgtgtttgacctttgatcccctacaacaatgacatgagggagatattgattaacactttacacaaatacgggatacctatcggagcaaagccctaccagtgtgcagctggcaaaggagtaaggcaaattcagtactcttctgattccttaaatgctgatagttcttgatttatcattccattctacaaaactgagttgctatggaaattactttccatgagtaagcttttcaaatacatgtatatgttgctgtttgctggctgcttttcagttaaatagcattatttataggcctgtaaattgaaaattttgattattatgtatgtcccatgagtagatgtaataaataaagggaaatatttgtttctttaaa

SEQ ID NO: 379682 - DNA, 462 bp, Homo Sapiens
cctccaaaagacctctgccttgtggggaatccagcaaaagcccttaaagaatgggaataacatggccctgtgcaagtgaaggggaccctgggtcctttgccttctgagaatgctcaactgaaagagaggccttctcatccccaagctctccagtcaacacagggctccctgtggtgacaccagtggagatgagggaacgggtagatggtgtgagtgaggggaacttttagagtggaactgggcatgtcctccgcctaccccccgagcctgtatttatttttgtataattctctggatgagggagagtggtcgtgagctggtcttggggcacaattacccagagatatatttattaacagccaacctgtgcaacctgctggagctttatttttaatttaatttatatagagtacctattattatatgccacaatagagctctatgagaaacagtgaaaaaaaa

SEQ ID NO: 379683 - DNA, 460 bp, Homo Sapiens
  misc_feature (16)..(16): n is a, c, g, or t
  misc_feature (25)..(25): n is a, c, g, or t
  misc_feature (43)..(43): n is a, c, g, or t
  misc_feature (49)..(49): n is a, c, g, or t
  misc_feature (69)..(69): n is a, c, g, or t
  misc_feature (153)..(153): n is a, c, g, or t
  misc_feature (167)..(167): n is a, c, g, or t
  misc_feature (172)..(172): n is a, c, g, or t
  misc_feature (201)..(201): n is a, c, g, or t
  misc_feature (238)..(238): n is a, c, g, or t
aagcactgaacctctnaggaaaaanacccggggtccccagcanccccgnaaggggcctccctcatgaantgtttgggggttgaaacacagaccaagagtgacgaagtgaatgtcaccctgtgaactcatggctgggaccttcttgccccctantgtctcagcacaanattantcgacttttccctcaacgtgggtgggcanaggaaaagccctgtggctctggggacttgggatccanagttgaagacccttcagctgctctgccctgccagtgccaaagagtgccatggcccaggaagaaaggttttcttccatctaggccaggccatccagtggccatcctccgtgtcctcccgcctccccctggtgtgacttctgaaaaccaagaatttgttcctgttgactttttctgtgctatggaccattgtcctctcacccactcaataaatcttgaaacatg

SEQ ID NO: 379684 - DNA, 406 bp, Homo Sapiens
  misc_feature (193)..(193): n is a, c, g, or t
  misc_feature (281)..(281): n is a, c, g, or t
aggttgatgtagtcatagccttcactactattcagtacgttagttttatcaatattgcaatagtgttcagatcttttacacatgttagatgtgtggtgttttggggaaatgtgagcctacaaagcatctttggggttgttttgaggaactacccatcatttatagcccttactctaattacaaaatgcagttncaggttcctagattgcccaccattcctagagtgtggcacacaccattcctagggccgtgattcatttggatgttggaaactcaatgtnctgttgtttgtatagtgttgatgtgtaaaatgctttaaaaatatgttctgttagttagaaatcttacaatgttgttcatactattaatcaacatttttggttattcagtaaaacatttactatcc

SEQ ID NO: 379685 - DNA, 351 bp, Homo Sapiens
  misc_feature (266)..(266): n is a, c, g, or t
  misc_feature (293)..(293): n is a, c, g, or t
tagaaattaaaagagaagtgggagcttataggactctcttcctggcttcacagtggagggggttcccaattctgtggaagaccagcctctcttcttcagttctggatatcatctcccattcgtatttctcaagagcccctctcctttagctctttactggaatatttccatgcttttattatgttatatttattatatgatcacaccaagcaataataacatttaatccctatattgcaccccattgaaaaatcaactcaaatggntcaaagacttaaatataaggaccgggntctataaaactactagagggaaagccccatggatattgggtttcggggcaattatttt

SEQ ID NO: 379686 - DNA, 414 bp, Homo Sapiens
  misc_feature (194)..(194): n is a, c, g, or t
ctaccccactgtatttccccacaccgtgagtccattttaactttaaaaagggaaaaaacaaatttgtaagccaacccctgaaagtaatccaaagagttttaaaactacttgtcctcctccttttgcctaagaagggatttttgaatatgcctatcctaccctggaatcctctctcctcaacaaaaggtatatgnccttcaggaatgatataatctgtcccattttcgaggctccttataaggacatttccatgtatgtccttacatttctgaaagctttcaatcttcaagagacaaaaaaaattaaaataactaccctcagcaaacactagctgttctgctcatatatgaatttttaatgcagcaatgttgactttgtttcatactgccaataaactcttaatactaaaaaaaa

SEQ ID NO: 379687 - DNA, 364 bp, Homo Sapiens
cttttaccaaccaaatagagatagggaaggccccccccggcaagaagtttgggccaggtttaccagaaaatttggtaatttatttgttatatacccttaatttttaaaaaccccatttttattgtggtgtttggttccacatatccaactgtttaagcccataattttagcccaatgaatttaaatattcagtataactatttgaggtttactagatgcatttattaataaattatttgctgaaaccaaaacaagtcattgggggtgtgggaataaaatcaacctttgcttgtaattaaagttgctgctatttctgtaatgtgtatttttctccccttggtaaagggcaataaaaccattacac

SEQ ID NO: 379688 - DNA, 413 bp, Homo Sapiens
  misc_feature (142)..(142): n is a, c, g, or t
  misc_feature (222)..(222): n is a, c, g, or t
  misc_feature (270)..(270): n is a, c, g, or t
ttaaattgtagttcccagaagacaatgcccaaacaccgtgtgtgccttagtgccttgtaaagagtggtaaataacagtgacacccacataggcccgtagttttgtagttcccagagacaatgcccaaacacctgtgtgtacntagtgcctttgtaaagagtgaataacagtgacacccacataggcccatagttttgtagttcccagagacaatgcccaaanacctatgtgtacttagtgcctttgtaaagagtggtaataacagtgacnccacataggccgtaattttgtttttgcttttgttagggtgttcagcatcttgactccttaaataaggttttcagtcagatttataaagcagcattgaagaagttgtattatatttgagtacagttggaatccatgactttttc

SEQ ID NO: 379689 - DNA, 121 bp, Homo Sapiens
ctaggagtttttacagtttcttcatcctaccattaactgattcccttactttaggacaatcctttttcatgttatagttgtacgaagtgaggcccataagcaaaagtcaaaagatgacaaa

SEQ ID NO: 379690 - DNA, 337 bp, Homo Sapiens
  misc_feature (36)..(36): n is a, c, g, or t
  misc_feature (41)..(41): n is a, c, g, or t
  misc_feature (59)..(59): n is a, c, g, or t
  misc_feature (70)..(70): n is a, c, g, or t
  misc_feature (78)..(78): n is a, c, g, or t
  misc_feature (212)..(212): n is a, c, g, or t
tcccccacactgtagatatggcatgtactttacacnatttnataatgaactgtagatancttgaatgttnctacttgnctaattttgcaagttgagtttatttcatttatgcagagtatcttggagtttggtaatttccatcttatgataatatatactttgcatttgtgatatgggtgaaaggagacataaaattagcaagtctgttttgntcttgtaataaagtaacttattctgttttcattgttgacttttcatgttaaggaaatacgaatctgaaagaaaaatgttaactccagctcttgaagtatcttaaataaagacttaattaaagttt

SEQ ID NO: 379691 - DNA, 457 bp, Homo Sapiens
  misc_feature (13)..(13): n is a, c, g, or t
aaaaggttttacntttaattataaaacctccatcctatggtcaaagtaaacactgttacatttaaattgctttttaaaaacaattgcgatctaaaaagtcaaaaatctgaaatttaataatatgagacttacactgaatataatgttcatttagaagttgctgtggtccacttcatttataaggaacaaatatttttacagtacactatagcaacagcaaaagccctctctcaccctgataggaatgggtttgctgggtgtctagaagttagattcctgctgaatagaattagccatccttaaaagattttaatccaatactgaactgtttataaaatgctttctctattgtaatgtactgtaagtagtgaaattctgtatatactgctattttctgtctgttcattgttgtgaacttcttatgtatattagtgaaataaattttcagctttcaaaa

SEQ ID NO: 379692 - DNA, 470 bp, Homo Sapiens
  misc_feature (115)..(115): n is a, c, g, or t
  misc_feature (435)..(435): n is a, c, g, or t
acttgccctggaacttgtggcttgcctcccgctggcccgggcctcccccatgaagccgagtccctggtgccgtgttgggaaggacagagctggcccgtccccgcccggtcccccnaacctgtcgctgataccatctggcacttcctcccagccttcctgaggcagccaagttacgcttggcttttggtgtgtattggagccacggcacgtttaactggcagaaggaagatgtgaaaatattttgaatccctttgtacacaaagagaaaatgaatcttttcagttatttccaagccaggaaactcgctccgtcacatgaagttagagcaggcctcagtcagctgggcgtcagggtcacgcctgggatcccagcatttggtaggccaaggcaggacgatcactttgcccaggagttcaagaccagcctgggcaacanaggagacgccctatttaagaaataatataaaatca

SEQ ID NO: 379693 - DNA, 373 bp, Homo Sapiens
tgtggagctgtattccccgagacccaacgaagcgtggggataccgccatgaaatgtagccgacctgtccaacagccgtgccagggtttcctggatcctgtgctgtggggtcaaccgtacaatggtgtgggagtgacgatgatgtgaatatttagaatgtacccatacttttttgtcaaattatttatgtttgtcctaaacaaatttatcgtataggttgatgaaacgtcatgtgttttgccaaagactgtaaatatttatttatgtgttcacatggtcaaaatttcaccactgaaaccctgcacttagctagaacctcatttttaaagattaacaacaggaaataaattgtaaaacaggttttctaaaaaaaa

SEQ ID NO: 379694 - DNA, 430 bp, Homo Sapiens
  misc_feature (18)..(18): n is a, c, g, or t
  misc_feature (25)..(25): n is a, c, g, or t
  misc_feature (55)..(55): n is a, c, g, or t
  misc_feature (73)..(73): n is a, c, g, or t
ccctggtatttctttaangatccgnaacacaagcagaatcctttgatgtcccccnatttcaatctaaaacccnaaatatttgtaagtacgcggaacaaacctactcactcagagattcctaaataaaaattcaggtgtctgtttgagactggaaatgagaatttaaaggcttctcactggttctaacgcacctactcagtcttatgttacaggtcctagacccaacccatggatcgcctggcaggactctggaaggagccataggttaggcaaatttccatgaagcaaaagtaaagcaagctgtgttctggcatctcagaaggtgtgaatcccttgatccttctctaagggaaatacgaatgtagcctcataaaaatctagaaattcatgtttgaaatgagaactacaaaaactgaagaaacagaaaggc

SEQ ID NO: 379695 - DNA, 497 bp, Homo Sapiens
  misc_feature (13)..(13): n is a, c, g, or t
  misc_feature (42)..(42): n is a, c, g, or t
aaggactgaaggntctgtggtgccccagaaccctcccaaccnagtgccaaccccaaccccatcaatcaacaacttgcttttaacctttcaaagtgtttaggttgcctttggtcctggtggccccaggggaagaagtgctctgtaaggaccagccaggctctggggaactcccaggctgcccggggactttctggtagccactcacttgtccctgttccctggagatgaggtccttgccctggtgtgtggtgtgacacaccttgaacttgcctccaggcccagctggacacacgaaaagagttcctgccccagtcagaaggcccctcagggaagggcagtacccctccagcctgggaaaggaggtgaacccgtgtccttttggagtccagggcaggctcccagcaaagcgagggggaggcgagctggcagcgcggctgtgagggaatgagactttgccatcagtcctcaccaatgacatctactgttagtgccacccc

SEQ ID NO: 379696 - DNA, 588 bp, Homo Sapiens
  misc_feature (25)..(25): n is a, c, g, or t
  misc_feature (68)..(68): n is a, c, g, or t
  misc_feature (88)..(88): n is a, c, g, or t
  misc_feature (170)..(170): n is a, c, g, or t
caccgtgtggggacgtccaaggccncccagtttaagcaaggcccaaaaagccgccggcaaaccaggangtgccaaaaatttttccaangacccgccttcaaatcctttggctgtcctggggatgtggggtgccgaaaccataaggcaaatacccatttggatgttttganggaaactacccatactcttttccccacagccaaacatagggtttgggcattcccctcccaatattgccaaaaggaatcgcccacatcccttgccctgtggatttcattcacaagtcctgtggctctctctacatcccagcccaccatgtgttatttcctgtttatgtatatgacatcaaaggtgcaggaagtaatgaactaaattggaaggataaacatgtagaaaaatagaggtaaatactgactacataaaaccataagaataagaattttggatgatctattatatatctatttatctaacatctatttgttcctccatctgtaatgaaaatattttacagttagagaacagagaaaaaagtaggaatacatgaatttaaattttaattcttctcagattgtctcacagcatcat

SEQ ID NO: 379697 - DNA, 430 bp, Homo Sapiens
  misc_feature (16)..(16): n is a, c, g, or t
  misc_feature (123)..(218): n is a, c, g, or t
ttttaagaaaagtgantcctcctgccttcccctcttcccgcatttaaaggacgcctgtgattgccattagaccccaccttgaataattaccttaaggtcagctgattagctaccttaactccnnnnnnnnnnnnnnnnnnnnnnnnnnnnnnnnnnnnnnnnnnnnnnnnnnnnnnnnnnnnnnnnnnnnnnnnnnnnnnnnnnnnnnnnnnnnnnnncttaaaaaggaggcaattatttaagtatataaggtgaatagttaggtctttctctccaggaaacctaacttgtcattcagcggttaccatgcatgggtatcttcttccaattgcctgagccagccagactttcatgtttgagcattcagattgggctttatttctcaaggcatgtggcaaacctcacaatgacactgaaaggttaaaaaaaa

SEQ ID NO: 379698 - DNA, 434 bp, Homo Sapiens
agaggccgaggagctgcctcaagtatcctacgctgagttccctcagatgactgccatgtccagtatcacacaatttgaatagaatggatttagggcccacaggaaaaaatgagccctgaaattaggttttcaaaatctaattcagaactactgtctactatgcaaattcatgagctaagtgagaaaaaaacatgttatttagggattcgattcctggcaaaacctgggtctctcttgactgatctaaaaccaagtcatgattcaagagatacttagttccaggagacagtgtcacagtgtcaggaaccctctgttctgggctctgagaggttcagattgtattccaccattcctgattctaacccagtgctcaccagatcatttgctcaatttagatggctgagcacatgcagacgaaagaaagttttacattt

SEQ ID NO: 379699 - DNA, 656 bp, Homo Sapiens
  misc_feature (47)..(47): n is a, c, g, or t
  misc_feature (261)..(270): n is a, c, g, or t
  misc_feature (507)..(507): n is a, c, g, or t
  misc_feature (509)..(509): n is a, c, g, or t
  misc_feature (514)..(514): n is a, c, g, or t
aggaacatggccactagactcctccatgaaggaggcccaagacctgnctccccaagtccatgggccgtagaagaagcaccttgctaccctctccccctctacacacccaggcccagtgggatagtagactgggtccctatgccatttcccacaggctcagggtcaagcaagtcatgtggcaactggtcagaaaagatactgtcaaacctctcaaatgacccctgggtcttagatcccacaaaacaatgaattcaagaatgnnnnnnnnnntgaaggaatgtaggactgaaaaaaagcagcccttctccacaagccagcccaagtgtagataaagatggtacttggtctctccctgcaaaccgctggtgtctgcccaacaaggagcagacacattactgaatactacagccctgtatctgtatttccattttggtttaaaagacactcagaacacactgaaattttagtaccagatgggagggattccttgcacgtaatcttgagcantnccacncttcagcaggttcaacaccaggtgaaagccatccaggtgtgcccaacagcaattagcttggtattattcagtaaaactttcagttaagatttcaattgacagtttgggaaggatgtgctggctattagtaaatgactttaga

SEQ ID NO: 379700 - DNA, 459 bp, Homo Sapiens
  misc_feature (420)..(420): n is a, c, g, or t
  misc_feature (433)..(433): n is a, c, g, or t
tagatggaaatatatgtaattctctcatatttaaaaacgtaatctcttctcttagaagtatagatcattttgaaacttaatgtactacttactggtactctccctattaatatttgaaggacctcaatggaataaatttgaaaagctaaattaaaatacaaaaatttaaatctgacatttaattgttttataataatccaaactctatgaaagcaattttaaaaattattaaggttttatgaagttgacaaaatctaactatatttggtgcatcacaatgggacacaggaatgctgctgctcctcttaaaaattaaatgtgtcatattatattctttaaacttactgttttacaaaattgaggctcatcgtaaatgtctaggtcttctcacatggaggtttacccacaactgtgtgggcnggactttgtggtngggatcctggttggcttgggatacca

SEQ ID NO: 379701 - DNA, 426 bp, Homo Sapiens
  misc_feature (115)..(115): n is a, c, g, or t
  misc_feature (144)..(206): n is a, c, g, or t
aatccaaaaacctgtggggtaaaaaaaactgttgaaacccccaatccacatttaaaatatttaagccggggccacagtggtgtgccacctgtagtccccagcctaccttgggagnctgaggccaggaggatcccttaagccacnnnnnnnnnnnnnnnnnnnnnnnnnnnnnnnnnnnnnnnnnnnnnnnnnnnnnnnnnnnnnnntttgtgtagtttttgattaaaattgactacagcggtcagtataaaatacatgtcgcttttaaggaagtgctctttatgtatctaacagatggaagtttttgcattggtaagagcatttatatatgctttgtttcagggtttatggatttgtattcatatattgtcaaataggtttcatactctaattttactttaagtaaagcttaaacacttggcatag

SEQ ID NO: 379702 - DNA, 369 bp, Homo Sapiens
  misc_feature (338)..(338): n is a, c, g, or t
tagaaaaatagttatattatggagaggattaataaagtctcaaatagatttttgtgttatatcccaaaaattattataaaactgctacagcatggaaatagcacagggaacaaattgaccaatataattgaataatgaattcccaacatatgtgacacatacatatgtgttgtatgtcccatacacatataataatccaatttatgactactgataagtgaaaaagttggtctttgcatattctgggacaactggtatatgcacacatacataacacagaaattgtatctctcctttaacttactacagaggtgaattctaagagattttataaaaanaattgtgaaaggcaaaactataaacctttaa

SEQ ID NO: 379703 - DNA, 448 bp, Homo Sapiens
  misc_feature (16)..(16): n is a, c, g, or t
  misc_feature (55)..(55): n is a, c, g, or t
  misc_feature (75)..(229): n is a, c, g, or t
  misc_feature (341)..(341): n is a, c, g, or t
accccggggtttctcnaaaaactttgggcccagaaaaaatcctggctccgggggntttggcccctaaaaaatgtnnnnnnnnnnnnnnnnnnnnnnnnnnnnnnnnnnnnnnnnnnnnnnnnnnnnnnnnnnnnnnnnnnnnnnnnnnnnnnnnnnnnnnnnnnnnnnnnnnnnnnnnnnnnnnnnnnnnnnnnnnnnnnnnnnnnnnnnnnnnnnnnnnnnnnnnnnnctttagcctttcctcttcttcctttctggaatgctgatgcaatgccagaagccgagcagccatctagtaatcacaaggcaacacatatgaggaaaaaatctacatgctgaanatggtgggatgaaaagctgatggcattcgaaggccagcatattagacctggactgcctccctcttttcccttcatgacatacagaaaataaagcccttatttgtttg

SEQ ID NO: 379704 - DNA, 485 bp, Homo Sapiens
  misc_feature (473)..(473): n is a, c, g, or t
cagccaaaagaaaatattaactactaactttgaagactcctagacatctattcccatttctatccccttttccttcagacataacaattatcctgagatttatgtttataattctcttgcttttctttatagtttcagctacttactccaaaactatgttgtttatggatgtttttgagttttatataactatttcatatatcattctgtgactcgcttttttgtcaacattatgttcctgagattaagtagtgtaggctataatccattcatttttatgggtacagtattccattgcttgactataatacaggttttaaaaatccattctcaggtgatagaaatgtgagttgcttcaaagttgaatttataggtctattacggaccatcttgtacatgtttactgatgggcatgcagaggctgttctgggcaagggcatcaacttcttgtgcaagggcatatgggaattttnggtttcgggcca

SEQ ID NO: 379705 - DNA, 284 bp, Homo Sapiens
  misc_feature (84)..(84): n is a, c, g, or t
atatatatatataatttaactttggagaagggataatttaacttttggagataaacattccagcctgccataaaacataaaccnctatgaagtaaacatccttatacagtttctctctttaaaaatagctttgacatgcttctgatgtccttaaatatttgtgctgcagatgccatagttgtattttttcaaagactggctcagaggcttctgaaatattagatatccctttgctggcaaaacatcagagtgggtattcgatcattacaaggtttttcttaaac

SEQ ID NO: 379706 - DNA, 410 bp, Homo Sapiens
aatatttaccaccaccggtaaatttaccaagccaatataaagccagtattttaatacctttgagattttggtacactttaccacaatgcaaaatggaggaaaaatatgaacaccgtataaaattacacacaaataatgtatcctacaaaggattaaattacagaacgaaagccccccatcgttgggcagatagatgccagagtttcaagcttctgtcaaatagaactctttgtatctatctctttaaccataagtggcattttgtaacaatacccttgagaggtagtatcaagataataatattcttaccagtaaacaacacagaataaaacttttgttggtctgactcttggagcctcaatcacgtttaggttcttggaaactggatttacttagtcttccctataaaa

SEQ ID NO: 379707 - DNA, 183 bp, Homo Sapiens
  misc_feature (40)..(40): n is a, c, g, or t
aaactcaacacatactttaatagtttttccattatgattnctgtatatccatgcaatggatgtatcttgtccagagagactgtctttccttgtaaattaagcttacagttattaaatgagaacgtttgggacaataatgcagtctgacagtattgaaagtagggccccaggcaccaagggtca

SEQ ID NO: 379708 - DNA, 482 bp, Homo Sapiens
tatatgctgttcaatgacttgattcacatgtgaccttttagtagtttgcaaacaataataacagaagttgcaattcataattcagagaaatgaccatgaagccggtgtttccctgcttgatttctatgttcttggattctcacacaaaagaggagttacctagaggggatcagtagccatccctgttgcacacaaccctcacttctgagtggtttccactaggttccacttaaggtgctgtcttttcttaacttgcaaggaattgcttagcttcccaataatcattgtcaaactggggagcaaagttgggtcagctgtatctctcacctcctcctttcttcataaggtagtaggaatctgtgggcttacttgtagggtttacttagtgcttcagtactgttgggctgttttgggccttttgctgaatttggcacaacaacataaggcacttctttttaatgttttaaaaaaattccagggtt

SEQ ID NO: 379709 - DNA, 503 bp, Homo Sapiens
  misc_feature (47)..(47): n is a, c, g, or t
  misc_feature (49)..(49): n is a, c, g, or t
  misc_feature (53)..(53): n is a, c, g, or t
  misc_feature (56)..(56): n is a, c, g, or t
  misc_feature (58)..(58): n is a, c, g, or t
  misc_feature (64)..(64): n is a, c, g, or t
  misc_feature (69)..(69): n is a, c, g, or t
  misc_feature (73)..(73): n is a, c, g, or t
  misc_feature (97)..(97): n is a, c, g, or t
ggaaaaacgggaatccaggccctaaaactccaaatgtcccggaaatncncctnaantncacaangccgncctnacttccccaagacagagagaaggntaattaggaccccaaaaaccacccattccaaaagggagtgcccaaaattggcttgaattttatgcccactcctaagctgacaggaggtcagcctccttcatgtcctagtctttatagtgtccaaacatttgtagacccaggataaacaaggctggcttcactgaaaatcaacacaagccatagtacctaggggcagttttcctaagaagccaatgtaacaatagtgagtatttggcatttcacagactgttgactgaaacagaaagactacttgaaatttcttttcacatttaaactaaatatatcttgactctaaaaaacaacatggacacttgacacaactcatttgggaactcatttagtttatattatgtgactgcttggcaatatgaaaatccttggagat

SEQ ID NO: 379710 - DNA, 320 bp, Homo Sapiens
cgcccctaggggatgaatgccctgaagggaaaacatttgatgaaatccacagtaattgaggcctcagatttcctgtgtccctggtagaaccatgtgatagtgaaccaaaacatgaccattgattccttttcccatattctgatcttacctggaaacccgtgctctcagattttgtggggttatctggcagatagacggtgacaacagtcccatctggtgaaggcttaggatattaggatgtttcttacttcttattgtttgaagaaacagttgtgaataaaaattaatcaaaattagaggccaggcacagtggcttacac

SEQ ID NO: 379711 - DNA, 437 bp, Homo Sapiens
  misc_feature (30)..(30): n is a, c, g, or t
  misc_feature (66)..(66): n is a, c, g, or t
  misc_feature (72)..(72): n is a, c, g, or t
  misc_feature (85)..(85): n is a, c, g, or t
  misc_feature (167)..(167): n is a, c, g, or t
  misc_feature (250)..(250): n is a, c, g, or t
gcctcctgttctcattctccacaaagctgnccttgaactgtggcctgccaaaccacgagtgcccangctttncaggtcttactgntgcctactggccttcaagacagaggcctgccccagtgtgcccacagatccatgtggatggagacctccttcagaggggtcanaggtctttgagactcagcctgggctttaatgtgtaggaaaagccttctggccacccagagagccggagccctgcttgctgtantctctgctcccttcttcctgctgggttttagccataatagggcccggtacgatttgggagtgacatttctgtaaagaagaggaaaaatcatttttctataatttgtaaagttgtgaaagagccactaccacagtttttacattgattattggaacatttcagaataaataaagatattttcttaatg

SEQ ID NO: 379712 - DNA, 211 bp, Homo Sapiens
attagaaatatctgctaaatatagtcagatgcctttttggctcattgatatgatgtttttctccttgagtttgttaatgtgacaagttgtactgtagtcattaaggcaggtatgttagaatgaaccagaatgttcgatgagcaagaatgaacaaatagaccaatggaacaaaataaagagccctgaagtagatctctctctataaaaaaaa

SEQ ID NO: 379713 - DNA, 439 bp, Homo Sapiens
  misc_feature (341)..(341): n is a, c, g, or t
  misc_feature (374)..(374): n is a, c, g, or t
aaggattatagtgtcacctatggccattgtccggaaatcacagtatacacaagctgctgttactttcctagtgctgcacgactcccttccttgtgggcagacaataagagacctctccttagtatgtcagtggaggttcacaagggagtccatggatttcttaaagataagactggaaagccaatctctaaagcagtcattgtacttaatgaaggaataaaggtacaaacaaaagagggaggttatttccatgtactcttagcgccaggtgtccataacattattgcccatcgctgatggggtaccagcaacaacattcacaggtctttgctgcatcatgnatgcaggctagttctgtgggtgatagtctttgnacacagattaaccggatatttggttttgccaaggggagcttgtgggtaactgtattcaggtgcta

SEQ ID NO: 379714 - DNA, 442 bp, Homo Sapiens
  misc_feature (77)..(77): n is a, c, g, or t
agccaaaccgtccaaagccccaagtgtaaccgggttccttcaacggccgttgtgtgtcctccatcccactgtctgantccagcttttttagccacatgggctgggtgtgaatagtcctactttaacgtgatgtatatagtgcatactatcctacacacgctattgaaaaatgttaccatttgtttttctgtagaactgtcttccttttagtgactgacatattgctcaatattcggtgctcagaaaccaaagtactctcctttcctggcaataacactacaaatacatcccttccttggatgcctgtcattattttttgctaagcactggtcttgtgtaatacctaaaggtcaatttagtaatacttgatccaatctcttaaggagggatggggtgaaatttttgaatggttggagtcagtatttttatcaacaagattaca

SEQ ID NO: 379715 - DNA, 478 bp, Homo Sapiens
agaggcccggggagtactggactaccccacgtaaccctataacaagatgggtagtattttaataaccgaaaggcttgtggggtagggatagggggagccgtaaaggaatagggagcccacccaacattgagtgagctgcctttttacctagcccacactggttaaaacctgacaacattgtcaactttttaaaagtcacagaattgatttgtaaacctgtttgcctcccaatcattcttgatcaagttataaagacagaaatgacattaaaacgacaacaatttacaaaagactttcctattaaaaatggttggagctccatgaccatacaaaaagaatgaaattcttaaaagtaattcttacaaaatctgctgccagtaggaaacttacctcaggatacattaaggagacttacaacatcatttcctaaaaggtacccaactttttggctatgttgccacttcactgacatcaaaga

SEQ ID NO: 379716 - DNA, 373 bp, Homo Sapiens
  misc_feature (76)..(76): n is a, c, g, or t
  misc_feature (314)..(314): n is a, c, g, or t
ggacccccagaatcccccagtgaagaaaaagaaaggggcctagagacatccagggaattggatttgggtgaccttnaaaaccccactcagctcccaaagcattccttgaaatgatgccacgatttatgaatatatatattgaaatttactgatgggtgaacagctcctcaacatgagattttggttgtatgccttaaaaaagattatacataaatatgccgtgtgtgtgtgtatgtatgtttcgatgtatatgaacccatgatctgaaaaatggccactgtggcttgtggaaacctattaatctctgctgttcnacccaacatcctcagagaaaaaaataaacaactttttgaaagtgctgccatggggtcag

SEQ ID NO: 379717 - DNA, 425 bp, Homo Sapiens
  misc_feature (26)..(26): n is a, c, g, or t
  misc_feature (47)..(47): n is a, c, g, or t
  misc_feature (89)..(89): n is a, c, g, or t
  misc_feature (95)..(95): n is a, c, g, or t
  misc_feature (129)..(129): n is a, c, g, or t
ggaacaagggagaaggcccaagactntaaaaatctgcaacttcctcnaaatgccaaacatggaagcccagtggggtttaggcagttccnctttgnccctaagccttgaagagagagtgtagatttcccnccctggtcaacttcctagtcccttcttcctaacctgaagtcctacttctgtgtctgataagcggaatcaagtgactgagaattctgctactcttttagccctgtgaccttgaataaaacgtttaatctctctaagcctattttcctatctgtaaaatggaggatttacttcctttcagggttgttttgtggattgaacaaccgtgatgttttatgtggatgaatgtaaaacacctagaataatgaatggcacgtaaaatatgttaaataaatgttagatggctttctgaaaaaaaa

SEQ ID NO: 379718 - DNA, 625 bp, Homo Sapiens
  misc_feature (34)..(34): n is a, c, g, or t
  misc_feature (63)..(63): n is a, c, g, or t
  misc_feature (90)..(90): n is a, c, g, or t
  misc_feature (119)..(119): n is a, c, g, or t
  misc_feature (135)..(135): n is a, c, g, or t
  misc_feature (357)..(398): n is a, c, g, or t
cctttcatccattcacctaaatatatattgggcncctgccctcctgaccgaagcctatgtggnaaatcaagaagaccctcctaaaagagnctgagggaaggcaatctgcaagtaaatcncccacaccccctcccngatagaaagtctcctcctatcctagaaggggaatttgaaaaaatgtccttggaggaggttagtaaagggagctggacccttgacaccttaaaatttgacaggatatactgccgctgtggaaaacagtatggcagttccctcaaaaagctaaacacagaactaccatatgatccagcatttctacttccgggtatataccccaaagaaatgaaagcagggacnnnnnnnnnnnnnnnnnnnnnnnnnnnnnnnnnnnnnnnnnnagccaaaggtggaagcaacttaaatgtccatcaacaaatgaatggataaagaaaatgtgttatgtacgtacaatgggatattattcagccttaaaaataaatgaaatttggatacacgctacaacacgaatgaaccttgaaaacattacgctaagtgaaataagccagacataaaagaataaacactgtatgagtcaacttatttggaatacttagaatagtaaaat

SEQ ID NO: 379719 - DNA, 426 bp, Homo Sapiens
taaaggtttagaagcatgatgtcctatgtgtgtatatatacacacacactcactcccccccgcccaggactgccctcagttttccaccctcagtatttgacctaaaaccttctattcaacttcagtttcagccttagaataaccagatgtcctaagtcaatgtcatttggggcatccctagacttgtgcaatcacaaaagtcaccattaccgctacatagtacgtattatgaccaatggatatcatccagagttctagtttacatatgctattatcaaacatatgtaagccttttaatgtaacttgggagtgaaattagtaaaattctatcaatttacataaattaattttactgtaaaaataaaatacattatgaaagtttctgtactaatgtctttgattacaatttttaaagtatttcccatt

SEQ ID NO: 379720 - DNA, 369 bp, Homo Sapiens
  misc_feature (14)..(14): n is a, c, g, or t
  misc_feature (84)..(84): n is a, c, g, or t
  misc_feature (184)..(184): n is a, c, g, or t
  misc_feature (284)..(298): n is a, c, g, or t
caaaacaacctacnaaattatacgaatttaattatttgtagaatacaagaattcagtaacttctgcctagccatacaaagtctnaccgcccttatgagcaaaaataacccatcagaaaaaggaccaacctgatttaaaaaagaacacattaagaaattccccaaggctggacgtggtggctcanacctgtaatccccagcctttggaaaggccaagcccaggcggaatgcttgagcccagaagtttgagaccagccctgggtaacttggtgaaagtctctaggnnnnnnnnnnnnnnnttagccgggcatgatggtgcgtgcctgtggtcccatccacttgaaggctgagatgggaggatcgtttaagc

SEQ ID NO: 379721 - DNA, 463 bp, Homo Sapiens
ttgtgcctgttaattggccctcagtctttccattcctatacctgagcaccccatatcctgccatccttataaaaagggaagttgggagaccacggttaagagttaatggaaaaaaccagataaattggacttccatccagaattacaaactcttatgccatcaagaatgcctaccaaggtgaaaaaaatagccgtatagaatggaagaaaatattgcaaatcatataatctgataaaagtttaatgtccagagtatgtaaagagtgcctaaaactcaataacaggaagacaatctaatttttaaaatgagcgaaggatttcattagacatttctccaaagaagatatataaatggcaaataaatacatgaaaagatccttaacatcattagtcaatagagaaatgcaaatcgaaacctcaaggagagattacttcacacctactgggatggcaattaaaaaaa

SEQ ID NO: 379722 - DNA, 468 bp, Homo Sapiens
  misc_feature (72)..(72): n is a, c, g, or t
  misc_feature (98)..(98): n is a, c, g, or t
cttcaacaaacgaagaaaatagggcaaataaatcccccaaggaaatgaagtgggaatttccccgtgtaagcnacccagggtcccatgagcatccatcnatctggatttcggcagtaattcctcattccagcttacttgcatctggttccccagaagatatgacgatgtaagtcttcccatgttcttgtccccacattgaacatgttagtccagatcttgtttgggataagttgcccatataatttttgccattcccacgataacaatcttgtccatgtgacatatcacagtttggaatttgggagcagtagccaactcggatgtttggatcagtggtaaaacaccagggtgattcagacccatctggatttcggcagtaattttctcgtaggtccttgcacttgaaattttcaggagtcatgtcatgctcgtgaggatactgagaatcccaacgctgacatggaattc

SEQ ID NO: 379723 - DNA, 450 bp, Homo Sapiens
  misc_feature (43)..(43): n is a, c, g, or t
  misc_feature (45)..(45): n is a, c, g, or t
ttttgagacgagtcttgctcagttgcccaggctggagtgcagnantatggtcacagtcacagcagcctcgacctcctgggctcaagcaatcctctctacctcagcttctggagtagctgggagcacagtcaccaagcccagggctaatttttatagagatgaggttttgccatgttgcccaggctcaaatcactcttaaagagtaatgatttctcatccttatgacacacagaagaatttgaccaagattctcggaggttgccaaatcattcctgggcaaaagcaggagtatcaaaggaaatgtcaccgatttgggacacataaattctgacaactttaaaaataagtcaaatttcaattaggaatacagactttaacagaagaaagatacacagggcatcagtttttaaatgaggggaactaagggcctgaaaaagctttattttatat

SEQ ID NO: 379724 - DNA, 501 bp, Homo Sapiens
  misc_feature (298)..(298): n is a, c, g, or t
  misc_feature (304)..(325): n is a, c, g, or t
  misc_feature (371)..(371): n is a, c, g, or t
  misc_feature (405)..(405): n is a, c, g, or t
  misc_feature (413)..(413): n is a, c, g, or t
  misc_feature (425)..(425): n is a, c, g, or t
  misc_feature (430)..(430): n is a, c, g, or t
  misc_feature (443)..(443): n is a, c, g, or t
  misc_feature (469)..(469): n is a, c, g, or t
aatatatgatgtttacagaatgaaatcacctaatgatgcatttctcagaacatatcatcatcgttaagtgacacatgaatgtacatgttattaatacctcatacaatgtaaatgctatgtaaatagttgttatactgtattgttgagggaccaatgtcaagaaaaacagttgacacattcagtacagtcacaagcatccattttttgaaaatattttcgatttgcagtcggttcaatccatggatacagagctcacagatacggagggccaactgtattgctcttttctctgtttggncttcannnnnnnnnnnnnnnnnnnnnngcttcaaggactaaaactttgggcaatttctatataaaataaaggnttttcagggccttaggttccctccatttataacnggatgccngtggtatccttncctcnggtttaaagggcnggtaattccaattggaaatttggacnttatttttttaaaggtgttccgggatttatgg

SEQ ID NO: 379725 - DNA, 212 bp, Homo Sapiens
  misc_feature (20)..(20): n is a, c, g, or t
  misc_feature (25)..(25): n is a, c, g, or t
  misc_feature (40)..(40): n is a, c, g, or t
attttctctcgtaatgcccnaagancattcttgaaaccanaaccctgtctaccatcgaaggcactgaccttctactcacctgcgcttcagagggctgggttcttccctttccccaatgaagttgcccaaaccaaggttgaaacattactgggttaataaagaaaagaaaacccaatagaaaagaataagagcccaggagtggtctctcaaac

SEQ ID NO: 379726 - DNA, 249 bp, Homo Sapiens
ttaaatgtggttgctttattttgcacttttaattcacaaaaagctttacaatatctacattccacctgttgataaccaaggctttatatggcaagacaatgaaaattttatcacatcaactgggcatatgcaaaaacaacggataatttacaaacaagtctttttaatcaagaacattatgtaaaatacacactctggtaaacatctgaattcatccatcctaaaattagactttaagagggcaaaaaa

SEQ ID NO: 379727 - DNA, 433 bp, Homo Sapiens
  misc_feature (30)..(30): n is a, c, g, or t
  misc_feature (49)..(49): n is a, c, g, or t
gctctaccccgactgcgctatgaaacaggntgttggggaggccttactntcccattttccatatttaaaacacccactccacaaaagccaatttttaaatgaaggttagtggaattgttaaaaatctgagaggaatgatgactggaggtgtttggggtttttttcctgtattcattttttaatgagaaaagttttaaatgtagtacaggttagacccaactactaccttactattataggacgattcctatgtttctgttaaagtattcaagtagctttctctgggggaaaaagtaccacttggacacttaaaggaattgggatttttgtctactttggataaggcagttgacttcttaagtaaaagcaatagtgtaaaatgtcattttgtttggaatgttaagtgagcaaataaaaaacatgttgaaattgt

SEQ ID NO: 379728 - DNA, 159 bp, Homo Sapiens
aattgaaaaacagccagaacaacccaaaaacctaaataagaatccagacatccataagaatagaggttaaaagtccagggaaacttggttttgatgccctacttttgtaatttaagataatgtaatactatttaagttttgaaggtggctgggtgccag

SEQ ID NO: 379729 - DNA, 422 bp, Homo Sapiens
  misc_feature (47)..(47): n is a, c, g, or t
ggcctcagagaaacaatcatagaaagagctcttcctgcccatgatgnaagtgggtcccgcacgcagaagcccaggagagagtggcatcaatattgtcactgccgattttgtagaacttggtgactttatcagccactgtcataaagctcaactatgtcctttgatgaaggagaagcccaacacttgatagcactacttggagtttcccatgaataagatggagaaagctcattgtattagggcatactatctgtaaacactctgatcttcctattccactgagtctctgaagggaatagggctggtagtgggtgggaaaaggggaaaaactgtttcttcagtgattacaatcatactcttcattactataaatatttcatttcccatttgatgagcaaaatctacttcctagtgttaggaat

SEQ ID NO: 379730 - DNA, 457 bp, Homo Sapiens
aacctttcggactgagctgtcccctactatttaggggttgaaaaacccattacacagtcactttacgttaacattgggtccatccttatgtttgtatgagacggatgtgggatttgaggggaacattgtcattccccttaaaataactatcatgaaaaaaatagccaacagtatgtaaagggacccaagagtggcagcctttagggaaaatggagcagagaagagctgtgaacaaagctcatttatttgaaataagcgtgctttatttcacatagaggggcatcagacgttacatttcattcggacaaattactgaacagccgaagtgattgtttccaatgtaggttattataattattggatacaaagatttaactagtgtttctgggttggatttttgaaatagtatgcaagtcataagcacagtttcaataaaacacgtattctggaaaaaaaa

SEQ ID NO: 379731 - DNA, 470 bp, Homo Sapiens
  misc_feature (34)..(34): n is a, c, g, or t
aaaccctatccccaaggccccacccccggtctgngggaaaaattggcctccccacgaaactggtcccgtggtgccccaaaaataattggggttatggttgttcctagggtgtagacctatgaaaaagatatgccattgtcctcccatgaacctaaaaggcaaggtgattttaaacaatttagatgcccaaacaaagaaacccaaaagcttcccaaagtaataaatgatagagaaaggaaattgttacatcatgtgcccaaattagaagcaaatctaaacttcttatcatgtactccaccatctgatttgtataagtaattggggaaagaaaaactcacaatataaaacaagattgactagttctagcagatgacacctgtaaatagaatttttactagttgaaattctgatgtgaaatgaagccattattattatcacaataaagtgttctttttagttctttttttaat

SEQ ID NO: 379732 - DNA, 156 bp, Homo Sapiens; identical to SEQ ID NO: 86945

SEQ ID NO: 379733 - DNA, 514 bp, Homo Sapiens
  misc_feature (148)..(159): n is a, c, g, or t
  misc_feature (389)..(389): n is a, c, g, or t
  misc_feature (430)..(430): n is a, c, g, or t
  misc_feature (437)..(437): n is a, c, g, or t
  misc_feature (450)..(450): n is a, c, g, or t
  misc_feature (472)..(472): n is a, c, g, or t
  misc_feature (484)..(484): n is a, c, g, or t
attaatctaagcttctgctgtgtatggacctgtggctacattacaaaattcagttgtgaagctataaaatcaattagtctagacctcaaatcttatttcctatgaaaagcctcaaacttgtagctgtatgaacaagtgtttttggaannnnnnnnnnnngctagaatggagagaacacactggagatcacaaatgcatttattctttttcaccaactgtttcattgggccttaaaaaatactagggctaaacttaagtgggtaaagatctgaaataaaaaggatgcatctttatgtctggaacaggcaatttttcatagggtctcttaataacttggcatttccttatctatgggataagggagatctggaaattgatcttacattttnctttaggtaatgtttttctctgtttattgaggaacagatancctccanctccttcaggccntttccctaggtaacaggtgtcngagggtccccgnggccttttggggactttacccaggggttag

SEQ ID NO: 379734 - DNA, 699 bp, Homo Sapiens
  misc_feature (11)..(11): n is a, c, g, or t
  misc_feature (46)..(46): n is a, c, g, or t
  misc_feature (86)..(86): n is a, c, g, or t
  misc_feature (212)..(212): n is a, c, g, or t
  misc_feature (545)..(545): n is a, c, g, or t
ttcagtaacangccctgtttagtaaacatctggtggagagtgaganggtaagggagagagggctccccccgtactcttcaggtgcntcccgctaacgtgaggcagtggagttgtactgaattcaggcaagggcacgaaatccttaaagccaagcctatcgccttttctgacttctgctagcgagcaggcccacgacactgtaggcacaaggncagagaccccaaaatttgaataaataacgtagcagatgtccctaaaagcttccccagagactctgttaaactcttggaataaagttttcactttaaatcctgtatatatcaggaaattcaaacataatggtatatggatttctctttcatctgaaaaacaccaatgcaatagattaaatgctaccaccaagccagatgcaaccccgcctccaacctgcaaggaacccattccctcgacatagacctgtgctggcgacatggctgactggggttacctgcagttgccaaaccgtaagatctagaaacacctgcactgaactcctggggagctgntgcccgcaggcctttagatctccgtcagggtgagcttgtaagaccccccggcttcttcaatctgcagctggaaggtgtcctcattggagtaatgcttcacaatgttgtcgtccatgttcaccaggatcccctttttacacttcttgaatatttt

SEQ ID NO: 379735 - DNA, 506 bp, Homo Sapiens
  misc_feature (38)..(38): n is a, c, g, or t
ggttccagtgtaccttaacccaccagctcaaagctggnatccccagaagcctcccagctgttaaacccctttaagttgcccagaatccaagggggtacagcggaatgaaccaggtcagtcagggattacctggggctccaattagcagctatggactacccaatacagaagtctctccacatttaacaacagatacagccatgccagtgactatcagacatataccagtcctgggaaatccatataattgactggtgtccttaatcaaggaaaaagataacttaatctatattcttaacattcatatggtacagatcaggacgatatggtgaatttgtccactggaaagtgagaccaacttttctatactttcctttcaaataaaagttccataagagaagaaaatcctgaacttttgtttcttgatggttagaattttttaaaaatagtaccagatagctctatttccacttaaaggctgtatatttgtttctgaacacttttga

SEQ ID NO: 379736 - DNA, 511 bp, Homo Sapiens
  misc_feature (49)..(80): n is a, c, g, or t
  misc_feature (436)..(436): n is a, c, g, or t
  misc_feature (471)..(471): n is a, c, g, or t
  misc_feature (483)..(483): n is a, c, g, or t
ttcactcattacctagagtaaacttattgcatattttcataatcagtcnnnnnnnnnnnnnnnnnnnnnnnnnnnnnnnnttagttcccaagtaaatatatcagtgtttcctgtgtttgggcagaagtgcaaagtagttttaatttctcacgttgtagaaaaagaggccaaaaaggtcaccttagtttatttttccaaaacataactttagggattctaatgtattttgttagttgcttagaaatggaaataaaatatatgtgcttattaaataatgcacagtacactagattatagagtttatttttgcttttatgctttaaagaatgcatgcccaaaacactactaccaacaagaggattttttaaaatcacagaattgatatttatctcaagactatcttaaggctaatgtacttctgttacataattaaacntatttctgctattatttttaaaggcagtattattntataacccattnctaaaattcaggcttttaaaaatattgg

SEQ ID NO: 379737 - DNA, 153 bp, Homo Sapiens
cgctgctctcctgcatgctattgtagatctgccccatggtatttggcatttttgaccacctctatgtgtagatctgccccatggtatttggcatttttgaccacctctatgtgcagatttcccctgtcccatggggccaaggaggatagtgat

SEQ ID NO: 379738 - DNA, 590 bp, Homo Sapiens
  misc_feature (20)..(20): n is a, c, g, or t
  misc_feature (48)..(48): n is a, c, g, or t
  misc_feature (69)..(69): n is a, c, g, or t
  misc_feature (77)..(77): n is a, c, g, or t
  misc_feature (95)..(95): n is a, c, g, or t
  misc_feature (111)..(111): n is a, c, g, or t
  misc_feature (519)..(519): n is a, c, g, or t
  misc_feature (522)..(522): n is a, c, g, or t
  misc_feature (524)..(524): n is a, c, g, or t
  misc_feature (531)..(531): n is a, c, g, or t
gaacaaaacccaaaaaaggnaggtaaggaaagaaaggggaatataatnaaatgaaaatgtttttaaaanccaggccnccaaaattccaggtgganaataagcctgaacaanatgtagtccttttaagaatgccaaactgaagaaaggaaatgcccagacagcctgactgccagtcactaaaatctccctatatgccccacttttcctcattacaactcaagatcagcatctcctattgaggtgcagaccaaggttgaaatgcctcattttggtcacttttgaaagataaagaatttgcctaaggtaaagggctttgccctgtattaaatggaagccattatgagagaggaagaatgtgttgggacagttctagttcagtgtgactatcagcatggcgacgagaaagagttttatatctggttgtaggaaacaggctgcagagctgtggtctggccttctggctttcatcatcatttcttgaaatctcaatgtgtatttggttgtgtggtacccaggtanatnanaagcagnagagatactctatataaaattcttccaattaaacacacatacaaacctaatagtgttca

SEQ ID NO: 379739 - DNA, 418 bp, Homo Sapiens
  misc_feature (58)..(58): n is a, c, g, or t
  misc_feature (77)..(77): n is a, c, g, or t
ggccctttaaagaagttcccctttgaattccacaaggtagccaagggaaaaactgttncctaaacaaaactttgtantgtccttggtgctttccagcagttagaaaaacagtagcctgtaatacttcacagcaccttaactccctagctatcccagttatttgatactctgcagttctgcaaatggtgcattgatgatagaatatttactgtttatatacagatcctttttagtctatatgaatcctaggaataagaaagcaaatattctatatactttggatcttttgtgaatatattggtaattgatttgcatgattgcttaattttttcttctttttaatccaaaatatgtcaactcctgactgttgcagaaaatgaagggtcaaaaataaagacagtctcctctctaaaaaaaa

SEQ ID NO: 379740 - DNA, 213 bp, Homo Sapiens
  misc_feature (36)..(36): n is a, c, g, or t
  misc_feature (123)..(123): n is a, c, g, or t
gggcaaaagaacttcaaaggaattaacccttaaaantctgttgtaactgcccttcctaaacttggccctcccatcaattcaagattacccaaaaactgtcctccttaaactggtttctttgtnctcccaaccttgtgcacttgcctatcctattcctgtgtgctgcagccctgagtttttaaaaaacagaaaatgaggggcccaggtgtggtg

SEQ ID NO: 379741 - DNA, 527 bp, Homo Sapiens
  misc_feature (14)..(14): n is a, c, g, or t
  misc_feature (59)..(59): n is a, c, g, or t
  misc_feature (76)..(76): n is a, c, g, or t
aaaaaaaacccctnacaaaaccctcgggaaaccccgggctgtcacgtgtaaaaaccccncctaaggttccagtgtnaatggaaaaataccctctggctgccccaggatggtgaactggtttcccacaaagaatcatttgggacttccttccagggctgcaaggaacttaaatttcctcccattggaaaaactttaattaaaccccatctcctaaaggcttcccatttgtttctgaatacccgtatgcatacaaaagtcaaacatcaaatcccacatattcttctgcattatccattgttatcatctcatcttcaccacttggcttgagatccacagctgtaaaaccatatattcttgaggaagggcaaaactggaaatttaaacctaaatcctctatgctaagtggaggcccagaacctgatggattcttcagcactagttcctgtaattttgtgttcttctcatcttcagaaagacctttgttgcttaaaatttggcgcctcttgatagcaaggtctttaatttct

SEQ ID NO: 379742 - DNA, 432 bp, Homo Sapiens
  misc_feature (326)..(326): n is a, c, g, or t
  misc_feature (414)..(414): n is a, c, g, or t
agagaaatggtcttcccagcctgaaggtccacttaaattgaaagcttcaagtactgatatgccatcccagatttctgtggttaatgtggatcaactgtgggaagattctgtcctaactgtcaaattccccaaattaatggtaccaaggttctccttcgctgcccccagctcagaggatgatgtgttcatccccactgtgagggaagtgcagtgtccagaggccaatattgatacagccctttgtaaggaaagtccggggctctggggagcaggcatcctgaaggcaggtgctgggggtccctggggagcagcctgtggaccttaancctgcctttggaagctcccccaatttcaaaggtcagagtgcatattcagggtgctcaggttgaaagtcaagaggtcactatacacagnatagtgacaccagagttt

SEQ ID NO: 379743 - DNA, 518 bp, Homo Sapiens
  misc_feature (169)..(335): n is a, c, g, or t
  misc_feature (450)..(450): n is a, c, g, or t
cttgaaaaaggcaatgagtcatgacaaatatttcttttcttctcaatatagaagccttcgatgtgaggcccaggcattgagtaccatgtgtgcgattcacaagccttggcatctgaacaattttttggaaggatccatcaggacaacacgtcgggggtgtactagtgannnnnnnnnnnnnnnnnnnnnnnnnnnnnnnnnnnnnnnnnnnnnnnnnnnnnnnnnnnnnnnnnnnnnnnnnnnnnnnnnnnnnnnnnnnnnnnnnnnnnnnnnnnnnnnnnnnnnnnnnnnnnnnnnnnnnnnnnnnnnnnnnnnnnnnnnnnnnnnnnnnnnnngaaccactgtgctagtgaattgttcctgtctgtggccacgtaggaataagaaaaccattagggttgggaaaatgggggaaactggtgagtgttcgctttattgagggaaatgaangattaggttaggaaaagatttagtttaacttttgggatttcaaaagagaagccgttttgttaaaagcc

SEQ ID NO: 379744 - DNA, 495 bp, Homo Sapiens
  misc_feature (48)..(48): n is a, c, g, or t
  misc_feature (57)..(57): n is a, c, g, or t
  misc_feature (426)..(426): n is a, c, g, or t
aaccccgggaactgtccaacaaaaaaaaggctttgctgtcttccggcnaaaacctanggttctgaaatgctctctcaaccgagggcaacaaagatatgatgaaaccaatcggaaaaaatctccttgtcccacccaggcaattcccctgggccttataggcgacgggcaggtgctggatgcctttgaaagccctgggaccgctgcacttcccgatggccaagggcttgagcctgtgggagcccgtggcgttggcacacatcagcacggtcagccggtccttgccctgcttggggccagcacagccccgccttccggagtgggatttggcagcaccgccagaaaaggccggtctcatcagcgttgtaaacctgctcggcggacagcccgtgctcagcagccaagctcctgaaaaacgcacagaaactntccgcggcctggtggtcggctgactgcttttcactggatgcatctagctttttaatgccgtgtctggcc

SEQ ID NO: 379745 - DNA, 456 bp, Homo Sapiens
ttttggttttttcccaaaaatctgaccatgtattcagaaacgcctcactgcacactacttcggctacacaggtaggtaacactttaatcattttgttaaatcacagccactttgattatgttatgtttccgatgatataaacattggaaggcacagtggtaacattgtagcattctaaccttgtacctctgaaaatcccagaataggttcacaaacgcaacattacaattcagacaaactctttttgccatgtcttggtaatgctgcttgtaatatctacacatgatgtgacttttaagtcctgtgttcccaaaagactggagaaacaactttctacttatttatgaatgagaagcaacatcagggtcagcatttcatcctgcactacccctctggaagcagagttggcactacaggttacgataacaaaccagggaaagggacagaaataagacc

SEQ ID NO: 379746 - DNA, 483 bp, Homo Sapiens
  misc_feature (412)..(412): n is a, c, g, or t
  misc_feature (443)..(443): n is a, c, g, or t
agaataacatgatgtataagtggtgtaaatttatataattattataaattattataaatgtataataaaataactagaatttcaccaaattagaaatttaatggaaataaaatacacattggatttgggtgaaaaaaacatgttgagcttaacatgttaatgttaaatgggacagaaatacaatgtgctgcctacttttgaattaaatgctaaatagcagtattatacattttgggaaaatattcaaaaaataaaataccctagaatggagtttcttgggcagctctgtactaattttaatagttcttggaatctcctttttcaccttaggaaattttagtacacactttaaaaatctgggcaaaatatatgtccagcaaacagccaagagccagatgtatttaaatgatcntatttacgctccccaaaaggaaattgcaaantgaagcatgttgattaaaccttttgggtgtgatgttgggg

SEQ ID NO: 379747 - DNA, 428 bp, Homo Sapiens
  misc_feature (215)..(230): n is a, c, g, or t
cagcaaagggcagccacagtgttgattccacattataatgttgttgcctcttcttggcaaaagacaccacatggtgggaagatctcagcttccagggtaaaagttaatttataacttaaaagtgctattaagtttttattaccaaatatatcttttatggtttatattgtagtggtatgtatgaaacatttaaaattttactgtggaaattgtgnnnnnnnnnnnnnnnngtcgaaataggtgttcacaggtcacatgtgaacggagaactgcatgaccgtacatgaaatgcaataaaccaactggaaaaagtgcatgtgcttcatcctctcaagccaactgcagctggaaagtgctgcttatcctccacccccagaaaatgcatgtatcaatatgagaataaagaacgcacactttcaattttaaaa

SEQ ID NO: 379748 - DNA, 372 bp, Homo Sapiens
  misc_feature (22)..(22): n is a, c, g, or t
ttattcctacgaaggccagtgnagagctcctgggctgcaaacaccaggccccagaaagacaattgcagccctctaccctctccctgcgtcaggcagcccacctgccttccccagggggctgctcctgctcacagagggatggccagcctggctccagagagctggaattgtcattgcagtgacaggagagaacagggctctcagctctggaaacagattcttatcctcatcttggtcttgggaattaggctggaactgggtgagaacaagcttcccagccacacaggcccaaagagagtcacagaagtacagaggccataaactcagccctttcccctctgactcccagatacggaggcgagaggctcaaag

SEQ ID NO: 379749 - DNA, 487 bp, Homo Sapiens
ggaaacttcatccatcacaacccattagtcataaaactaccctgaccccactgtttgaagaagaaaaggtgcttaccctggagatgctacagagacacagtggaatagaccttgacactaacactctaattcaagcgaatgttggaacaccatgacctcctctgtgtgtcctttctccccaaggacaaaatgtagaaagatgtgagataacttactcaagattcccctccagaaaaatacgtatgtttaaaaacccttcctgctatacataggaaaagacacacatccacctaaaattgactgtactgtttaactgtcaattctcctgaggctaaacacagtttgtttttcttgtaatcacttttcatgttaaaataatcagcattcaaattgtatgctttctgaatatagactttctgggaaaaggtttactgctcgtaaggaaacattttatgtattaaaataaactgttccttgataaaaaaaa

SEQ ID NO: 379750 - DNA, 551 bp, Homo Sapiens
  misc_feature (39)..(39): n is a, c, g, or t
  misc_feature (52)..(52): n is a, c, g, or t
  misc_feature (60)..(60): n is a, c, g, or t
  misc_feature (76)..(76): n is a, c, g, or t
  misc_feature (93)..(93): n is a, c, g, or t
  misc_feature (234)..(234): n is a, c, g, or t
  misc_feature (483)..(483): n is a, c, g, or t
  misc_feature (485)..(485): n is a, c, g, or t
  misc_feature (491)..(491): n is a, c, g, or t
  misc_feature (493)..(493): n is a, c, g, or t
  misc_feature (518)..(518): n is a, c, g, or t
  misc_feature (520)..(520): n is a, c, g, or t
  misc_feature (523)..(523): n is a, c, g, or t
gcaggtctcgtaaggtgaagctgggcccttcctgctggnaaaagcagaagancgagagtnagtggcaggagaatgnggggtgggctcactggncggagctcagctgggccagcaggcacggtcgtccccttggctgaatggcacaagtgaccctaggagcaacaggccaaggtgcgtgaagcccgctggctggctacggtgcttcagctggggccagggacactgccttcagtnacactagcagctatgacggtacctgggagggagggaagggggctgtgtgtccctgcctggcctgtgaggtatgtcgtgggatgaccgtgtgtatgggactctcaagcttttaccctaggtcaccactggattgccggcagatagaggaggtgggaccctgactctcacccctgctctacggtggatttggctctcagcactcccaggctgggagctggatgccctacccagggagcatgactcaggacntncaccancnctggtgtgcccaggataaccgttcncntanctggccgcctcagagtccagccccacac

SEQ ID NO: 379751 - DNA, 456 bp, Homo Sapiens
  misc_feature (28)..(28): n is a, c, g, or t
  misc_feature (93)..(93): n is a, c, g, or t
cctaacatgtgtttgtaccccagaacanaataaaagataacagatgtaatatgtgtgtacttatgtatgtatacaatgtggattattttttanaaataccccaaaagctattttcctctgcttttgaaaaaaagtttcattattagaagtaattggtcatttattttaaattaacactatagcaaaagggggaaaagtttttttaatactagaaatctgaaagatttattgaacttgaattactctgaccaagtatgtaattgtaacaatttgggaaatgtttcaaaatttgaatataaattttacagtttttcacactacatctacataaaaccagcagatgttggctgtgtgtgtttgtgtttatatactttacaaataaatacttagcatttatatagcaccttacagagcagtcaagcatcataaagtcattcattttatcattaaaggaaa

SEQ ID NO: 379752 - DNA, 485 bp, Homo Sapiens
  misc_feature (21)..(21): n is a, c, g, or t
  misc_feature (44)..(44): n is a, c, g, or t
  misc_feature (49)..(49): n is a, c, g, or t
  misc_feature (62)..(62): n is a, c, g, or t
tgaatggaggaggctgggtcnacagccctgcaatctggttttanggaanatggggaattgtntttgacttctattttgggaagctgaaacctccataaaatggaaatttcctttaaatgtaagaagactatgcaaaggattgaatagaacagcccatggatatggcagttgtcaactatagcagtactactgaaagtaacctgtccacaaactgtttttaatggtcttctagggcacaaggaacctgaaccagaatataaatccatgtactgctttcttcattgaaaaatgtcagtagaactaagcaatgtgcttagtgtcttagtttattttacgttgtggcacaaactccttatctcattcttagaccagtaacagtctgcataccaaacttagagtaataaatcaatatcaacctccaccaagatttcaggtgatataccaagggtctcttaggcctaaccaataactttgtttaaaaaaaa

SEQ ID NO: 379753 - DNA, 710 bp, Homo Sapiens
  misc_feature (13)..(13): n is a, c, g, or t
  misc_feature (35)..(35): n is a, c, g, or t
  misc_feature (53)..(53): n is a, c, g, or t
  misc_feature (62)..(62): n is a, c, g, or t
  misc_feature (108)..(108): n is a, c, g, or t
  misc_feature (117)..(117): n is a, c, g, or t
  misc_feature (545)..(545): n is a, c, g, or t
ccctttgtaacantgccttaacaaaccgcctaaanttaacctgtttaaaagcnaaaacaaanccctgaaaaggtccaatccatattaaaagctggtttgaattaattnaaaagttanccttttaggaaagaagccttttttccccctatgtaagatgtccatacctgccagatttaaaatatagacctatccaataaaatgccatgaagtgaatccatttgtgccttgatcatcctctccttgggtttttcctttaaaaaggggaatcctgcctataaaggttctgttgcttcaaaccaatgtcaaatagacttgatttttagagtcatggaattacagtgcaaccttgatttttattcccctcactgctatgagtgtgggcaggtactggtttatatgttataacttccgttttatctgtgttgtgtagttgaatggcttaatcgttgagtggtaaaataaaagattatattccaatacaagaatcctggaaagatttatgtgaatgacattttaagtaggcgcatctttgctgtttcttgtantctcgccattgctctgaccactcccttgcttgccctgtatatatacaaaaacttgtaggtgtgcacgtgtgcttgtacttctgtcttccatttctatcttaatctcttaaacatattgcttaagccactaagatgtccttgtttcaagtaaatcgtcacattgtg

SEQ ID NO: 379754 - DNA, 184 bp, Homo Sapiens
  misc_feature (23)..(23): n is a, c, g, or t
  misc_feature (42)..(42): n is a, c, g, or t
  misc_feature (51)..(51): n is a, c, g, or t
actcttgtaaaaaaatgtctatntttaatgtttgtacacaanaatccttcnattctagcctgcattgagcttgcatgcttgcataagagcttaagaaccattgatttaatgtaatagggaaaattctaacccaggtatccaaaaatgtgtaagaacaactacctgagctaaataaagatattgt

SEQ ID NO: 379755 - DNA, 482 bp, Homo Sapiens
  misc_feature (19)..(19): n is a, c, g, or t
  misc_feature (25)..(25): n is a, c, g, or t
  misc_feature (56)..(56): n is a, c, g, or t
attacccttccccttaaanatttgncccctgggggaaaagtaaaaataaatgtgcnccttaggggaaattaaaaagaattaagttgcctacattactcccttcaagccttcccagttcctaaatgtagatttcctaaaattggaaggcctgtgtttgtcctgactgaatttgcctttcagagtataaagtaaaataaccttttcttcctcatgcccacaagttcctctgagggacagtgcccaatagctaggataagcccatcccagggaatgggatattgatctgtaggacctaatggacgtaggataagtgcagtggggatacaggatgtattttcaagtgccagagaaaatacgaagagccaagtgggttggcatattatctttaaggaacgttacactctttctacctctgcttgcatttttgcgttcctcttttctttccttgcacccttgttttatctttatacagttaaaaaaaa

SEQ ID NO: 379756 - DNA, 343 bp, Homo Sapiens
  misc_feature (45)..(45): n is a, c, g, or t
  misc_feature (183)..(183): n is a, c, g, or t
  misc_feature (216)..(216): n is a, c, g, or t
ttatgttccaatgtaaatttcccagatgcctagaaaaatttgganataaatacagtccctttgcctagaactgacattttaaatggtgggaaaaactgtccagccctttaagagatgccctcttttcaaagtttcccgtgatactaaagttccccagctggtaacaaatgtatctgcttcccntgagtttcaatgtcccaggcctctttaaagtantcaggtatgcaaagacaggattatgcaagtttcttttagttggacaacctttattgatgaatttcttaggtttctgtggtagtgttgttagattaaatacagtcattccctcttgtctagtttcgtt

SEQ ID NO: 379757 - DNA, 372 bp, Homo Sapiens
  misc_feature (38)..(38): n is a, c, g, or t
tacaataccccaagagctaatgcaacatcccatttttncaccccctacatgaatcccaaaggaacagatgtggcatcttttgtaaaactgattccttggagactaaaaagcagtggacttaatcggttgaccctactgtggattggtgggtttcggggtgaagcaagttcactacagcatcaatagaaagtcatctttgagataatttaaccctgcctctcagagggttttctctcccaattttctttttactccccctcttaagggggccttggaatctatagtatagaatgaactgtctagatggatgaattatgataaaggcttaggacttcaaaaggtgattaaatatttaatgatgtgtaaaaaaaa

SEQ ID NO: 379758 - DNA, 338 bp, Homo Sapiens
  misc_feature (67)..(67): n is a, c, g, or t
  misc_feature (103)..(103): n is a, c, g, or t
aattcctactcagaactagcagtatacattttgcacaattaccttattgtgatcaatctctcgccantcttatctttttgtttatcccacatcaatatgggcnccagtaacatcctgtattgcagtgatgttgcatcctcctcttcccattatcctcgacaccactgaggctggaacagacaatttctttgacctataaaatgaagaatacacatgagcttatgaaattaaatgtctctttattaagaaagatgtcttagtaagtatgttcatggacattttggagaataacatttcttaaatgctaaagaggaaattattaaaagtttttattttag

SEQ ID NO: 379759 - DNA, 459 bp, Homo Sapiens
ggcaaagacccttacttgcctggtggttaccaaatgcaaatacagtgaaagaatgtcatctttgtgaattgttccctgaaatagttcacgagaaatcccatgaccgtaaagtactgtgatagtgatgtctaccactgtgagcttccagtactaggtgattggtctgcattcacagtgaccaaaatcagctatgtggcccaggtaattcactgctgagggctttggattttcctttatgaactactgaaatgaggtcaacttgactattactaagggacattttgctacaaagaatgttagttttgccaattccctttccaaatctaaaatttattttaaccaggattttagatgtaaacatcaagtagttttggttgtttcaatgaagtaacatgtttaagctcacattatttgaagtaccttcagttcctattgccatgaaaattgtatccagcagct

SEQ ID NO: 379760 - DNA, 475 bp, Homo Sapiens
cttaacttgccttggtgggttaacaaaatggcaaaataacagtggaaagaaatgtccatcctttgtgaattgttccctgaaaataagttccacgaagaaaatcccatgacccgtaaagtactgtgaatagtgaatgtcctacccactgtgagccttcccagtacctaggtgattggtcctgcattcacagtgacccaaaatcagcctatgtggcccaggtaattcactgctgagggctttggattttcctttatgaactactgaaatgaggtcaacttgactattactaagggacattttgctacaaagaatgttagttttgccaattccctttccaaatctaaaatttattttaaccaggattttagatgtaaacatcaagtagttttggttgtttcaatgaagtaacatgtttaagctcacattatttgaagtacttcagttcctattgccatgaaaattgtatccagcagct

SEQ ID NO: 379761 - DNA, 760 bp, Homo Sapiens
agattttagagacactgaataagtgtccacattttaaaagacagaggagtttatacagagaaatactatttctctcacttgtggcactgggaagagaaaacattgatatagatgcttttgataaagagtacaagatggcatacgatcgtctcacacctagtcaagtcaagagtacacacaactgtgatagaccaccaagtacaggggtgatggaatgtcgaaaaacctttggagaaccttatctttaagatgtatttgtatgtgtaaacattcaatgtatattgtatagtcagtgtataaaataacacttttagactctaaatattttttcttcaatttttgaaaatacaatttgtaaatggttcaaaagactccagaccagcttatgtaccagaatgtttgaagaagagaatagtgacaagtggggagaaagccactttgtttctcatttcttttttcttcttctttaactcccctgtaataggaaataaagtatttttgtgatgaggaaatccctaaacaaaattagttgccataaaatatgacaactgctttatggtttcttttggaagagacagattgaaaaatcatgaatggaatctaaacagaaatgtcagatgaacgtatttcctgttttcatagactattcaaatgttttgaccatgaagttgtattatacatattttaaattgtttatagtaagttgatatttttttaatttttaaatttaatatagcaaacttaaaatgaatttaaactt

SEQ ID NO: 379762 - DNA, 203 bp, Homo Sapiens
gtgtaatgaaggatttaagaatgggttgacattaataagaatgctttagaacagaagacaaactgtattgcattgtggtcagacatggttcaaagtcttgtactgccacttcctacctatgtatctttaagccagttatttttcatctccaagcctcaaatttctcacctgtaaaatgagaaataataaatagtatctacctc

SEQ ID NO: 379763 - DNA, 434 bp, Homo Sapiens
  misc_feature (27)..(27): n is a, c, g, or t
  misc_feature (169)..(206): n is a, c, g, or t
cctcagtttacggtccattttaactgntttttcctaattaccctaaattttgacctccataaaagcaaagatctggaatccctatatttttactgaaattgcccttacttccccatccccagtgtgaactgccttagaaaatgcctcaattgacccagttgcagtgggnnnnnnnnnnnnnnnnnnnnnnnnnnnnnnnnnnnnnnagatgcacacttgaggcccaggagttcaaaatcagccctggtctatattgtgaaacttcatctctacaaaagaaaaaattaacatgattgggtaacacacctgtagtcccagctactgggaaggttgagatgggaggattgcttgagcccaggaggttgggactgcagtaagccacgattgcaccactgcactaccaggtctgggtggcagagacaagaccctgtctc

SEQ ID NO: 379764 - DNA, 318 bp, Homo Sapiens
  misc_feature (54)..(81): n is a, c, g, or t
ccctgcccttacctgataattaacacattttcctcaaagcttttcctttttttnnnnnnnnnnnnnnnnnnnnnnnnnnnntaactggctgagcctaattttgttttgtattttaaagtaaagtatcatctgttggtagaaggctgtagtgtgatactattcttagtctgtttccctcactgagaggttcttttctgggtgtaagctattcctctccagctttctttaggcctggggttggcaaactacagctggctcctgaaccaagtccagcccactgcctttttttgtaaataaagttttattggcatgactagg

SEQ ID NO: 379765 - DNA, 405 bp, Homo Sapiens
  misc_feature (26)..(26): n is a, c, g, or t
  misc_feature (60)..(60): n is a, c, g, or t
  misc_feature (78)..(78): n is a, c, g, or t
  misc_feature (120)..(120): n is a, c, g, or t
tccttccaaaggaaaggaaaaggaantggaagaactttgcctactcccctggtaagaccntgaaatgtgattattttnataaataaaagaacccactatgaaactttccatgtgatttgntcctattaagcctaaacgtggaagaaggggaagttttccctagtattgtatgaaaaatgtttaaaatattttccaaggaagcctagtacattaacatcccccttttccattacccccattgggtggcacccttttaaaaacccaggttattaaaggattcacactttattacagttaaaatttaaggtttttatgtgtaagaagtgaaagaaactttgctaatttcaagttcgaattacagttgtgagattgatttatttaaataaaaatatgcctttgccagtt

SEQ ID NO: 379766 - DNA, 432 bp, Homo Sapiens
  misc_feature (20)..(20): n is a, c, g, or t
  misc_feature (36)..(36): n is a, c, g, or t
  misc_feature (61)..(61): n is a, c, g, or t
ccctactgttaaaaacaagntccaccaatgaaattnataacccctgattttttaagcctanaattaacaaagacggggttgaaaaaatcctgtccccggaatgagcatgcctcaaagaaattcctcccctcgtatgttagccttttgagaatgccgaaacccatgagtgtaaaatggcccatgcgttccgtcccagcaacaaaatgtaccctgatccaggaggtgttgccctgccatatattaaagcttgtgaagacattggatcagagacccacaaagccgttctgtgggcatgggccataaaggacagcaatcaaactggctcgactgatcctttctttcaaggtactttggtaggatgattgtggtcatctgagttctctgatttatgtatgctttatctctatctagcagaaattacctcaaaaaaaa

SEQ ID NO: 379767 - DNA, 307 bp, Homo Sapiens
  misc_feature (55)..(55): n is a, c, g, or t
  misc_feature (89)..(89): n is a, c, g, or t
caaagaccagccacagggtattaaggacacagaaaaaaaatccagaattagtccntttgtgttgtttaatttcctaccctgtgcctttncattgttttttccataatccttttctccttcagtggagtactgattgcatgaaatttgatgtgtaaaataataaaagacctttattaaatcattttaatatattttaaattaaacataggtttacatttgttttaattgtgtgcctacagttaaaagcagtatttttaatgtattttataagaaagacaatcaaataaacctcatcaattaattcaaa

SEQ ID NO: 379768 - DNA, 561 bp, Homo Sapiens
  misc_feature (17)..(17): n is a, c, g, or t
  misc_feature (50)..(50): n is a, c, g, or t
  misc_feature (95)..(95): n is a, c, g, or t
  misc_feature (106)..(106): n is a, c, g, or t
  misc_feature (279)..(279): n is a, c, g, or t
ctgccaatgaatggccnagctaaatctaaaaaccccgggaactcaggagncttctgaacttcccctgtactgtgcatcgtgaaggcccaaaaacnggaatgttaangaatggcaaactgtgttaccttttcaagtttatctcaataacccaggtcatcagggacccattgttctcttcagaaccctatctgggagagaaggcgaacccactccgggtttccatcatgtcaaggtcacaggcatccatgtgtgcaaaccatctgccccagctgcctccanagactgctgtctccttgtcctcctcggccctgccccactttcagggctgctgtgagatggaattcccaggaaagaacttcaggtgtctggaccctttctatctagataatatttttagattcttctgctccctagtgacctacctgggggcaaagaaattgcaaggacttttttttaagggtcagagttttcaaaacaaaagcatcttccctagaaatttttgtgaattgtttgcacttgtgcctgttttaaattaaattgagtgttcaaagccaaaaaaaa

SEQ ID NO: 379769 - DNA, 323 bp, Homo Sapiens
  misc_feature (48)..(48): n is a, c, g, or t
  misc_feature (51)..(141): n is a, c, g, or t
ccataggaatataccaaccaggaagaatgaaggccaatgtaaacctcnggnnnnnnnnnnnnnnnnnnnnnnnnnnnnnnnnnnnnnnnnnnnnnnnnnnnnnnnnnnnnnnnnnnnnnnnnnnnnnnnnnnnnnnnnnnnatgcctacttaatttttgctttattattattatgttaatatcatcaactgtaactagtgtacaacactaatgcaagatgttaataggggaaatcgtgttggagagagagatatgtgagaactctgtactttcttttcaatgtttctgtaaacataaagctgctctaaaaaattaaatctatt

SEQ ID NO: 379770 - DNA, 429 bp, Homo Sapiens
  misc_feature (16)..(16): n is a, c, g, or t
  misc_feature (30)..(30): n is a, c, g, or t
  misc_feature (60)..(60): n is a, c, g, or t
ccagtttgctgttaangccaaactcaatanggcccggggaaaggaccccgtaccttccanaattcgaagcccctgtggacgaaactgtaacctagcttaataggcagacaaggttgaaaacctaatttaggagtatacacctgtaacaattacaatagttgagtcttggccaatcccagcagcccatacttcaaccactcagagactgcctaagtgttcaaactgtgttcaaataagacaaacaccagcctgtaaccaatccagctgtttctgtacctcactgccgatttctgtatggcacttccctttctttgtctataaatttgttctgaccagggggcatccctggagtttctctaaatctgctgtgattctgggggctgcctgattggggaatcatgcattgttcaattaaactcatttaaaatt

SEQ ID NO: 379771 - DNA, 410 bp, Homo Sapiens
  misc_feature (25)..(25): n is a, c, g, or t
  misc_feature (45)..(45): n is a, c, g, or t
ccccccccgggccttccggaacacnggataaactgttgtaaacantaattccctaggtccgttgccccttccatacgagcatgtagactgtatatcctcaggccttcccttttatgtccttgggtaatcggttgaataaatacacacataagcccaggcaaaagtagaatttattcacatcattgtattgcaaaggttttaacactgtgttgaaatcttgcagtttcctgtgtaaactctatggtttggttttaccactttgaatagttaaaaatgtctatttgcttttacttaatttagtgcagttatgtaatgtgtatgcttatgttttctcttgacaaacgcagaaactctgtagtccattgtagaggagctcagtttaaaataaaagctgaaacattctgtgtgat

SEQ ID NO: 379772 - DNA, 161 bp, Homo Sapiens
  misc_feature (22)..(22): n is a, c, g, or t
gatgaggggactctaaagaggnaatgatgaatctgttatgcccaggaaatcaactacagcattgggactatagtttgtcttcttctcttgaaagtttcccgtggaaacaaaataagtagaatcccttaagaagctgtttcccggcctggcgcggtggccca

SEQ ID NO: 379773 - DNA, 395 bp, Homo Sapiens
gtccacaggtcctccaattgccaaagtaagccatgccaagcaagtaggcctgaactcttgtcctgtcaatcctagactcccttcccggatggggtatttaatcagcctctcccttccccaagcaccccagtggacttgaagcctcacagttagacagagatggcctagaggtgcccaagtgcctgtttatccataggtgacatcaccctgtgtgcctcagagttataaacataggcagcttgcctactgccaaatccattacaactttcagaggtgttcacttaggaagaggaggaaagagttttttgagaacccagatgggaacttagaaataagtaacattgacaaccaaatccttcagacacatcttcaagtttccaagagagtcagttaac

SEQ ID NO: 379774 - DNA, 410 bp, Homo Sapiens
  misc_feature (44)..(44): n is a, c, g, or t
  misc_feature (246)..(246): n is a, c, g, or t
ggccacctaggggagatggaccatttgcctttggggccagaggncagcctaccccgggacacatttccccactataattttaccaaagttaaatttaataagctagcattaagtaaagtgaagtcccagctcccctgcctaaaaataactagaggtaataattggtattccaggtaactcatttacagtcataatgtgttgtgaaaatttaatccttaaaaattaaatttttaaactatgtgggtnctgtgaatttctttaatgtcctaagaaatccagcttcataatttccatgatacaaagatcttttttcaggtggatttttacctttgttccttttgctctgatagacaaaatcagtttaggactattaaagaatgttttggaataaactgtctttttcctcaatg

SEQ ID NO: 379775 - DNA, 324 bp, Homo Sapiens
  misc_feature (118)..(118): n is a, c, g, or t
tgtttaattcccataagtttccctatttgtgtcctgcccctgatttaactgctagaaatattactcatctctttgtgattttaaaggaagcattgaccacctcccctgccttggtttnctctgtgagtcactgctagatacggctgtgggagcaggctgatgataggtaagaatcatgtatctagaatctctctccccacaaatatatgactttctagtaaaatcatgctttcaaaatagttgccattttaaatatgaatgtaagttttgatatgattaatattggaaagagccttaaattccaatgcataaatttaaaagaaa

SEQ ID NO: 379776 - DNA, 458 bp, Homo Sapiens
  misc_feature (41)..(41): n is a, c, g, or t
  misc_feature (275)..(275): n is a, c, g, or t
  misc_feature (403)..(403): n is a, c, g, or t
  misc_feature (406)..(406): n is a, c, g, or t
tttccaaagagctcttggccaaccctcaccaaactttggcnaaaagaatggtgttagtccccttctcccgggcacatgagaaaaacaggcctaacatcaggtctcagcggttccctctcacaggccttggcttggaaggctggagcttcggaccaaggcccagccctgtcacctcctcttcatgtgatgtggacccccgggagcatcagtgtccctcatctgtcccaatgacagcccttttcctcacagagttattgtgaagattcaacaatttncttggcatagtgcctggcacatggtgtgtgcttagcgcaaatggcagctctcatcatgaatgatagactctttcaccctgctggtcccaggtcggcacacacatcctcataatggcatttctcctttnctngcacagcactttattgttacaaagtactcttccaaaaagttaccctgtgtgt

SEQ ID NO: 379777 - DNA, 424 bp, Homo Sapiens
  misc_feature (24)..(24): n is a, c, g, or t
  misc_feature (45)..(45): n is a, c, g, or t
  misc_feature (55)..(55): n is a, c, g, or t
  misc_feature (64)..(64): n is a, c, g, or t
  misc_feature (83)..(83): n is a, c, g, or t
gctgaaaggccaacttttaaaatngattgggacgaatttaaccanggaatgatgngaccttctngggaactttttataggggngcttacatagtgtaattggggagaattttgtccttcctatttcccattcaacagtagcaaactggtggttttataaaattaacattatagtatgttatataaataaacgttatataaaatgacattaaagtataactgtgaaaaattaaagacttggcgttatccacaacctttatgtgcaataaggaaaactgcagtaggcccccaaagtgccgtctttccctagcattttactcaatgtttgcctttgtgtatgtttagattgctattgtaaagctagccatgtgtgttcctgccctttactgatatttaacacattttctcaaagcttttcttttttt

SEQ ID NO: 379778 - DNA, 404 bp, Homo Sapiens
gcctaataaactgtattgtaaaaccccacactgttaagtgtgtccttgaattttggaaagaaaaaaatatattttgcaagcctaacattttccttgaaacaatttgaggcatccatgtaaccttataaccgaatcccaagagccgttaggcagcagagtgtgttacccacattgaaatacacagtgctgctgttagactaaatgtcgtaggttgttaaccacatagaaacacactagtatgaagaaaactgttgtaaaatctcaagagcttcagaaactgccttacaagaccgcagcataagctattttgaagtatttaccaaatagtcacatgttgtaaaatatcaagtggttataaaaggatgccatttatatattaaaatttacataacattgttttctgg

SEQ ID NO: 379779 - DNA, 441 bp, Homo Sapiens
  misc_feature (19)..(19): n is a, c, g, or t
  misc_feature (61)..(61): n is a, c, g, or t
gttactcctactagataanatcacccttacacttcggtaaacactccctttaaataaccanttgttggtttcctcaaaagccaatatccccatattaaacagacaattccaaatgtgacaattccctctgtaacaaagaagcctgaattcctgtaataaatgggaaacatttcattcccagtcttcctcaggtaccagaatcatggacttcagtagaagagagggaatagggagagaggtgggaggctgatctgttacgtggcccagcacggtgctgtaattcctgacccttctggtttccacagatcattgcagagtaatgcttgaagcgtgtgactttggacttctgctgctttaaaaggcccagtggctttccaaccaaatccttagactcaatctattggtgtgtttgtctaataaattgctttttgtagtaaattt

SEQ ID NO: 379780 - DNA, 484 bp, Homo Sapiens
  misc_feature (15)..(15): n is a, c, g, or t
  misc_feature (23)..(23): n is a, c, g, or t
  misc_feature (36)..(36): n is a, c, g, or t
  misc_feature (273)..(273): n is a, c, g, or t
  misc_feature (432)..(440): n is a, c, g, or t
tgaattggtaacccngtgagccngtaaaaagcgggnaaagttagtgcctgttccctaagaattacccttccttgttgaataaaaccccataaaatgaaatccatccaaagcctcacacccaaatttttcctatccaaataaaactagtgaacagcttgtggctttttattagagcctcgcccacgaactagggtaaggtgagtgtccttagccatattttaatgcagttgcttactaaaggttttaaccgcacatgcacacacacacgctttncttatgcaatctatgtttgcacttgtgctttcagttagccttctgtaggaagtagaagtcatatgttgtctttgttgtagtgaaattatacagatagagttccatatattgtatttgtttcaatggtaaatccttttggaacatatagaatgcagagannnnnnnnnccattaaaataaatgggtattggtggttaaaactgctggacagt

SEQ ID NO: 379781 - DNA, 413 bp, Homo Sapiens
  misc_feature (45)..(45): n is a, c, g, or t
acaatttacccccaggaaatagggaaatgtgatttggaacccgantccttacctttaaacacctattttaatgccagcccgccttagtttcctaaaatagtccaaagggggtttttttgtttgttaataaataagcattttgaaagttccctagagaaagatgaaaaggaaactttagactgtggtccaaaagttagaaaaaatagaatgtatatacttgcttttagcccatttgaaattattttctgtttttgtttgtttctattcagttggatgttattgtaatttattgattatgttactgaaatattacctgatcctgatcaggttgtcttttaaaatgtctcagtgttctcaaattgccatttattgacatttgaattctgtttgcaatgaataaaaacttgtaaatg

SEQ ID NO: 379782 - DNA, 392 bp, Homo Sapiens
  misc_feature (39)..(39): n is a, c, g, or t
gggggaaaaaaccccttcaattcaggggcctcacatccncatgggacatccataggagtacacacgggagtaaaacccctataaatgtaaagaatgtgggaaagaccttccagtgggcgccacaggtcttattccagccatccagagaatcccacacaggtgaaaaacccctatgaatgtgatgagtgtggaaggcctttcccgagtaagttcagctcttattagacatcaaagaattcataccgcaaataaactctactaatatagcagtaatatcaaaagttctttggacactcaggcctaactagttatcaaagaatctattttagaaaccttgagtttcctcaatgtggtcaaagcttcagtcatcattaaacttctctggaccaaag

SEQ ID NO: 379783 - DNA, 172 bp, Homo Sapiens
aatcttgcaccctgcccatttaaaaagatgtgtaaagcacatattctcaacatatgcacattgatttataaatcatatatacaaactgttacattattcttcatattagaaaacaaatacaaaatagaacattttaaatggtgatataaaaataaattgaaactgaaattct

SEQ ID NO: 379784 - DNA, 388 bp, Homo Sapiens
  misc_feature (18)..(18): n is a, c, g, or t
  misc_feature (26)..(26): n is a, c, g, or t
  misc_feature (65)..(65): n is a, c, g, or t
  misc_feature (73)..(73): n is a, c, g, or t
cccctcaaaacccctaangaaaaacnggaccaaacaagggaaccccctgaaaaatttaaaataanaaaactgncctccccacaaaggtttccggggtaaaagatggttgaagaaaacccacacccccaataatggttgccccaaattgtgaagtcctaaaataattaaatttgccccggcctccctatttgaatcctgttgggttttgtgtaaatactttacatttccctaggtttcctttttttaacctgaacttacaactacatctgtaaagtagctccctagtgtcatcaaagtaggaaccacatcagaagaaaataaattgttggtgagtgactgtatgttaaaaattaaaaataaattagattggctgggcgtggtggctcat

SEQ ID NO: 379785 - DNA, 374 bp, Homo Sapiens
  misc_feature (64)..(64): n is a, c, g, or t
  misc_feature (106)..(106): n is a, c, g, or t
  misc_feature (201)..(201): n is a, c, g, or t
cccaacaagaggggaaaggaatgacctgggagggtgggaaagacattaggagttggtttttacnttttacccgggaagctttagcctacccaatcccagtaccccncctaactagaatgtatacacatcagcaggactgatctgactacctcattagagatatactgtacccattgggggccttgggggtactgctgttcntatgtgggattttaatgttgtaatgtattgcatcttaatgtattgaattcattttgttgtactatattggttggcattttattaaaataaattgtattgtatcatatttgtatgttttaagagaaaataatataaaatacaatatttgtactattatatagtgcaaaaactac

SEQ ID NO: 379786 - DNA, 465 bp, Homo Sapiens
  misc_feature (39)..(39): n is a, c, g, or t
  misc_feature (53)..(53): n is a, c, g, or t
aacccaagagggacaaactccaccccggagatgaacagnaaaccagttttccngatcgtctcccttaaaataaacgatcaaactcccttaaaggagatttccagactgcagccccatttaacaccccaaatgggggcattaattacacagactgccatatccccaacaacatgcgatactgcaacagcagcgtgccagaccctggagcactgccatacgtgaacagccagaggcccagcgttatcaaggcggacaattagactcttgagaaacacactcgtgtgtgcacataaagacacgcagattacatttgataaatgttacacagatgcatttgtgcatttgaatactctgtaatttatacggtgtactatataatgggatttaaaaaaagtgctatcttttctatttcaagttaattacaaacagttttgtaactctttgctttttaaatcttaaaaaaaa

SEQ ID NO: 379787 - DNA, 413 bp, Homo Sapiens
aaacggctttttggttttccacttccctgactcctgtccaaagaatttccttgccccttgagggaaagcccatgggagagtgaaacaaagaaaattagtagaaggcactgaatgcccaaaaatgtcttccttacatataattataatcaattatttcccattattgtcaatatccttccctaggatgtatcttgactgggaaaaaaagtaacttggaagagctaaagcagtatagatttgccatgctgattattttaaatgtaaccagaatggcttttgggaatgccaaatttttataaggtgcagtagacagatagaacccaaggataaaaactttcacatggttctttcagatttgatgtgcattcattaataaagttgtcagaacccattgtatcaaaccataaaaaaaa

SEQ ID NO: 379788 - DNA, 433 bp, Homo Sapiens
  misc_feature (54)..(54): n is a, c, g, or t
  misc_feature (61)..(61): n is a, c, g, or t
  misc_feature (126)..(126): n is a, c, g, or t
  misc_feature (176)..(176): n is a, c, g, or t
  misc_feature (309)..(309): n is a, c, g, or t
aaccaaatggtaagcccccaccccaaacaaagggacctacctacctcagccccngaaaagnggaaataccagcacctccaccatatgccgccatgtgaaatgaaccccccggaagcatttatgccncagtgtaaagaaccccagacataaaaggtccacacattttatgattcccnccctatatgaaatatcccagaagaggtaaaccctataaaaataaaatgtatatttatagcctgccgggggcttcagggtgaaggcataggaagaaactgtttaatgggtacggagttttatcttgcagcgggnggaaatgttttggaactaaagtcgtggttctacaacattgcaaatgcactcgatgccactgaactgttcactttaagatggttcgttatgtaaatttcatcttaataaatgcatgaagaaaggg

SEQ ID NO: 379789 - DNA, 435 bp, Homo Sapiens
  misc_feature (72)..(72): n is a, c, g, or t
  misc_feature (345)..(345): n is a, c, g, or t
agtcacttctgttccatctagcccaacatttgggctgtagaaagaagccccctgaattggattgtttatttncagagagatgggcatgattcctcactacttgcccctgtagtcgcttggaggaacaaatggcttttggagcccatttggttccccaaactttcctttagttttaataaaacaattattaaacagtgagaccctaatcctattacctaataagagtaagtgaggaaaacgtccactatcagctgaatgtgaattccttgtgggaaaggtttatgcaactttcggaggcccagtctgtacatctctgtgcccaaatgtggccatttccactttgtnccagcagagccctttaatcttatgcttcaaggggaccccctctccgtgccttgtctccggtctctgtttctgatatttcagatcctcttt

SEQ ID NO: 379790 - DNA, 527 bp, Homo Sapiens
tgatttcattcagccctctttgcaaccacatatgttaaatgtggttgccagttactagaggaaattgaggctcacagacattcagttgcagagccacacgtttcaagattgatttgaggtctacagtgatttctatgaccactgactccttctcctatttatataatcatctgtttcacaagtcaattatcagttctttgaagtcagggattagttttgtcctcagcaacaatccttagtgccttacataagtaacaggtgtgatcaataaccgtagcttttaatgattatgtatgtgatcactgtgcctacaatcatgtttatcaacgtctttgtaacaccctagcatgacttcaatattctcatttatcttttatttttaaatttgtgatacagcaatttttatgtatgtgtgtccctctttttatgatctttatttgcttcttgaaagcagtaggttatctgtcatgtaaattttcccagttctggatttggttgcatagcatcaattaaatatgttcacccaa

SEQ ID NO: 379791 - DNA, 132 bp, Homo Sapiens
aatatgtgcctatgtaataaagtctacacactggctatctctgtagaggtgaggttttgtttttagttgttctactgattatatccttttctgagctatgaaaatgaattattaataaaaaatttttgaaca

SEQ ID NO: 379792 - DNA, 451 bp, Homo Sapiens
  misc_feature (12)..(12): n is a, c, g, or t
  misc_feature (23)..(23): n is a, c, g, or t
  misc_feature (196)..(205): n is a, c, g, or t
  misc_feature (272)..(272): n is a, c, g, or t
  misc_feature (295)..(295): n is a, c, g, or t
gggaaataacgngccgggagccncccaagccccggccccagctcccaccttgtaaggaaaatttccaaaccccgcatttataataaaattgggcctagaattttaaaattgccataggcccacactttaggcccataagaccaggttgccggaaataatggtccattacccctaggtgttaatagcctgttaaggnnnnnnnnnntccaacattcctgtcagtagaaatgagaaagtagaaatacactttgggacacatcctaattccagtncataattttggaacagagtctgnctaaatagagcagaaatataattatcaacttttctgctaaataaaattcaagttttatttcttgcttagggagaacctctcagactgtgtttttcctctgctgtcacatcacaataatcatcaacaaagaagtctgtaagagcaaactgctggttt

SEQ ID NO: 379793 - DNA, 382 bp, Homo Sapiens
  misc_feature (11)..(11): n is a, c, g, or t
  misc_feature (77)..(77): n is a, c, g, or t
  misc_feature (82)..(82): n is a, c, g, or t
ctgtggtaagncatttccctttaacatcctcctcatttccttaatatcccatatataaacctttacatttttaattncaatncttttgaaaagtgttgtgtttccatttaaatgtgttataaaatgtttaaggaaagaaatatgactctaaaatgttttgaaagtcaggtttctgtaaagggctagctcctaaaatgacagcactcaaagaaggcactgagtagagagggaatgggagttgatgttgttagaaggggttttgccagagaaaccatttcctgcttgaaaaccactgtacgattgacataaacttatgaattatgtaagtttgttgaataacctaagcatttcttgggctttttccattctgatcatggccaaa

SEQ ID NO: 379794 - DNA, 480 bp, Homo Sapiens
gtaggaatgaccatatgcagattttctcataagcagtcattgtgtttgcccagtaatgtttgagagacatgtaagttgaaagttttgctaaattataaagctcctttaattcgttggttttgattctcttattctcttgtcttttctaaatgttaacaaaatatatcttaacagattacatgaaatttaggaattatttaaaagttaccattagctctaaaattaagattcggatgctttatttatagtaactgaagctaataatgttttatgttttgattttttgaaatttaattgtagaagtcactgccttctgagttttcaaatagataaccacctttaatattacactgcttataatactaatgtttacagatatgtttctgtttataaccatataatacattggctttgtcatattagttttttttgcaagtagttatgtaaaagagatagataataaaatattaaataactgag

SEQ ID NO: 379795 - DNA, 489 bp, Homo Sapiens
  misc_feature (69)..(69): n is a, c, g, or t
  misc_feature (80)..(80): n is a, c, g, or t
gctcccatctgcggtggcaaaaactgggccttgaacccttctggcccaaaaatgccccctggtcccccnacagacttccncaaagcgcaaagcacttggcccccctaacctgaagccctgaagggaaccctgaattcctactctgccctccccaaagtgggtgatccctccgtgcaggggaggacagccatcggagatcacactgcttcacagagggatcttcagctgcaaggtcactgctgtactggggcccacccttccctaagacagagagtcccccagggccaggaggcaccctgggaacccaaatggggctccacagaatacacgagcctccaaaaagtttagtattatgaagcatctgaatttttttctcttccagaatggctttaaaaagtagactcaggcccagagtcctcaggacatatcagaaaagctttgagagtgtcctgatctctgcaaagcctctaataaattggtcatttgggc

SEQ ID NO: 379796 - DNA, 439 bp, Homo Sapiens
  misc_feature (58)..(58): n is a, c, g, or t
  misc_feature (67)..(67): n is a, c, g, or t
gcgaaagcatccccaggccgcgtccctccctcggatcccccgtgtaagaccggccccnggtgtcggncacctaggaaatgtgtaaagggtaaaagtctgatgtgccaaacgttttacccatagttagagcccaaaagaaagacacttgccaattgttccttgagcaatgaactttcactgcagaatttcaggttagttacaaaaagcctcagttttccaatatacattgaataatccattgtgtactgccacccgatatgtgtgtatatttagatatacgtatatacacatgctgcggttctgaatttcattttttataacatgaagtgctgacatattttagtgaaggtcagcagttttctaacttgtgcctaagaattattgggaaatgaaaatgcatttctatctagcttcccaggaatatttctacccaaaatag

SEQ ID NO: 379797 - DNA, 358 bp, Homo Sapiens
  misc_feature (21)..(21): n is a, c, g, or t
  misc_feature (45)..(45): n is a, c, g, or t
  misc_feature (192)..(192): n is a, c, g, or t
tttaatgtaatagaaaaaatncccttttccaccgtaaatccacanttataaaactgaatttccttggcctcccaaatatgaatgaataagttttttaaaaagagcaagaaagcaagtatgctcccctatatgtcatccatatacattttggaaacttccagagtcttaaaaatcattctgacccaggtgtgngtgtcacgccctgtaatccaatcacttctgaaggccaaagctggtagactgcttgagtcccaggagtttaagaccggcctggtcaacatggcaagaacccatctctacaaaaaaaatgtataaattagctgggcgtggtggcatgttatctgtagttccagctgcg

SEQ ID NO: 379798 - DNA, 470 bp, Homo Sapiens
  misc_feature (18)..(18): n is a, c, g, or t
  misc_feature (31)..(31): n is a, c, g, or t
  misc_feature (64)..(64): n is a, c, g, or t
  misc_feature (91)..(91): n is a, c, g, or t
agcggccaagttcaagancaagaaattcagnatggcccaaatccaacattatgaccctcccccncccaaagactgtccccggggaccctgnccttttggtatgccctggggtttctgataatgtgtggagccctcattatggcctgaagagtttagtgttttcacagtgaagtgcagacatttgatttctttatgagttccctgtgttagaaatggctatagaaaaatttgtcataataatttcatttgcatgaaatcctgaggggtgcattaaggaaactaaaagcaccacttaccaaatctatcggcagaactgatgtgaggtaagtgagcatgtcaaacaaaataggagctcacatggatatatttatgtcactgagttgtcagaaattatgtcaaaatgaaaactgtttgtttcatgacaaattatatagtctataaattaaactggaagtaattattaaaaaaaa

SEQ ID NO: 379799 - DNA, 466 bp, Homo Sapiens
  misc_feature (71)..(71): n is a, c, g, or t
aaccccaagggaatggagacaatgaagctggggattccggggggccccaatccacggcaattcccaacccnggccaaagacagccccagaaacccttaggcccatttgcaaccacatacccttgtgagttgggattttccatcacttttacatttccaaaacaaagtcccagaagctgctttaatcctgagtgatgatatcccgtgtggctatttcaaaaaaagttccctcgtttctcggacatcattgaacaaaagctacagctacagcagaagtcactgtaagctgatatacttttttaatgaataatttcaatcttaatatcattgtaaaattaagctgtaattctgtctctttcatatttatgatatactgaattctatgtctaaaaaacttaagaactttaattttgaatgaggcatgtgaaaatatgttttgagaataaaaacacagcagaaaagattaa

SEQ ID NO: 379800 - DNA, 425 bp, Homo Sapiens
  misc_feature (36)..(36): n is a, c, g, or t
  misc_feature (43)..(43): n is a, c, g, or t
  misc_feature (61)..(61): n is a, c, g, or t
  misc_feature (70)..(70): n is a, c, g, or t
  misc_feature (79)..(79): n is a, c, g, or t
  misc_feature (96)..(96): n is a, c, g, or t
  misc_feature (106)..(106): n is a, c, g, or t
  misc_feature (142)..(142): n is a, c, g, or t
  misc_feature (213)..(213): n is a, c, g, or t
  misc_feature (262)..(262): n is a, c, g, or t
  misc_feature (332)..(332): n is a, c, g, or t
aaattcccccgcacttcctgctttgggggccacccnctgaganaagaactgttggccccancctattacncgtgttaanacagctgcctcaaatgnccctggaccnaacttgaaactgaaggtattcatgctttgaaggggntcttttcaaggactggttgagtgagtcactgagcaaatgtttttgaaaaagaattaagtaggagtatattncaatctgcagtatagaccagaggacagtaaacctacagtctggccaaanactggcctgcccccttgtttttgaatggtttgtaagctaagaatggtttttacattttgaaatgattganaaaaaaagtcaaaagaagaataatattttgtgacatagaaaagttataaaaattcaaattccagtgttcataaataaagctatattggaacac

SEQ ID NO: 379801 - DNA, 455 bp, Homo Sapiens
acacctgccagtgtcaggtctgggaaaacagttgcctgatgttttcaaggaatgtgaaatactgaaagctgcgggccatcccttggggaccactgaccccacactttgaagaaccctcaatgagtctgaaagaggttcagtatccccttgggaaggatgtgttcccaggctcccaggcctagtcttacatggcccagtggggttgaaagactgtgcccctgcaatggtcttttcctaagacagttgaacaaagttcccaagtctgtctgtcctattttaaccatctttaagaagcacaaaggggatatgagaaaaacagatgctgaaatgaaaattttaactgatatcttacttatctcacaagtcgtgtaaagaaagaaatgatatggtcgaatattagattagatggtttaatgatgttttgagtgttatatatgagctatgatgagacctag

SEQ ID NO: 379802 - DNA, 450 bp, Homo Sapiens
  misc_feature (24)..(24): n is a, c, g, or t
caaaagtccttaaaccaaggtgcncctaattggtgaaacaatgttgaaccttaaaaagtggtgtgtgcctctgtctgtcctgtctttgtctgtctgttgtatacagtgggtgcccatataaagctgatcaatggtggtgcttcctgcctgcttctgtgagatgggcaaaagattcagcttagaacaccatgactcaccttgccttggtcagcctttccctggcctgtagggccttgcacatatttttcccaggaggatttcccctccaccccacaggcatggatcagcttggtctgaggccccagctgtgtggggtccctctaatccccagatgttgctgaggctgaaggcctctgatctgataacatgtcagatagtaaaagatgtgggggtgggggtggagggctcctccttcataacagtttctaagaaaacttgttcccacctgtt

SEQ ID NO: 379803 - DNA, 602 bp, Homo Sapiens
  misc_feature (17)..(17): n is a, c, g, or t
  misc_feature (283)..(302): n is a, c, g, or t
  misc_feature (501)..(528): n is a, c, g, or t
cctgatgggtacataanacccccgggaagtcctcaaaccctagaaacatttcccaccctaagcatttaaaaggaaaaactggccccattccttctgaccccaaactcaaaaaaatatgaagtacttgccgtacctcccatttccgccatgaagattttaaaaacagatttcatttttgtcctgtttattttgggaaggtgccgtgggggtgttcctttcaagtgattcacatcctcaaaccccatacccactctcaacttttatttgatgtgttcaaagcccnnnnnnnnnnnnnnnnnnnngcagggctgaacacttaatttgacatgaagctgaaggactgagcaagccagaggagagaggttgaatgaagcatagccttggcttcataccacactttttgtgccttgtattatcaatgtaaattctgaatgttgtacagtaaacttggatggacttcttagaaaaggctgcactggcttctttttcagcacatgtacnnnnnnnnnnnnnnnnnnnnnnnnnnnnttggtaatgccaaacagctctgttatattgtattgaacaaaatggacggtttggatgttttatgtcgagtttgc

SEQ ID NO: 379804 - DNA, 259 bp, Homo Sapiens
cccctgggactccttagcaagcccattccacagtcctccatttagggaattttagtagagtctgctgaatttgtccttaaataggctgacctacaatgattttttaaaatgtatacaatccatgcactgccataacaacttttcagtcaacaacagatcaaatatatgatggtgatccccaggacctgaaaatatccctattgccctggtgacattatagccatcagcatgtggtagagcaacacattactcacttgtt

SEQ ID NO: 379805 - DNA, 474 bp, Homo Sapiens
tttagccgtaaatatagaaagctaaaaagttaagtacatacatattctccgttttgtgcttgcattttgcatcgggtcataagggtaaaagcagttagttgtattgtggagttttgcatgggtgcagttaacaatggatgtttcatcagctgagtttaatttagtattctctcttcattctatttatttggtcttgaaataaattcttttgcattcatttaaatattaggattgatcaggaaatagtgtttgtaatcctacacgtttatttgagccttactttaaaaatatttctgaacagagatttaagctctgtcagtattttcatttactgatagcatttatattttaaatatggcattgtatatttcattattatccttcataacagaattataatgagaatatgaatttgttatttttcttgttggtagatgtgaaatggtgcttcaaaaaatatatagtcttttctgt

SEQ ID NO: 379806 - DNA, 425 bp, Homo Sapiens
ccgtcccccaagtcaagagctccctctgctcctcgcttgaaatgaattcagggtcagggaggtggctcagagtccacctctcattgctgatcaatttctcattacccctacacatctctccacggagcccagaccccagcacagatatccacaaaccccagccctgcagtgtagctgaccctaatgtgacggtcatactgtcggttaatcagagagtagcatcccttcaatcacagccccttcccctttctggggtcctccatacctagagaccactctgggaggtttgctaggccctgggacctggccagctctgttagtgggagagatcgctggcaccatagccttatggccaacaggtggtctgtggtgaaaggggcgtggagtttcaatatcaataaaccacctgatatcaataaaaaaaa

SEQ ID NO: 379807 - DNA, 239 bp, Homo Sapiens
  misc_feature (28)..(28): n is a, c, g, or t
  misc_feature (35)..(35): n is a, c, g, or t
  misc_feature (56)..(56): n is a, c, g, or t
  misc_feature (70)..(70): n is a, c, g, or t
ggaaaaacctcaactcttgaactgtagnctccctnacctttcaaggcctatcaaanggtgaaacacacantccccaccatgaagcaaaaccctatcagggcaaaaagcagcttccctggcctaattaccctttcctaggttccaatgtcccccttcagtttgacccctgatcattaagttgttgtagttcctctgggtcctttaaagatagttttaatggcccaggcatggtggcttat

SEQ ID NO: 379808 - DNA, 507 bp, Homo Sapiens
  misc_feature (14)..(14): n is a, c, g, or t
  misc_feature (39)..(39): n is a, c, g, or t
  misc_feature (48)..(48): n is a, c, g, or t
  misc_feature (54)..(54): n is a, c, g, or t
aacctttccacaancccccatcctgtaataactggtgcnaaccctaanggtgcnttaaagttttacctactttgccagatttgcaatgccgccaaataatgccagaagagccattaaaaaacctttgtaaaaaccccatgattttggataaacttttaaaagtagccgtttatatgtaaatagaactacacatggcacacacacttgccacaagggcctccagaaaaacgtgcaatataggtgagaaaaatgtcctattgaaactttcctcacaggctgccccttataattaaactagtgttggggcaagcaacatcctgtttccaagtagatcagggactagcaaacctaaaaggcagcaagcagcctgcagtttgctcaatccttaagaatacatggttcatacaacatgcttttactatgtcttaagtgtgacttttgaaagatacaagtgttctgtgcatatttgtgtaaataaatacataattttccaccttgtaaaaaaaa

SEQ ID NO: 379809 - DNA, 458 bp, Homo Sapiens
  misc_feature (14)..(14): n is a, c, g, or t
  misc_feature (39)..(39): n is a, c, g, or t
  misc_feature (77)..(77): n is a, c, g, or t
  misc_feature (96)..(96): n is a, c, g, or t
  misc_feature (170)..(170): n is a, c, g, or t
cggacgccccgggnaaaaaaacctctatgctgcccgtgnaaggaacacacagcctgaagatggggtggaaaatgganactcgggctgctgcatctnaagcccccccaggatgtgaccctaacgccccagctgcacagcttgacccctcagacggaaggcaactgagcctncctccatccccaggaaagggaacctcccagctgagcccagcatctacgccacccctggccatcccactagcccggagggtacgcagactcccacactcagtagaaggagactcaggactgctgaaggcacgggagctgcccccagtggacaccaatgaaccccagtcagcctggacccctaacaaagaccatgaggagatgctgggaactttgggactcacttgattctgcagtcgaaataactaatatccctacattttttaattaaagacaacagacttctgcaat

SEQ ID NO: 379810 - DNA, 239 bp, Homo Sapiens
  misc_feature (151)..(151): n is a, c, g, or t
gggacaatgccctctgtccccaattctgagtaacagctctggttcttgccactaccagagttctctagcaaatctgagcatctgacagggtgaaaaattctgaatggcttcctgatgcctgactttatgggatcaaattcaagttgcacgnctgactcagtgcccttctggtatcatctgccaagaccagggcctgcttcaccacagccacaataaagtcctttcaagccctgaaaaaa

SEQ ID NO: 379811 - DNA, 199 bp, Homo Sapiens
ggtaaaccaagtgatcctgcctttcagcaactgtcttattttggttctttgaaactgtgatttttatttcatttgtacccaaccattgtaagtattttgttttgtttcctggaaattctgttttgaaacagaaaataaaggctgtgttaaatgagtatgttatcttattaaaatgctgccatagtcactgcaaaaaaaa

SEQ ID NO: 379812 - DNA, 428 bp, Homo Sapiens
  misc_feature (52)..(52): n is a, c, g, or t
cccctatccaatttttttggaaaaaggtaccccaatggaggatcaggaaagnttaaattaagaaaaaacatccaagttgaaatcccccctgtttttaaataagatgggggaaaacccaagaccccagagaatataatcccaaagctaccctgtccacataggcccacaatttccttttcccaatattcctgttcctcgcctgttccttcctaatttgcagaactccctctttaaaaaacctttggagaatgtattggcctcataccctcttccttcagcctgaaagacatgcacctgtcatttatttatgatatttaaatgcaacctctagaacaggggtgtccaatcttctggcttccctgggccacattggaagaagaaatgtcctgggccacacataaaatacactaatgatagccgatgaactt

SEQ ID NO: 379813 - DNA, 413 bp, Homo Sapiens
  misc_feature (21)..(21): n is a, c, g, or t
  misc_feature (218)..(218): n is a, c, g, or t
ggcccttttaaacccgttaantttttaaagacccccagcagtccatttgagttataccccataaaaattataaaaggatttttgaaagtataaacaaattgtccagtgaaataaatgagattttggaataaagtgagaatgggagaagggatatgttgtgagccatataccctccacagttcttaataccctgttttgtaatccatgatattccagtncaaggcattatggtttttaatccttgaaacttagagaaccctttgaatatttgcttttactggtgtacagtatgagtggaatataaactgtacacataattatcatgttgatataaatcataatttcaactagatcaagacatgttaaccttttataaatttaaagtcaataaagcacctttttaaaggaaaaaa

SEQ ID NO: 379814 - DNA, 852 bp, Homo Sapiens
  misc_feature (444)..(444): n is a, c, g, or t
  misc_feature (449)..(449): n is a, c, g, or t
ttttgcaattcatttgggaatttatttttttctaaagcggaacaaaacctaattatgaataagaaacatttaaatggcaactcttaacctatagtgcaaacaccagattccacaaaactgaattcctttgtcagtaatccaatatttagtagtagctgctgcttttgtggttgttggttagttaaaattaagtaatgattccagtttagaagataaagtttcagtgtgaattttagtagaagtcataaaaatacctgagacatattagaaaataagattttccctcctatttaaaaaaaactctgcagacttttatttgaagcccatcttttgaaaatcactaacatttcataatcatttcctagtgttttgtttcactttctcgatgaataatatttccccatttaagtttctcaaggcattgattgctgggaaaatttcccnacggngccctcaaaacgtccccccgtggacatgagtaaattaaaacttcgtgcatgtcaagctacacgttcatcgtctcctttctcagctgaggccatgagtggacccatcagtggctccaaagtcgtagaagtactaacatgttaagaaaatacatttttaagggtcaaaacaaagttacacagaagcaaatatcagggaaggacttcaaaaggcctcctcagcattgagtgtccgtgtcttcctgagattcttcagtttatcaatggcagaagttactaaaatctctccatgaattttgttgtctcttgttcgcacgtttacagcattatctatcttttccttttctccaaccaccaaaataaaattatactgagccagctgtgcatttcgtattttcttatttag

SEQ ID NO: 379815 - DNA, 449 bp, Homo Sapiens
  misc_feature (21)..(21): n is a, c, g, or t
  misc_feature (33)..(33): n is a, c, g, or t
  misc_feature (39)..(39): n is a, c, g, or t
  misc_feature (110)..(110): n is a, c, g, or t
  misc_feature (122)..(210): n is a, c, g, or t
tccttgatgtcgggagtcccnaaaaaaccctcnccaacnggcaaaaaccccgtctcctactaataatacaaaaaattagcccgggccatgggtggcgcacgccctgtaanccccagcctacnnnnnnnnnnnnnnnnnnnnnnnnnnnnnnnnnnnnnnnnnnnnnnnnnnnnnnnnnnnnnnnnnnnnnnnnnnnnnnnnnnnnnnnnntgacagagtgaaactgtgtctcaaaaaataaataaatgttacttgtcattcctgtcattcttcttactactgctgctgctagtggctattaccatttctactactatcccagagtctgcccatggcactaaagctacacggtaaatgatcaaggagaagagtggtgcaaagataggagggcgagaaaaagctgtgagttgtttattttaagtatcttatttgataacttccctaacatt

SEQ ID NO: 379816 - DNA, 549 bp, Homo Sapiens
  misc_feature (205)..(205): n is a, c, g, or t
  misc_feature (520)..(520): n is a, c, g, or t
tcgtggtcctgtaaggaagtttgaggctgagacccgaaaagacctgggtgcaagcctccaggaaccctgaagggagtgggctgagggctggcccaagctccctcctctccctctgtagagcctaggatgcccctctgctgcagcggctcctgagctcatggagccctcagccaccccaggggcccagatgggggtcccccctggncagcagagagccgtcccctgtgcctccagactatgaagatgagtttctccgctatctgtggcgcgattatctgtacccaaaacagtatgagtgggtcctcatcgcagcctatgtggctgtgttcgtcgtgggccctgggtgggaaacacgctggtcttgcctgggccgtgtggcgggaaccaccacatgaggacagtcaccaactacttcattgtcaacctgtccctggctgacgttctggtgactgctatctgcctgccggccagcctgctggtggacatcactgagtcctggctgttcggccatgccctctgnaaggtcatcccctatctacagacaggctg

SEQ ID NO: 379817 - DNA, 491 bp, Homo Sapiens
aacaatgttatatgggcaatggctattttattcaagactattacaatagggaaaagagactaggactcagtctgaactgaaatctgtcaaaacaaaggggggtggggctttaaagaagtgaaggtgaggaggagatcacacaccgtatgtgtttgcctaactggctttaccccaaaagaaaattaaactttctttgatctgtacaagttgatcaaacaaatggggtcattcttgtcatatgcaactaaaacagggtagacaggcccaggggaaaaaggcactcagggcacacagcattgcttcaaaatataattctctacaaacctagttgctaaaactacctgttgtaacctaaaaccagttttatctaacagctattaaaacaacctactgtgactgcaaaactggttttacccaccactgtcacacaccaatcagaacttgccagctcctcaaaactttactagggccaataaactttctttcaaaac

SEQ ID NO: 379818 - DNA, 467 bp, Homo Sapiens
  misc_feature (17)..(17): n is a, c, g, or t
  misc_feature (24)..(24): n is a, c, g, or t
  misc_feature (47)..(47): n is a, c, g, or t
  misc_feature (69)..(69): n is a, c, g, or t
ccactggaccccgggcnggtcaangcctgtaagtgaagcccgtggangcactgcagtctgggcaacagncccaagacccctgtctcaatcaatcaatcaatcaatactaaagtccaaaattaataggaaatgaccctttatttaacaagggaaagttgtccatcaccctaaacattggattccaacaacttgattttaataaagttttactgggtgcccagatgtatttacaagcaaaagcaatgggaatggtgtagtcagttagtgagggcctcttttcccatcatgtgtaaccaacttctaaggttttcagctccaccatgattctttctcatgaagctatcaagcacagcctgttttcaattatttttgctttttgtccttcatttaaagtagactaatgcaaaatatgctatcttaatatcatgctgtttctaaataagcaataaaatattttctgtgatcgg

SEQ ID NO: 379819 - DNA, 452 bp, Homo Sapiens
  misc_feature (48)..(48): n is a, c, g, or t
ctgggcaatttttaaacatttggatttatgtcaaaaaaatagcccccnaagtgtccctgcccttggggtaaacagggttatggggttactcgtatctgccccttaaggaacaagttcctacccctgttccttccctcccggctccctggtcccacccccaacttccagcagaattgtcctaggaactactggatacccaggatacagtaaggaagagattagatctgacacaatgtttacttagcaacagcaacaaaacaacagcagtagtaacagtggaaagaggttccgtggtttaagagtatagagcctggaatttcatcttcaagccttggcatcaccatgaattcactctgtgacttatcttctctcaaccttagttttctcttctgtaaaagagataagatacttcgcccaatagtacacattaaatgctgtatatataaaaaaaa

SEQ ID NO: 379820 - DNA, 361 bp, Homo Sapiens
gtccaagggtcctatccatcctgaaatataatagtatttttgggggcccctgccataatagttcctgtattattttttaggaaagccttccccactcccaagagaaaaagtaagttatttatatatcccacatccttatgggtctttgactttcctattctcttcccactgaattgtctatttcccaatttcagttgttacaatatttatagctttataatttgagctaatatctgccattttaaagctttttttctggcttctgttgcatttttatgtctttatttctttcagctattatacaaatgatacaacctgctatggaaaaaagagaaataacagataagtatacaaagaaaaa

SEQ ID NO: 379821 - DNA, 454 bp, Homo Sapiens
  misc_feature (25)..(25): n is a, c, g, or t
  misc_feature (41)..(41): n is a, c, g, or t
  misc_feature (46)..(46): n is a, c, g, or t
  misc_feature (53)..(53): n is a, c, g, or t
  misc_feature (61)..(61): n is a, c, g, or t
  misc_feature (138)..(138): n is a, c, g, or t
cccatggccccactccttgggaaanaagccccctaaaaggnccggncactacnagtttggnagcctccccgcactcaccgaaaccgccatggtgggtgtggtgaattatagcaaatacaacctgattatccttgaaanttttaatgagaatatcctttgaaatgtatgtccatggggcattttaggaagtatgcctaatcccgtataataatgtagactttcctttcctcagtgcttgcctctcgtgcttctctaaactacagcccttgataaagattctcttgactgaaatacgttattctccccagagaaggatgctgtagtcacttattttaatataatggttttagaggtcaacagttctagacagatgccatatctggactgttttgtaaaacatctttaaatcagatctctattcatacatttgcaaataagtaaaagtttgtaattt

SEQ ID NO: 379822 - DNA, 368 bp, Homo Sapiens
  misc_feature (34)..(34): n is a, c, g, or t
  misc_feature (100)..(100): n is a, c, g, or t
  misc_feature (214)..(214): n is a, c, g, or t
ccagaccgaccaccagcagtggtttttggaaaangggaaaataaaaccttgatgaaattaggataaacccccagataccaccattgtaaaccccctaccnctaggtgcctccttggtgagagacaggccttgttcctccttgttccataacatttcctctgtcaaagaattcctcctatggagtgaagtcgaatgaagtgaataatttacttanccaaataaatttatcaatttacaaatctgctctacatctcacttttgagttcagttgtagtcatgagtgatccttcatattttattaaaagtgttcattcaggtaaggtgtatgttgaaattttgccaattatcttaataaaacctggcaattt

SEQ ID NO: 379823 - DNA, 141 bp, Homo Sapiens
agttctgaagcatgtttagatttttctgtacttgtataggtctgattgtttatgtggcttagctaaggtttcctaaagcatcttctagtagctgtcattggtttgtaaaataaaatttgggctgtcaaaatgcaaaaaaaa

SEQ ID NO: 379824 - DNA, 386 bp, Homo Sapiens
aaggacctagaaaggaaaaactggaaaaaacgtaacggtggcctcctgtccgccgtcctgaaggtccatggcctatccaaattgggaacttttgaccaatgtcctggaagaacgtttggattgtcacgccctggggagggggtgcctactggcaactagtaggtgacacccagggatgacgtctgagtatcctcgcaaggcatgggacaccacagccaaagaagtgctcaacttgaaaacatgaatcgtgcctgaagttgagaacctttggtctaagatcatgggtcattttattttctttacacttgttgttatttttcaaatttcctaaaatgaacacattttacttttatagaaggcagatacaattttttacttaaaaaaaa

SEQ ID NO: 379825 - DNA, 521 bp, Homo Sapiens
  misc_feature (19)..(19): n is a, c, g, or t
  misc_feature (28)..(28): n is a, c, g, or t
  misc_feature (36)..(36): n is a, c, g, or t
  misc_feature (45)..(45): n is a, c, g, or t
  misc_feature (74)..(74): n is a, c, g, or t
  misc_feature (84)..(84): n is a, c, g, or t
  misc_feature (108)..(108): n is a, c, g, or t
  misc_feature (122)..(122): n is a, c, g, or t
  misc_feature (227)..(227): n is a, c, g, or t
cccccccctaaaaaacggnggggacccnacaaacgngtggaaggntgggccccaaaggaagccgggtaaaaaanaggtaaaaancccttggattaaaacatttaattnccctaaaaccaccncccatttgtcctcattaccattgtagaccttgttttaacccaagtcagaaagctgattttccctcaaattaaaccccctcccaatgtgatgggatcaatttgggntcctacatgtaattgattagtgccctaatatttttacactagcccacttactgagcattttatatccccagttataaatatgaaaacactgcatgacaatgtgttaaaacattatgacatcagtgctcattttattgacatcactgtagctttcaggagaaaaatgttattttttcttgaactctaatagaaatacatagaaaaataactttaagatatgttttgtgaaattgcttaggaaagaaaaaaattttatgcccatgtgaataaaaatgcctgcttctctttcacttt

SEQ ID NO: 379826 - DNA, 501 bp, Homo Sapiens
  misc_feature (21)..(21): n is a, c, g, or t
  misc_feature (26)..(26): n is a, c, g, or t
  misc_feature (46)..(46): n is a, c, g, or t
  misc_feature (51)..(51): n is a, c, g, or t
  misc_feature (288)..(288): n is a, c, g, or t
gggattaactaaatatggccngggtnccagtttttattcccattcngaaangcttccctttttattgttggaaactgaaaataaaccaattgttgaacccctttggattttacctcattttaaaactgttttaatttattatttggcttgttcttaatattagtcactaaaagcagtgggagcattgtcttatgaaatgccttaggaatcattttatatagtacatgtacaacattaaacgtgtttaaaaaagaaaaaggtaccagcgatcacttgtcccttgcccantttttccttgtaattatgttagacaaatccttggcggcggggggatcaaaacataattgttttaattctacagctgtaggagctttgtattgctgaactttcatctggaaaagtttcacagtgacatttttaaaagagaatttttttatctgccgaattctaccagtgtaaccttttttctaaataaacaatagttttctcaaatggttgtaa

SEQ ID NO: 379827 - DNA, 399 bp, Homo Sapiens
  misc_feature (28)..(28): n is a, c, g, or t
  misc_feature (35)..(35): n is a, c, g, or t
ccaatgtaaaataaaaatccttagtgcnatcccgnaaagacccagaaaagaaatcctcaggcctaataaggaatcccggtttgccatatgcctgtcaaaagggtgtcatcctaaccgaggtttccagtgtaaatgaggtcgctgtgcaacttggacccatcctggcatagagcaagctgcctttccttgtttttcctagtatagttcctcactgccttacttaaatcgagttgataaacttaatgcaactgtttctatgatcctagagaaaggactgaaatgttattgaaaactttccgactgtagtaagctttaggattttgactgcactactgtgtttggtgactgtgccagtcccttgctttctgtgtttgctctgcctttggtatcttagcaaag

SEQ ID NO: 379828 - DNA, 420 bp, Homo Sapiens
  misc_feature (45)..(45): n is a, c, g, or t
  misc_feature (90)..(90): n is a, c, g, or t
tggtggggcctgaaacctgaaggcccttcccaaaaaaagcaaggnaaaactgtgcctgcaacccccatgtgggtgaacccaggtcctttnctccctgaatagtcacctgctggttgttgcccaggttacagctgctcttgcatctgggccagaagtcctccctcctgcaggctggctgttggcccctctgctgtcctgcagtagaaggtgccgtgagcaggctttgggaacactggcctgggtctccctggtggggtgtgcatgccacgccccgtgtctggatgcacagatgccatggcatgtgctgggccagtggctgggggtgctagacacccggcaccattctcccctctctcttttcttctcaggatttaaaatttaattatatcagtaaagagattaattttaacgtaaaaaaaa

SEQ ID NO: 379829 - DNA, 354 bp, Homo Sapiens
aatataatggattaaagataatgtaccatatggagtagtatataactgaccatccagtatccataactgtgaatgatgtaagcctttcattttttgtgaattaatgaaaaagtaattaaagttaaactacggtcagaaaactgacatacactaaagaagttactagttcattttcaagcttttaaatagaatattaactaaactatggaatgtaggtattcctagacccaataataacatcagtgaaatgagaataaaagtttgttgtcaatatgtattatagcaatgaacttggatcagtggtgtgataaactaacaattgttgacaataaaaaaggatttcttaaaagtttc

SEQ ID NO: 379830 - DNA, 459 bp, Homo Sapiens
  misc_feature (27)..(27): n is a, c, g, or t
  misc_feature (39)..(39): n is a, c, g, or t
  misc_feature (45)..(45): n is a, c, g, or t
  misc_feature (51)..(51): n is a, c, g, or t
  misc_feature (67)..(67): n is a, c, g, or t
  misc_feature (159)..(159): n is a, c, g, or t
gaaggctccgtccagcgactcaaaggnatcccctttgtntggccnccctgnacagcatggctgcctngccctccccaaagaaaaatgtgctgagtctctcgggtttatcctctgacccaggagacctggacccctgagtcctgccccactttcccactnacctttctccactgggtgccaagtcctagctcctcctcccgggctatattcctgacaaaagttcccatatagacacccaaggaggcggaggcgctcctccctgcctcagtggctctgggtaactgcaagcagaacttccaaagagagttaaaagcagcagccccggcaactctggctccaggcagaaggagaggcccggtgcagctgaggttcccgacaccagaagctgttgggagaaagcaatacgtttgtgcagaatttctatgtatattctattttattaaattaattgaatctagt

SEQ ID NO: 379831 - DNA, 478 bp, Homo Sapiens
  misc_feature (16)..(16): n is a, c, g, or t
gctgcttttacaaganttccttaggtggtatttaacccatcgatctaataatgatgaactcttggccagccctttgggagtttgttaaaatgaggtgatacagttctgaaattgagcattcctttatgatattcactctgttcctcttctgcagcccaccagtgggagagacaagcccagtcctaagagaaaaggtggtggcagccacaaattctaggtacactggctgctgcctatcctgtccctggatctgaggcctttcccttgccatagaaatggttgctggtagcagtagagagcactgtgcacctgggaatgaggaatcaggccccaagacagaagtacttggaggagccagctgcagtagtatccgcctgtagtcccagctactcaggaggctgagacaggaggattgcttaagcccaggagctcaagtcccacctgggcaacatagtaagatcttgtctcttaaaaaaaa

SEQ ID NO: 379832 - DNA, 530 bp, Homo Sapiens
  misc_feature (41)..(41): n is a, c, g, or t
  misc_feature (70)..(70): n is a, c, g, or t
  misc_feature (82)..(82): n is a, c, g, or t
  misc_feature (90)..(90): n is a, c, g, or t
  misc_feature (114)..(114): n is a, c, g, or t
  misc_feature (399)..(419): n is a, c, g, or t
ctagggaaaagcccctcaccaaacccccctacgggaacctncccttgaaaaatgtgcgacttcaacaaangccaggtgaaanccacttgncctctaaaaacagacgttactaantaggagtgtcacccagctgcccaaaatcgtaggtgttggctctgctggtcactggagtagttgcctacccttcagaatatggacaaagaaggcacaggtgtaaatatagtagcaggatgaggaacctcaaactgggtatcattttgcacgtgctcttctgttctcaaatgctaaatgcaaacactgtgtatttattagttaggtgtgccaaactaccgttcccaaattggtgtttctgaatgacatcaacattcccccaacattactccgattactaaagacagnnnnnnnnnnnnnnnnnnnnnatacaaacatgtggcaacctgttcttcctaccaaatataaacttgtgtatgatccaagtattttatctgtgttgtctctctaaacccaaataaatgtgtaaatgtggacac

SEQ ID NO: 379833 - DNA, 483 bp, Homo Sapiens
  misc_feature (26)..(26): n is a, c, g, or t
  misc_feature (51)..(51): n is a, c, g, or t
ggaaaatttgataattttaaatatcnaacccaaacccaataagttaatatnaaaatatgggccaaagttaacattccactgggagaaattttagcactcctccaaaaataacatatccagttccctattatcccagtaaattccctacccacgtccccacgcctccccggaagtgtgtcccggattccatgtttttcctgataggtgaatgccaaagtcacctagcccattgcccatttgcccagggattccagagagacagaagtgtggaaattaacatttagatgtatgagaaatatatgcaagaaactgagactgagcaggcaatttgtagattgcatacagtgtagcctaaacatgtttgcttcagtgaatttgtcatttcttgcatggggtaagtctaaaattatttattgtttaatttttttcattagaaataaaccctcttggaagtaattaaaatgcatatttcagcaaaaaaaa

SEQ ID NO: 379834 - DNA, 419 bp, Homo Sapiens
  misc_feature (17)..(17): n is a, c, g, or t
  misc_feature (34)..(34): n is a, c, g, or t
  misc_feature (41)..(41): n is a, c, g, or t
  misc_feature (152)..(152): n is a, c, g, or t
tattttaacacttaaantcctgggccaaattttnaaaacantttttagtctgtaatacaccccacttgaagccacttaagtccttcccttaaatgacttttccttaagtaatgataccgtgtgttttcccccaaagcaccttttaaaaaaanttttaataaattacctatcctgttgaaaaggtgtccttttccctttccttcctagtatttttttccttacccaaaattcactaatcttgaatgtttgtgatattaaatttcaaatgcagaatacttgactcatttaaagctaaattttgttactgattcaattataattgtaatggatttttgactttgtaatggattcttttcatcaaaaagccttatttttttatctatgtggaaaacacaataaaaaatcctcaacactattgt

SEQ ID NO: 379835 - DNA, 427 bp, Homo Sapiens
  misc_feature (85)..(85): n is a, c, g, or t
gagctatgggattatttcattatataatacaatgtaataataatacaaataaagtgccataataaatgtaatgtgccttgtcctnccctaaaactatcccccctacccctccccatcccgtggaaaaattgcccttcccataaaactggtccccggtgtcagaaaggttggagacccactgatcctaaatggggaacaggacactgtgccctgtttgcctcagtagctgaatgaagcagtatcagtcatagataaaacatggagtttctaagtagtgactataatactttattcaacacagaaagtaagagcaatagagcctttactgggttaagataatactagtaattaataatttgtagagtattttatttatatttaagataaatgctcttttttattatagaatgtgtatattttcactgag

SEQ ID NO: 379836 - DNA, 462 bp, Homo Sapiens
ggataattatttaaaggaattttagtttgtttaaaccgggttggtctaaacattaatccaaagatcccccttaaattgattgcctaaaattggagaacaaaataatttgtacactgtttttgaaaaggaaaactaaatttgcgagttaagcaaatttaaaatgagtattgttagaaccagatgaatgatgatacatgtggactttaggaaaataacggtttgtaactacatttttccttataaaatggagggtttaagagccgtcggagacctcccaggcaaattaactgaaatggctgtgttaatagcccctaaatcctggaggagagaggttcattgatttaatccacgataatcccttaaaaaatgtttgccacaaaatcagagctcagaaagtgttattcttctgttgttatctgtacagttttcattaatctatttctcaaaatatggataattcct

SEQ ID NO: 379837 - DNA, 279 bp, Homo Sapiens
  misc_feature (35)..(35): n is a, c, g, or t
  misc_feature (85)..(85): n is a, c, g, or t
cccaaatggccaaccccaatcccctgaaatcctgnaagccctccccatcccggtaattgtaagctcagtgggtgaaaatcctgcnccaagcttaaagtccttccccccaccttttacctattccccttattcctgaagatagatgaaaaaagtgccattttcccttacccccctgcccagcccatcctgaggacaatttgaacttgataacgtggggcccaacgtgcagctgtcccatgaaaaaattgtgttatgaggccgggcaacgggtgttacgcc

SEQ ID NO: 379838 - DNA, 609 bp, Homo Sapiens
  misc_feature (46)..(46): n is a, c, g, or t
  misc_feature (61)..(61): n is a, c, g, or t
  misc_feature (76)..(76): n is a, c, g, or t
aacacgccttgcacgatgtcaaatgtttgatttgacagtaggaccnacatgggaatgattntccgccccagcattngtggagcaatcttttctacagaggttaaagcatcttgactcctgaagggtgtttttattctcaactttgtgtcccgagacttggggctaaaagactcagtgctggctgggctcaaggcagtgttccccctcctatatgtccggcgaattgagggtgaagtgaatgagatcctgttctgtcagctgcaccctgagcaaaaacttgccacaccagagctcctagaaacagcccaggctttggagcggaccctgaggaagcctgggaggggttgggatgacacgtatgtcttgtcagatatgctcaagacggtgaaaattgtgtgactgcttaggccaagcagccctcctgcctagactgaccttggactcccagcctgccagagaatgaagaaatacaacgcacagtacttttgaagcttcgtatttttcttggtttcacactcagctacatgtgacctccagcttggtgaggttgcctgaagattagggaaaataaaaatgtccttcccatcttgtcctcttcagtaaaaaaaa

SEQ ID NO: 379839 - DNA, 426 bp, Homo Sapiens
  misc_feature (19)..(19): n is a, c, g, or t
  misc_feature (38)..(38): n is a, c, g, or t
  misc_feature (56)..(56): n is a, c, g, or t
  misc_feature (61)..(61): n is a, c, g, or t
  misc_feature (67)..(67): n is a, c, g, or t
cggaagagcataggaaagnaaggggagaggttaaaaanaagtccctgaagtaggtnttaanatttancccaaaacaccgattttaaaaagtttaccatcccaaaggtgtattccaaaagaagtacctgatttggtaattaattaatagtttgtgtgtatccatcccctttaaacccgtgccctaacaactgtaccttaaattttgttttcctagtgtaacaaatgtttccccataagattttcctagagccaaataatgggagtgaaaaattccttaagtgttatataagaaaatatattagaaaatcagctttggattatacgatttctaaaatatactaatacagaatcctcagtaatatgttttgaattggattttttctcagaactgttacataataaataatacatcaaccagaaaaaaaa

SEQ ID NO: 379840 - DNA, 374 bp, Homo Sapiens
  misc_feature (11)..(11): n is a, c, g, or t
  misc_feature (22)..(22): n is a, c, g, or t
  misc_feature (49)..(49): n is a, c, g, or t
  misc_feature (63)..(110): n is a, c, g, or t
  misc_feature (112)..(112): n is a, c, g, or t
  misc_feature (126)..(126): n is a, c, g, or t
  misc_feature (132)..(132): n is a, c, g, or t
aatggaccaangagggtgtacnctgacccacaaaactcttttaaaaaancccggtttgaaggnnnnnnnnnnnnnnnnnnnnnnnnnnnnnnnnnnnnnnnnnnnnnnnnangtttgccatattanagctcnctttaagacagacatctaaaaaggattttggttaatctgggctgaccagcagtacgtgggaaaggtggaatgtgcaataggaacagatctgtgcattttgtgacatcgtccttccctgctgtgcacatcagctgtgatgacattttgagggtagttttaatttagctcggttctcttgttggtgccagtattacattgaagactacctatgatagaggcaatgttgctttgaaaatctccct

SEQ ID NO: 379841 - DNA, 430 bp, Homo Sapiens
  misc_feature (58)..(58): n is a, c, g, or t
  misc_feature (78)..(78): n is a, c, g, or t
  misc_feature (139)..(139): n is a, c, g, or t
  misc_feature (163)..(163): n is a, c, g, or t
gggactcgccttccctcaaaaaccctgacctcacactggctcaagcggaaggtcctgnaactgtgcctgaaaatgttnatagaacaaatgtgaaataaagctgtgggtagggaggggagagctagtgggagagatacantctgttgctttaagtgatggccantctttcttatttcttgtttccacaaaacgttttcccatttgccctaacaaacttcttaatatatttcccataagataattttaatacttttttaaatttataatttgattttgatgtcttttctccctactcccagggaacagaaaatagggtagctgttattgctctggagtgttttgtcacccttccatgacgcctcctctgtgcatttgagttcactgtttatgctcaacactgaatttcaacaaaatgcctcatttggaactt

SEQ ID NO: 379842 - DNA, 464 bp, Homo Sapiens
  misc_feature (41)..(41): n is a, c, g, or t
  misc_feature (134)..(134): n is a, c, g, or t
  misc_feature (139)..(139): n is a, c, g, or t
  misc_feature (191)..(191): n is a, c, g, or t
  misc_feature (246)..(246): n is a, c, g, or t
aaactcctttgtgaatgccatatttgtgcctggtccccggnacccaactaaggagtttgtaaccaaataaactggggtccattcgggaaaaggcaaagaaactgaaggccagaagcccctaacgttgccatccntaatncgagcctggcagttcctgttccaccgtcccattgcccggcaatggatgtccnttgtggtgatgatcccttcagaaaaggatgccccctgtttaaaaacaaattgccntttgtgtccctgaagtatttaataagaagcattttgcactctagaaagtatgtttgtgttggttttttaagaagtctaaatgaagttattaatacctgaagctttaagttaagtgcattgatcatatgatatttttggaagcatacaattttaattgtggaagtttaaagcctcttttagtccattgagaatgtaaataaatgtgtccttctttatgg

SEQ ID NO: 379843 - DNA, 512 bp, Homo Sapiens
  misc_feature (31)..(31): n is a, c, g, or t
  misc_feature (153)..(153): n is a, c, g, or t
  misc_feature (182)..(182): n is a, c, g, or t
tgccccatgcattgcagatggttgccaaggnccccctctgtcctggcacccagtgttcctccatcctgaatccaagtaatgcccccttgcccactgcctgagtgcaccaaagtgtcccccatccccccactgcctggagttccccttgtgtancccccttatcagggcacgaccctaactgntgccctgctggctgtgaccctcctgaagacagaccctggcttctccctgcatcccagttccccagtatgtgctgtgggcatcctgagaagcctgaaaaagacagggccaggttaggcttgggtgagctgctttctgccttcttgggtacacacaggaagcagtgggagaggcgtgttacaccgtatctgttctatcctcatctaaatactgagaggctagttgggatagtaaatctttcttactacatatgcattaagtttaagtaaaatagaatattgtgtgaaaaaatgcactgttactaataaatggaataaacagatccatgaaat

SEQ ID NO: 379844 - DNA, 361 bp, Homo Sapiens
  misc_feature (31)..(31): n is a, c, g, or t
  misc_feature (53)..(53): n is a, c, g, or t
  misc_feature (67)..(67): n is a, c, g, or t
  misc_feature (97)..(97): n is a, c, g, or t
  misc_feature (172)..(172): n is a, c, g, or t
accctttggtttttggtagcgggatcccctnaactttctggtacgccctcctngtaatttcgggggnttaaatattgctttaaaactgtgatacttngatttgctagattgacaaaactgatactaatataattaagtccatctttgaaatacatctttgtgcgtagagccnaaaaaagagataaaattaataatagttcacttgttatttgagattaatttggcatttgaaatgatcattttattttacaatcatttataatgaatcaatgttccagttagctttaaaaggtatacggtgctaattagtaaaatattgaaggcaatattttactgctagcttgcaaagttatgagagttt

SEQ ID NO: 379845 - DNA, 414 bp, Homo Sapiens
ctccctaatttgccttaaccttgtttatttccaagcagaaatcaataaattcccataaccctctgtattgactgcaatgtaagctgcctgaggagactggttctgttggtcagtcaggtgtttgctcagccctgtctgatcacctgtgctgctctgtccctaactagtgacccatggaagcttccaagcagttttctcttcatcactactaacaaacgaaacactaagaaggcttagtatcgctcttttcctgcggggctaccctgaagtactgacttgctttccagtctgattcacgttagcagtgtgtacactactgtatcatcatcagcttcatcaccctgtaaaccaggctcctctgaagagactttggtgagatgaacgtgaggtaaaaatttcgttcggcaaaaagtg

SEQ ID NO: 379846 - DNA, 456 bp, Homo Sapiens
  misc_feature (314)..(343): n is a, c, g, or t
ccctaatggaataatggatgttgccctattcacatggattagtttcccatctggcaagtccttccattggtgaagtgtcctaaatccttttgactgttttaaaagcctgagttatttcatataccaaaaattaaccacaagatggacctagagaccttaaatgccaaaaccctcaaacctataaaaacccctggaagaaaatctggtcattagccttggcaaagaatttatgtcctaagtccctcaaaagtgaatgcaacaaaaacaaaattgacaattggtacctaattaaacaaaagagcttcctgcacagnnnnnnnnnnnnnnnnnnnnnnnnnnnnnntaacggcagagtaaacagatgacctatgggatgagagaaaatatttgcaaaatgtacatttcacaaaagaccaatatctagattttataagaaacttgaacaaatcaaaaaaa

SEQ ID NO: 379847 - DNA, 454 bp, Homo Sapiens
  misc_feature (36)..(36): n is a, c, g, or t
  misc_feature (80)..(80): n is a, c, g, or t
tacgggaacctccttgtgccaaatcccctagaacangtccccgtagaagacctaccccgcaaaagccagtggaatttttncctagtattttcctgttaacaggtaccagaagagtgccatacaacacacagttttgtccgaatagttatgaagtgaacacttgtcctaacccactgccccgagtcaagaaagaacatttcctaaacatgtttgcccaatttaatagatataaaggaagtatcctcaaggttgctttaactgacatttctttaacacatgacaacatttttatgggggaggggactagagagaaaatgacatatttttatgtgtgcttatttgtatctcttgaattctgtctgcatcttttacccattacactttcaaatacttgtgaaatcattggtcgagatgaattatggctataaataaaatttcactaatctaaaaaaaa

SEQ ID NO: 379848 - DNA, 154 bp, Homo Sapiens
  misc_feature (61)..(76): n is a, c, g, or t
cagacggagtttcactcttactgtccagcctgggcaacagagcaagactctgtcttgggtnnnnnnnnnnnnnnnntccttctatactttagattgactcatattttttccccacagacacagaaactgatgaaccagcctgggtcaacagtag

SEQ ID NO: 379849 - DNA, 427 bp, Homo Sapiens
atcagtaggtggtaatttctaaactctagtaaatatctttttttaaataatcctatcctagcctgttctcaaatatggcttaaatatacaaggtatatatattttttaataaattatttatctatacttttttgaaacaggttaatactctgtgcatcacatgtttaacattttcattcaagatgtggaaaaaatccctctgactgaacctagtctatacacccaatattatgtcattcaaggtaccgacaacctgtttcaggagagagacgttcatttttccctaatgaaatgcaagcattctgttagacctattatattgcctgttaatttgactgtaatgaatagggggtagaaacaaaaggatcaagtgtgttataaaacatttgatgttaaaaggagacaataaaaaggcaatggtttttca

SEQ ID NO: 379850 - DNA, 475 bp, Homo Sapiens
  misc_feature (15)..(15): n is a, c, g, or t
  misc_feature (23)..(23): n is a, c, g, or t
  misc_feature (32)..(32): n is a, c, g, or t
  misc_feature (60)..(60): n is a, c, g, or t
  misc_feature (162)..(162): n is a, c, g, or t
cctgggatgccctcnatgagtcnactgaattnaaaaccctcccaaggttctgaatccccnaatgccccactctgctaggctggcattcaaaagagcctttcccaagaaaatgtttggtcccagctgaaaaagtccctgacccatgaagcacccagggagccnagaaaccaccccagagaaacgttgccttcactcctctgtctgaggatggggaggggcccagtgagctctgggctcagcccactccctccagtctcaagtaacacgtccccgtgcctccagtctcctctcagcaccgacccaggtttttccccgctcctgcacccgtggatcctgaggacagcggtagcgccttcctcaacgcacgctgagtccagtgcgtgctcctcactgtgcacttattagtgtctgttgagtgattaaatcacatcctcaggtctgcagcaaataaatgaaagtttctttattttttatt

SEQ ID NO: 379851 - DNA, 371 bp, Homo Sapiens
  misc_feature (292)..(294): n is a, c, g, or t
  misc_feature (298)..(312): n is a, c, g, or t
aaggctccccatatatagagatagagaataaaaacagtaattacctaaggtccaggataaggtggaggaaatgagatgtaggtccaaaggatgccaaagtagtaaatatgccaggatgaacaagtgaaaagatcaaagatcaaatgtacaacatgaggactatagttaatacatattgtatattgtgttccaggactttttgctaaatgagtagattatacctgctcttgccaatgggggaataatcagtaactatgtgagatgatgggtatgttcattgttccactatagnnntgcnnnnnnnnnnnnnnngtttcatttaacattgtgttgtataccttaatatagacaataaaatttatttaaaacat

SEQ ID NO: 379852 - DNA, 462 bp, Homo Sapiens
  misc_feature (53)..(53): n is a, c, g, or t
  misc_feature (67)..(67): n is a, c, g, or t
  misc_feature (92)..(92): n is a, c, g, or t
taccctgcagagccaaactgcaaagtcaccaggcctcaacagcccaggtggancccctccccactgnatcgaaaacctcaaggtaaagcagnccatggtgaggtggtaagatcccaataccatggcataccctccccgaccccaccgggctcacctgaaccatcccaggcagtgaagatacaggagctccgagttgaatgatctttgcttccatcgtctcagaaagagccagctcttcatgactcagtttccatctcttgctcttgctgtgcctgtgttcacaggcagatggctcaggtgtgactgcacagcccaggcagtggaatgcttggccttagaaagccagggcaggttaggcctatctgatgggtatttgaattatgtaaatttgaaacagtgctgtatcagctaataaatctctctctagagaacccgtaatatcacagctagagggccagatcc

SEQ ID NO: 379853 - DNA, 528 bp, Homo Sapiens
  misc_feature (15)..(15): n is a, c, g, or t
  misc_feature (36)..(36): n is a, c, g, or t
  misc_feature (57)..(57): n is a, c, g, or t
  misc_feature (79)..(79): n is a, c, g, or t
  misc_feature (93)..(93): n is a, c, g, or t
  misc_feature (106)..(106): n is a, c, g, or t
  misc_feature (121)..(121): n is a, c, g, or t
  misc_feature (151)..(151): n is a, c, g, or t
  misc_feature (228)..(228): n is a, c, g, or t
aaggtgaaaaaaggnaattgaaccccggaaccccantttgttggccccacgaagggnaaaagcctttaattttggaaanaccccaacgtgaanccccaacaagacntcctgggaacaacgnaagtttaaaatatccccacagggttttaantttgcctgttggaaacctcctaagagctattgcaaacttcccccaagatcccagatgacctgaatttccagaatagncatttttatgattccccaactcattgaaggtccttatttatataattttttcccaagcccaaggagaccattggccatcccaggaaatttcgtacagctgaaatataggcaggatgttcaacatcagtttacttgcagctggaagcatttgtttttgaagttgtacatagtaataatatgtcattgtacatgttgaaaggtttctatggtactaaaagtttgttttattttatcaaacattaagcttttttaagaaaataattgggcagtgaaataaatgtatcttcttgtcaaaaaaaa

SEQ ID NO: 379854 - DNA, 423 bp, Homo Sapiens
  misc_feature (17)..(17): n is a, c, g, or t
  misc_feature (23)..(23): n is a, c, g, or t
  misc_feature (33)..(33): n is a, c, g, or t
  misc_feature (43)..(43): n is a, c, g, or t
  misc_feature (62)..(62): n is a, c, g, or t
  misc_feature (82)..(82): n is a, c, g, or t
  misc_feature (99)..(99): n is a, c, g, or t
acccctccaagagtaantccccnggtatggccnccaagtttanggggaaggatatggccccncccaccataatttaaccctnccctctccaggcccccnccataaaaaacctttgaaaaattaatacctacattttagtatgaatataagttaaaccttagaggtgatatcctattttgtggttaaatgtgttataaacatttatttagtgaaatacagtacaattacaacaagcatcaatgaatatttaatgagcagctgttaatttctgaagcagaaagaaagatgaataaaagttctggttttacttttaaaagtgaaggctaactgttagctcaagaaatactttatgtttgtcctatatgaaagtgttgattgcacctggttctttgctgtaaattaaataaaaattcaaatatttgt

SEQ ID NO: 379855 - DNA, 384 bp, Homo Sapiens
cccctcccttcttctatgggttgataatctctggatgctgtttggtaatgaaaacccaatcactgaggtcattatctgatgaggtttttggaacaggcaggcttttttccccctctttatttctttacttaatgataaccctcaatgggcttgccccgcatgggatggccagagccgcacaattttgttcaccattaatttcagcctttgaagctcagggctcagaagcagtagcaaagcaaaccccccaccaagctggttccaaaataaggacaatccaggcctgccttaaacagaatagcaaatgcctcccagcccaggcccggcagctgacgtcagacccactgcatttagcagtgatgccttcaacacggatcatttaaa

SEQ ID NO: 379856 - DNA, 384 bp, Homo Sapiens
  misc_feature (181)..(181): n is a, c, g, or t
ccgtttttgaaaagttgaagaacaccaggcacctttccagtgtttggggaaaatgaattgggataccctcccccccaaacccaacctcaagtcctgtaactggaagccccaggtggttggttttcctggtcccgctttgtccctctttccttttaaccgtcatccctattcacccagcacntaatgtaagtagatgttttagaattgcaatatttattggtttagtatttgtcatccttagaaatgttaatgatgtatttttatattgataatataaatttgtgtacagtatgtgtgtatatgtatttcaggatgttatagtattgtactttgtatgtgatggtttttgtgtcttcataataaatatgtcccttttaaaaaaaa

SEQ ID NO: 379857 - DNA, 457 bp, Homo Sapiens
  misc_feature (36)..(36): n is a, c, g, or t
tggaaaagtgtggtgggttaagccccctccctctcngcccccccggaatccaaccagaccagagcctccggggaccctggccaaggaccccagaggttgggggccttccggaagtaaagggaccatttcctttaaagccatccatcctatccaaatttaatttccaatgtatgatgtttttaacaactggtccagttccttttgtaatccttacagcctatggttatttgattgtcccccttacaatttgttcctacatgaaagagttcctttgttagtcagaatgcaacaaactgtcatcaaatggtcattgaccacttgcactcttttgatgtagattaaaaactttttcataaatttacctgctttgatttgctctgtatttttcctgcagctgtaattgctgagtgcctgttgtatactttatagagttgaaataaaaaaataattacttttg

SEQ ID NO: 379858 - DNA, 491 bp, Homo Sapiens
  misc_feature (29)..(29): n is a, c, g, or t
  misc_feature (61)..(61): n is a, c, g, or t
  misc_feature (85)..(85): n is a, c, g, or t
gggaaataattaaggagtttggggaatanttggtccacctaccccttaaaaaggaacctgnacactcacccctatttgaaaaagnacactgcaggatttgccccatttgaaaattgccccccgggtgtattgtgccacaaatattgtgaaatatacatcctgtctgtcccttaaatcactgtaagttttaactggaatagatttgctcccacattacctcggtagggctgatatttcatgccctcatggatgagaaaagaataggcaaaaattatatctcgggctgcctcacacatcttttaacaggataagggaaaaataaatataagacctatgagttatggcatcaggcttgaactttaatttatgaattaaaccaacaatattattgattattgcaattatctatcttaatttcatttgttctccttttaaaaattaattatgtttattttacctattgtgaataaagtcactcctcccatgtgctt

SEQ ID NO: 379859 - DNA, 484 bp, Homo Sapiens
  misc_feature (17)..(17): n is a, c, g, or t
  misc_feature (26)..(26): n is a, c, g, or t
  misc_feature (38)..(38): n is a, c, g, or t
  misc_feature (51)..(51): n is a, c, g, or t
  misc_feature (56)..(56): n is a, c, g, or t
  misc_feature (106)..(106): n is a, c, g, or t
  misc_feature (169)..(169): n is a, c, g, or t
gggtggccaaaatgaanaaccctgcnaggggaaaaagnactgccccccccnatgcnacccaatgcaagggaaggaatgccggcccaccccatgaagcctaaggtgnaagtaaactggtttttccttggggtggcctgaatgaacatggaatgcaagccacagactcaanccttggcccctggaagcacatgccttactggtggccctcaagtttaccttcccccagatccctagattctggatgtgaggaagagatccctcttccagaaggggccctggccttcctgagcagcagattagttcccaaagcaggtggcccccgaacccaagcctcacttttctgtgccttcctgagggggttgggccggggaggaaacccaaccctctcctgtgtgttctgttatctcttgatgagatcattgcaccatgtcagacttttgtatatgccttgaaaataaatgaaagtgagaatcctcaaaaaaaa

SEQ ID NO: 379860 - DNA, 343 bp, Homo Sapiens
  misc_feature (23)..(23): n is a, c, g, or t
  misc_feature (43)..(43): n is a, c, g, or t
  misc_feature (91)..(91): n is a, c, g, or t
  misc_feature (229)..(229): n is a, c, g, or t
  misc_feature (253)..(253): n is a, c, g, or t
aggcgatttaaaaccaccccaanacctacacgggaaacaaaancagcagggaaaaaccatccccactggacgattggcaaatccccaccgntccctctcccatctgacccagctttcacccagagggcgaactttcatgcttgcacatcgagtttatacaatgtagaagcccccaagtcaccctgggaaatggctcatgcccaaatacatggagtccttagttgactancttttcatattaaaaccccatccntcccaatgaagcatcctgttttcaatactgatatcaaatttcgaatgtaaaggagatttcaaatgtattgctttcaccttttctttttta

SEQ ID NO: 379861 - DNA, 409 bp, Homo Sapiens
  misc_feature (198)..(198): n is a, c, g, or t
acactcaacccagtctaaagtgggtgcccatttcacggaggaagagggaggttggaagaccttcaaccgggcaaaggagccacaaggaaacccaagcagcagaggcccccatcagccacagagggacactcgttcccacgaaccgtagagtttgaactgccctaagggacagcacgaatgactcacatgtttccagancaggcctcccacggctatggagagaaggctggaggagacacaatggatggttcatgttctggcttagcaagagccaccaagaactttgggtgaagcaagcagatgacaatgaagaggagtaatgttccgaatcatgtttttgaaaaatcaagacctcctgttaagggcccacttgaccctagaataaggtcaggagagtgtactaaaatct

SEQ ID NO: 379862 - DNA, 378 bp, Homo Sapiens
  misc_feature (12)..(12): n is a, c, g, or t
  misc_feature (41)..(41): n is a, c, g, or t
tgccattatatnccatacaatgccaatatccatttagcccntaaaaacaaaattcctgccctatgcctacaacatggacgttatgcctaagtgaaataaacccagttcccgaaaggacaaatacaccccatttcccacttatatggggtatccaacgtcaaactcagaagaacaaagtactgcggtatttgcccacaagctggtggaggagaaaatgagttgttcaatgggtattgagtgtcagccacgcaagatggaaaagctttttgagatttgttgtataaaaatatgcctatagttaacaatactcttcggtacacacaaagtatgtgaaagggtaaattttatgtgtttttatcacaataaaaattgtaataa

SEQ ID NO: 379863 - DNA, 326 bp, Homo Sapiens
tatatttatatatgagggaagatgcctgtttgatagagcatgtgaaatcaatggcaaacatatggattaaaaggaaacctcaccgttctcaccaaatagtaactagagcaactagtcctagtaactggcgtaactacttgctctgtcgtcattgggaaattatgtttgaaaatctttcatcacctataaaatggtgagcctcttgtactttctattcagtgtagaaagagtggactgataaataactttacattgttggtagtagtttctacagatccagtttattgcatgtcgtatctttattgtagatattaaaaacacatgat

SEQ ID NO: 379864 - DNA, 476 bp, Homo Sapiens
  misc_feature (20)..(20): n is a, c, g, or t
  misc_feature (30)..(30): n is a, c, g, or t
  misc_feature (169)..(169): n is a, c, g, or t
ggcggaaagcccctcagacngccggtctanaaacccccgggtagcaaagactccctcaagcaccttcactaggcttttaagctaaaaagcaaaaacacgggcaactgtgggtgtttccttttttcccggcttggatcacaactgaaatagtttccctgcctgctttccnggacaatgaaacatgaacaaaaatgtaacttccgtgtatttaatacttaacccctgttcgttatcaccctagactgcctcccctaatgttttaaagcctttaaaacattttttccctgcaaatctgttcagagttccctaattttagcttcatcaaacttaatacaacaaaataccttcaaaaatacagcatacctgtaacgtccatttacaatggtttttcagtagaccctatacttctcaagcataggaatatgctataccattgagagaaaaaaataattgtatttaaatacttacaaaaaaaa

SEQ ID NO: 379865 - DNA, 525 bp, Homo Sapiens
  misc_feature (67)..(67): n is a, c, g, or t
  misc_feature (133)..(133): n is a, c, g, or t
  misc_feature (477)..(477): n is a, c, g, or t
aaattgcaaattgacttctggcccaaaaccctcttggaagtttccctcattttgcaagtgccagctnctttccccctgctttgaacaggggaatgtacctgagccactccccagatgggcctttccccaagcnggaacccaatgggccccaaatgaaatcaagttgaaggagagtgagcagagtcagcagtgagagaaagacttagctgcaaggtcaaaatccgtctgaaaacagacacgatggaagacagacagttcctccctggatcatcgtataaagaaaagggatggatcaagacagggattgctgatgcatatctgctcgctgtttgactacaaaatactctcatgattgattctgtgtctgccacccaagatcagtctcaaggaaatgctgacaaaaccctggcacccagagtcacagagctcagtttccagccctagcaccacccttgataacttgagtgaccttggacncctggtctctgcctcagtttccaaattaaatgagtgtggtgaaaactt

SEQ ID NO: 379866 - DNA, 315 bp, Homo Sapiens
tgccccctagaagaaaaaagctgcagaatgccacccaactatttcctgatgtcacttgccatagctgatatgcctgcctgggtttccttgtcatgcccgtgtccatgttaaccatcctgtatggtgagtggcattagtttcccagctatattcgcactggtaataaagagcatgtgcatgccaccagcagatgagatggggctcagggggcaaacaaactataaatagaagtctttgtttatagactagagcctactatgttacttatattttactcttaaaatgggatttcacataaaaatcagacagtctaaa

SEQ ID NO: 379867 - DNA, 808 bp, Homo Sapiens
  misc_feature (35)..(35): n is a, c, g, or t
  misc_feature (47)..(47): n is a, c, g, or t
aaacccgaaggcccaccccccggaactgttccagnaccctggccacngaaaaccccgacacgttgaaaagatgaaagggaatatatttgaacccaatcctgtgacccccatttaaatactgccagtccacaaaacccaagggttaattcccgaagcagtgaagcctgccttccaggttggaaaagattatcaaaaaccccttgaagtccagcatccgcagttggttgttggatatatcccagccgttcccacttacgcagatttgagaaggctgtcaaaggaatgtggtttatctggttgtcctgcaaatagagcctgatcagatgcgtacctgggagatcgggaggagggtgggagcgaattacgtacaattgaaaattccttgagcttggtgagatggctgaaggtccctcggcgatacccttgttggtcaggaggttcccgtccacaataagacgctccaagctcgtgagattctggaaggccatgtcggatatgacagcaattcgattttcatccactctcagctcttgcaagtccacaggaagcccaacaggcacactgctcaggtgattcttagacaaaaacaacaattttgagctaatagcctcccggaaggccccgtcttccacccccactgtggatatggagttgtcatccaggtgcagctcttcaagcttcaagagctgggcaagagcagcccgtgaaatggtctgaatattgttttcctgcaaatggagaactctgacattcttgggaaggttcatggggaattcgtccagttggttgccatacaggtagaccgtgt

SEQ ID NO: 379868 - DNA, 386 bp, Homo Sapiens
ccagaaacagtgggggatgtacacatcctacattaagaaagtcaattaaaaatacatcccagtgttaatccccatagtaattggatgtactttgggttacagttcctcagcccattccttaggctgaattgccacaagctgctgtcaggaatttcagctcctataatgttgcttagctaataaaaggaaaacaaaaaagtcttaagtaaagattagcagacaactttcctccctggaaattctcattgaaatgattacatgttggccaagcatgatttcaaaccggaaagaaaattacacagcaataaaatatagcggcatgagaacttacatttgtcttcagggttcacacatgagatacatttgttattctgtgactcgctgca

SEQ ID NO: 379869 - DNA, 407 bp, Homo Sapiens
  misc_feature (13)..(13): n is a, c, g, or t
aagggtcctcganctcttgaccctgtggatcctgccccccctcggccctacctagcccaacttttaaggacaagtcccagcccatcccttatccctcacagccaaataacaaacatagtgatttgtgggggtgaagagatgttggtcaaggggtatgaaagtacagtcagataaaaggaatgtgtccctagatttgatagaatactagggaaattacagttaacaaaaatttattgtacacttcaaagtagctagaagcaaagaactgtaatgtccccaacacaaagaaaagataaatgtttggggtgataatatctcaattactctgatttgatcattacacattgtatgcaggtatcaaaatatcacatatccccccaaaatatgtacaactgttgtatattaat

SEQ ID NO: 379870 - DNA, 513 bp, Homo Sapiens
  misc_feature (14)..(14): n is a, c, g, or t
  misc_feature (46)..(46): n is a, c, g, or t
  misc_feature (60)..(60): n is a, c, g, or t
ccttttgaaaccanaactggaaaacttaaaccttcctcaatggccngaaaaccagaaaangtgccacaacaaaatttcccccaatcctgtgaaaatgaaactggaactgaggccccccaggaagtgaagaatctggggccatttccaccctctgcctgtgtcctcccttccgagacctacaatatcattcattcctgaggttcccattccctacatgtagtcattccttggtctgccccatttggaaaagggcactaggaatacctgtcctgccccattgtcatgagggtgttatggggatcccatacactctgaaaggtgcatgactgaattattggaatattgatgaagagtggaagtccttgtgtttgagattgtgtgtaaggagttcttcattccatgagggtgggggtttgtctggtttttcactgatatccccaaatattaggacaatgattgacgcatactgggcacttaaaaaaagtttattgaatgaatacatgtgaaaaaaaa

SEQ ID NO: 379871 - DNA, 438 bp, Homo Sapiens
  misc_feature (271)..(271): n is a, c, g, or t
  misc_feature (284)..(284): n is a, c, g, or t
cacaacatacaaaggaatttatttatgcaatacaggccttttctcaaatatttttcacagaattccacacagtaatctactagaaaagtagaattatacaccaccaaataacattgtttcgtttcttagtacaaattgctaatcaaaaggaaggtggagatgatagtttaataacaaatagtaaaacaggtgttgctgaatacagcacccggtagcctctatttgcaaacccggggagggaagggggtgcccaacaacagtggctccgctncattgtccaggcnacaggcaaaccgcagtagtgagctttggtacttgcatttactttaaaagaaaaacaaatgttgtgagctcaagagcatttccatcatttcgttttgttgtgctatgaagatgacagatcaggaaaaaatggtaactatttcacacttgctataa

SEQ ID NO: 379872 - DNA, 465 bp, Homo Sapiens
  misc_feature (45)..(45): n is a, c, g, or t
  misc_feature (306)..(306): n is a, c, g, or t
  misc_feature (308)..(308): n is a, c, g, or t
aaagtcatgtggccttcacttcatgactaacccagttccttcttnacttaagggtgggactaagttcctaccttccttccttattttgatttcacgaaggcccacacatgaaagctaagctaagcaagccctggttcgcttcatggcaagaagagccatgagtgttttactggtgagcatcataaactgagaagccaggttttaagatccagacaccagattgaataagccaatgtgctttggcttaaggcttcctgtggaagcaaatgagcttccagagagggggcaaagtaacagccctctggnanaggcaagcacccaaggagcttcaaaaataaccataagagctggccaggagactagcacttcttaattatagactgtaatttaggaaggcaaagttaatgcaagtaaagtcatgtgagatgtacagagactttggtctctttttgacctccaaattgg

SEQ ID NO: 379873 - DNA, 409 bp, Homo Sapiens
  misc_feature (18)..(18): n is a, c, g, or t
  misc_feature (60)..(60): n is a, c, g, or t
aaccccctcgggctgttnaaaacatttccaaaacccaatgtgtgcccaaaccttggaagncaagccccagggcccaggggcacggcctggaaaagctggacccccaggttccctggctgtggacccatggctgaagggcttagctgctttgtgccctcagtttcctcatctgtaatatggggacacgaagtggccctgtctcccaagggctctgacaagacacatgacttcatgtgaggcattccggggacccccacacaataggtcctcaatgtgtgttaatcgttctcatgctgctgctgcttttggggtgtaggcatgggtagtttctggggctcaaggaaataacagaggggtctccaaaggtctcctgtcttgcacaacccacaagtaaactctgatattcact

SEQ ID NO: 379874 - DNA, 347 bp, Homo Sapiens
  misc_feature (40)..(40): n is a, c, g, or t
  misc_feature (99)..(99): n is a, c, g, or t
cccccccggaaagtgtcaaacagatgttccaacaagtgantcctaaatctgggttttgggaaatgaagtttgtgaaccttggcctgggaccctcagggncttggagtcagatagctttgggaccttggagacatgacttaacctctctgggtcctcagttttctcacctgtcaaatgggttatcccagaacttgccttatagaattgctgtgaaaattaaaagagataatgtacttagaatacttaactcagggccttgcttattgcaaatatttaatatataattgctattatattttgtatcctgtatactctataataaataacacagctaatgtttactgagc

SEQ ID NO: 379875 - DNA, 446 bp, Homo Sapiens
tcaagtttcctttattatattacttttgtgattttaaaaatcggacactttaattttgtattaagaaagtaatacatactcattgtagaaattcaaaacacaatttacagaagagttcaaagtgaaaaataagacttccccctggccttaagctcagtagattttaaaaagtaacttgttataaacttaccaaaaagttggaggaatagtacaaagaactcccatgttcacttcatccagattgttcaattgggtaacacttcacatttctgcaggcatgcatgcgtgcatggtggtgtaccaccattatcatatgggctttttctttaaccatttgaggaccaagttggcagacatgttccatcagtcctaaacactccagtgtacaattctccaaaaacaaagacactcttggtacataaactaccacattgtccaaaaaaggg

SEQ ID NO: 379876 - DNA, 485 bp, Homo Sapiens
  misc_feature (36)..(36): n is a, c, g, or t
  misc_feature (43)..(43): n is a, c, g, or t
  misc_feature (59)..(59): n is a, c, g, or t
  misc_feature (65)..(65): n is a, c, g, or t
  misc_feature (75)..(75): n is a, c, g, or t
  misc_feature (107)..(107): n is a, c, g, or t
  misc_feature (176)..(176): n is a, c, g, or t
agaaaccaaaactttcctaaaccaggttcaactganatcttgnctgttgttggttaagncaatgncggctgcaancacgttaatcatgaccacaggcccgggtgttncaagcctcgtggcattcaacagcccgcaccccagggtacacagtgtaaggcagccccctgcacgtaaancagagacctaggtccctaagacgatgaaaatggccgtgaaaaggtaaacctctattccccacactaggaaagggaggggtgggccacagggctggacatccctaagctctgacaattgctatcaggaggtggggcaccaaacgtccacccagggagggtgaccagctgtcctggtttgagcaggtttgaaggtcacaggtctaaaacctgggcaaaacaagatacctgaacccccagtggtcagcatgtatacacggggcaaaccgaccttggattttatttgaaacaggtggcattaaggggaaaaaa

SEQ ID NO: 379877 - DNA, 455 bp, Homo Sapiens
  misc_feature (12)..(12): n is a, c, g, or t
  misc_feature (336)..(336): n is a, c, g, or t
ccaggcccaacngggtctcccgaacgcaatgccgggtctggccccatgccttcaaaaacagaaaggactccaaattggccgaaattggaggctcccctctctgtaatcaaggcaactccttgggcagcaccctggagatcccagagtcgcagtgggaggagggaggcaatgctggaggccgatggggaacccaagtagcccaggccctcctctgctctttagctggggaaggctgaagacagcttggacacctttctctgcattgctttttggctttctcttactgtctgatttccatacttagcaggagactttttaaatggtcaatgactggcnttcctttggggaaacacatgacgatgatgacaacattaaattcaaatttgtaacttaaaaacgaacagtttgttgacaaagatgtgactaagtaccacacatacgcagatatatgcctt

SEQ ID NO: 379878 - DNA, 466 bp, Homo Sapiens
  misc_feature (298)..(298): n is a, c, g, or t
  misc_feature (432)..(432): n is a, c, g, or t
  misc_feature (449)..(449): n is a, c, g, or t
ctaagtatcagaaacttctaaaggaaagacaacagctacctgtatttaaacatcgggactcaattgttgaaactcttaaaaggcatcgggtagtggttgtggcaggtgaaacagggagtggtaaaagtactcaggtaccacattttctattggaagatttgcttctaaatgagtgggaagcaagtaaatgtaacattgtctgtacccaaccccgaagaatctcagcagttagtttagccaacagagtatgtgatgaattgggctgtgaaaatggacctgggaggaaggaattccttgntgtggatatcagatcccggatggaatctcgagcttgtgaatctaccaggttactctattgtacaacaggggtttttgcttaagggaaacttcaagaagatggtctttctaagtaatgtgtctccatgtttattnttagatgaggtttcatngaaaggaagtgtcccgt

SEQ ID NO: 379879 - DNA, 498 bp, Homo Sapiens
aacccaggcactcagtgacagcatccacactcataaccacgatgctaagagtttgccagacaggtgagaagcaacatttttggaagagggtcagggccataggttttgtgaagtgacagagcatgacattcagattcagtagggcctaaagaccccaagttttggaaagtagaggagatctgaacccttagcccgtagcctcctagaggtgggctaagagcaacccgggcacatgtaagtggtgacccagaggacttgcagcccatcaaatcactatggtgtgctgtttatttcccccaaagactcaggaggggagaggtttgatacttttttcccatatcagataactttaaaatgtagttttatattatagaataggatgtaaaattaccatgacatttttccttgtttcttcttccttttgatatatgatttaaattgtttctttaatgtatttatttatactaaataaaacaactccatggtttttttaaatta

SEQ ID NO: 379880 - DNA, 476 bp, Homo Sapiens
tgatgttttgtagagatgggattttgccatgttgctcaggctggtatctatttcttcttgaatgaaatttggtactttttacttttccaaggaatttgtttatgatgttgaagttgttaaatttattagcataaaattattcataatattctattggctttttaatacccataggatgtatcatgatgtcgcttctctccttcctgatatttaaaagacttactgagttttaaatggtataaatttctggcatctggcaggtgctaaataaatgtttcctggatcgaaatctacagtctcaaggagtcaaggctacaattcttaagttgcttcagatgactggttctatctatttatcaatacatccatcgatccactcatccactcatccatgcatcctcctacccttcctcttccccgtcaaacattcatccatccaattggtggcttggggaaagggacaaaaggggaaaaaa

SEQ ID NO: 379881 - DNA, 511 bp, Homo Sapiens
  misc_feature (242)..(242): n is a, c, g, or t
  misc_feature (476)..(476): n is a, c, g, or t
  misc_feature (489)..(489): n is a, c, g, or t
tcccatcacatgggtctgtgggtgagatatgttatgctgttcctccctcgggaaggttggtattgaggggtgccttgctccagaggcgccaccaggcatctgtggtgagttggctaagatccagagtgacctgctcagagctccccagaggccttcactctttggggcagtctctctagggtcactttctgaatgtaccttctacctaaagtatacaaacacaaagagccagctgagctgtntctagtgtgaaagccgtaagtgccacccagcaggcgtttgaaaacaagaaatcattcttctgtgggaaggagaatgtgccatcttcagctaccctcagtccgccagcagcccagtctgtgtattcatatgaagttgtgaaaaccatgagtgtgtgccatggccattcgtgtctacacacagccactattgttcctgtgggctagtctccagcaaatttaaaacattggcatggncttaggaaagggncttgcgagctcctaaattggaa

SEQ ID NO: 379882 - DNA, 665 bp, Homo Sapiens
  misc_feature (451)..(451): n is a, c, g, or t
taaagataaatctaaaaggtgttcaagtacattgaatcaagatgagtaatccaacttctatgttatgtaggatggatggagcacacaaattcttgcaaacattgtagaggtttttttaaacttcatccactaaggatttttttataataattacttttgaaaataaaatctcaactattttccaagttatgagtgtgctgctcttaaccctgtgagatgaaatcttcccatttggattacatatttgtagttctatatcgacatcagcagatggcaatagtatacaaatagtatacagcatgagccttccattgcttttatttctttgtttataagtatactataatccttcatctgaaacccttagggttttagaattcagaattttcccccttttccagagagaatatatataatgtagattacataacaccctcaatggggcctgggnaacaccccataatcaaacattagtacattcatagtaactgggattaactatgtaaggcagtaagctacctgccttacatagtttaggtcaatttttgtcacaaacttatgggaaaaactaggtttttaggaaattttttgggatctcaggaattcgtgattaggggattgctgacctctgttaagggaaactgggtgttcaggtctaggatttt

SEQ ID NO: 379883 - DNA, 441 bp, Homo Sapiens
gagtcagacctttgcccctgaagtggtccccatctgtaattaaaaatagaccaaacataattacttaatggatcaacttctctgaaaagaggaaaggcaggaagagaaagagcgaagctgtcctgtgttcacactaatgtccgtgttttacaaggtgacaggtgtgtgagcaccaggaaggatacatgatatccatgatagtggcctgatagctatgacacttgaacacagtgaagaaagtgcagggcacagggccaagaaggaaatctgaggagagagaggtcaccttgggacttgagtaatggatacttcagactggctgttttcactctaaaccctgggggttacgcttccctcagcatgctgcctgtatatgctttatcggtgctgatgcccaacccttcatctttaaagtcttgggaccactcttctttggtggtt

SEQ ID NO: 379884 - DNA, 466 bp, Homo Sapiens
  misc_feature (352)..(352): n is a, c, g, or t
  misc_feature (409)..(409): n is a, c, g, or t
  misc_feature (428)..(428): n is a, c, g, or t
gggagtgaaagggtgctgtagaccagacaggggaggtggtgagaaggtacaaaaacaacgctctttcagaaagccagtattcttataaaagtattggtcttttatttaatatactagtaattataaaacgtttataatcacaacatgaagaaaaaaagttcatagaccgtaacttgtgtaatttcagcttgtacataattgactaagtaaacttaccttgtcatgtgtttgaagctgtggcttgccagggatcagtttattagggacatttgttttttattttatctaacaaattaccctctagtgtgctcctctttagtttttttctgagaaatttcccatttatgtcttnttaaatttaaccagagcaaactgggactttaatcacaaaacttccaagaggtcaaanccatgtgaaaagttgattngctttggcctttttcatgagttagcctacccgctgtag

SEQ ID NO: 379885 - DNA, 175 bp, Homo Sapiens
  misc_feature (32)..(32): n is a, c, g, or t
ttcatttaattgtcaacaacgtcgcccggaanaagatctgaataaacctaggttttacagataaaagaaagcaaaaatgtaagagatgttgttgaaggtcacagaggtgactgccctaacttccagagcagggcttctgatccctttaagaaattacagggccagccgggccatg

SEQ ID NO: 379886 - DNA, 435 bp, Homo Sapiens
  misc_feature (359)..(367): n is a, c, g, or t
gaaagggtccgggaccaaagacctaatatttggagaacccccttagtagccacaaccgtgaaaaatggtaggggattttgtccctcccaacacccaaagacacttgccttttttaagaacaagaggatgtgtaattcactgaataaaatggttttcctccgtctaggggggattctagcatctgcccttccatttttgttgagagaagtattagctgatctctcaaatgcagatgttaagagagtaacaactgggttgatccacctgttgcttttacaccatagctccattttccaaaaatatatatgtatgtacatatatatatttcagatttacagggaatttttttgtgaacaagnnnnnnnnnttgtctatagaagtcacaagtgtctttcttctcaggagacctcaatgatttccatgctgcccgaaaag

SEQ ID NO: 379887 - DNA, 335 bp, Homo Sapiens
  misc_feature (41)..(41): n is a, c, g, or t
  misc_feature (49)..(49): n is a, c, g, or t
  misc_feature (117)..(234): n is a, c, g, or t
aaaaaataaagcccggggatgctgcccaaaaacccgtgatncacaaaanaccccctacaacaaagaatttatctggtcatttgtggcaaagttgcccaggtgcagttagctcacacnnnnnnnnnnnnnnnnnnnnnnnnnnnnnnnnnnnnnnnnnnnnnnnnnnnnnnnnnnnnnnnnnnnnnnnnnnnnnnnnnnnnnnnnnnnnnnnnnnnnnnnnnnnnnnnnnnnnnnttagcccaggtatgatggccggatgcctgtagtcccagctcttatacttgggggactgaggtgggagaatcatttaagctcaggagaatcaattatgccca

SEQ ID NO: 379888 - DNA, 512 bp, Homo Sapiens
  misc_feature (472)..(472): n is a, c, g, or t
  misc_feature (477)..(477): n is a, c, g, or t
  misc_feature (496)..(496): n is a, c, g, or t
ggagcccgggagaggagaggcagggttcctcttttagccagaggagcccaaagtgacaggaggacgtggccgcagcaggggttcaggggctccagcacgccgcacgccggggatgtcaccaacacccacttaggccatgggaagccatcagcttccagattctgaacacagagttttatggtacccttgacaagagcagttgtaaagaagcatttaagtaagcattttccccgggtgaggagaatcggcacagcttgaggtgtgagacactggtacttctgtgcaaaacccgccctgtggacagtgggtttgtggtatcctaaggctgggaaggcatcttcggaggttttctccttgcttgcaaaaacgcctgttcactgcccagggttacatatttttgacctcattccttcctatttagaaactcagggcggttcccgccccgtttgggcagccagaggacctcagggtngcgcngggttgaagggacctgttnggggaggtttaccttt

SEQ ID NO: 379889 - DNA, 411 bp, Homo Sapiens
  misc_feature (23)..(23): n is a, c, g, or t
  misc_feature (30)..(30): n is a, c, g, or t
gttcccataatccatggggttgngcccagnccgactgaaagtcccagggtgctgggctggatggtgatgggagcaggtaatgtggcatatccctaaaaagaagaacccttgagctccctgaagggctgggcccaaggtcagggggcaaggacaggattatatccttcagctctggggccttcgggggtagtcaaagaagagttcaccttgagggacacatctccattagcatggcctttcccttctggcctggggacaattgattcctctgatttgtgtagttctgaacaaatgactagaggtgctgtgttttttcctccatcatgaaggcaaggttcaaagaaagggcgaagggggccagagaaattgtgggtgaaagtaaagatgtgggacttgttggtcacattgtag

SEQ ID NO: 379890 - DNA, 490 bp, Homo Sapiens
  misc_feature (81)..(81): n is a, c, g, or t
aaccttacccccttaaaatttctaaacaaacttcccaaagccaaagcaaggaaaccctgttgtgcccttccctcccaacangctgaacaaaaaactacaaagcccgggtcagcccgaaaaaaaggcaaaactctgccggtggggacccgggtctgggcccctggctggaggcttacagaagtcactggcggtctcagcacagcacagccaagccaagcacagggcctttctcgagtacctcctacccctgggggataggcagttttcctgtcacaggtgaggaagtgggcttgggtccccagggccccctcttttccttggactctgggatcatgtgcacacagggacctgggagagtggctgccggccggagaaccagccaagcccactgggtcaaacctggcttcagggctcccccaccttcccctctgcccagtgcggagtcaggccactgctcttaccagctggggggacggctaggcccagagtg

SEQ ID NO: 379891 - DNA, 493 bp, Homo Sapiens
  misc_feature (17)..(17): n is a, c, g, or t
gtgttataaccaaggantccagcacgtttgttgtgtgtgtggagtctggaaatccagaataacaatgttgaaaaacctgtcaccctcctactggatccatagtatttaacctttcctgagctcccacttacccccatctgtaaaataaggggtcctgaaattaatccccatgatgaaagataccaatcagctacataatccatacaaatagtattttcagggagtgggaaaaataggttaaaccttaaagctcttcatgcataattcggaaacagagaagagtagtatcagaaaggcactggcctttgccactttctacctttatgaccttaaatcacatccaggaccagctatgtaatttgcagggcccagagaaaaatgaaaagcaaggccccttgtttaaaactttgtaaagaattttataaagatagtagcagaaaagcattaagcagagtgcatggcccttctaagcaggagactctgcaaatgtata

SEQ ID NO: 379892 - DNA, 480 bp, Homo Sapiens
  misc_feature (17)..(17): n is a, c, g, or t
ccataaaaacttaggangggcctaaggagggaggatgttgaaacagcccagaaaagccagctttttaaaaacacttcaagttaaatccacgaagctgtgcaggcttcctaattatccccttcctctgaaaatttttggtgcagggtgcaacacgggatttgaatttattcatcctccttcccacatatgtggatggaaaccagcccaccctgccatttacttctcctctccaccagccatttgcactcatctttgtgtaaatcttcaccacatctcctttcaacaaggacaactctctcatatctcttgcacagaagtcataccgagcgatggcaatgcccagcacttttggacttaacaagctgttgcctgctctattacccctctgtccagctgaatgttctggctccttgtatggaaactgcagagttgtatctaaggttctgaacccttccttgagagaatgatgcttgtagtact

SEQ ID NO: 379893 - DNA, 401 bp, Homo Sapiens
  misc_feature (20)..(20): n is a, c, g, or t
  misc_feature (43)..(43): n is a, c, g, or t
  misc_feature (48)..(48): n is a, c, g, or t
  misc_feature (54)..(54): n is a, c, g, or t
tgcccccaggaatgttgtancagcgcagttgctgaagaaagcnagccnggtacncaccgaaatgccagcctttcctggttaaccctgcttggatctgagttacactttgtttcctgacttcttgggacttaggtaatcagtttgccttctactctatctcattttgtactcgcttacatactacaatccttgtttgggctttcgtttcctcttgtaagcagagattttttaaaatccaatatgtgaaaatacggatgcactacaattaaataaataaaatgctgttgtgtttgttttgctttaaaaaattgtaaaggataaacaataagatagttttatctatgtggttttcccgatgcagttaaaataaaacctaatctgctaaaattgaatttacactc

SEQ ID NO: 379894 - DNA, 462 bp, Homo Sapiens
  misc_feature (238)..(238): n is a, c, g, or t
  misc_feature (396)..(396): n is a, c, g, or t
  misc_feature (447)..(447): n is a, c, g, or t
ttttttttcccaacatgtaactctctcagtcttgtcagaacacaacttctgctatggaggaaatatttccatcaggaaagggccaagttagtgtcttaacttgactgccttgaatggggactctggaccccaggaagaatgtatttaggctcctcacaaaaaagagtgatggctgggcaaaacaaatgtactgcaaggacccatcttccctccagttaatacactcccagggatgggnctgcagagggggagactctgaggaggaagctgggaggcccacaaaagtccactgaccctctttctgtcccagaaatgaattaaagggacccagttgtggctttcctttccaaaatccttcaacaaagttgtttgtgctccaaggaaaatgtggggganttaaaaaaatcatgttcccgggtcatctttgtgtgtgttgcgggggaggtnggtggggagggaaaa

SEQ ID NO: 379895 - DNA, 443 bp, Homo Sapiens
  misc_feature (52)..(52): n is a, c, g, or t
gtgtaatgtgtttgtttcctcctggaaaaacccctgacctaaatacagattnagcctatgtattaggtaaatacataatgccctaaatacataactaatatatggaacaggaaagttaaatagactgactgtgcccaccttaaaactcgtatgttgaagccctaacctcccaacgtggtggtattgggagatgggcccttttggaaggtaagtgtgtttgaatgaggtgaagaggttggggacttcgtgatgggattattgtccttacaagaaaagacaccagagagcttgttctgtctctttgggccatgtgaagacatggtgagaaagcagccagctgtaagccagagagtcctcaccagaacctaaccatgctggtgatatcctcatctcagacttctaacctccagaactgtgagaaaataaacttctttgtttaaacc

SEQ ID NO: 379896 - DNA, 749 bp, Homo Sapiens
  misc_feature (706)..(706): n is a, c, g, or t
  misc_feature (727)..(727): n is a, c, g, or t
  misc_feature (733)..(733): n is a, c, g, or t
cagaattcgacaacacatgtccattcagccctctgaatggatctgagacgaagacctttttaaagatatgtctgtattgaagagaaagccagttttgagttttttacacttgcacatcattatctgtgccgtcctgactagaaggttgtctgggcccccaaattccaagtcccagtatagccagggctcccattttgtttttccagagttcgtggaggtggactgcagagcccagagcccttcatctctctgagggtcaaggataccaggggtcccaagtcacagatagacattccagtttgtattcttaggaatcattcttaggcagtgcggcagaagcaggcctctgtgaagtgtctgccgggttagaaataggccttgaagtcctggggctctccaggcagtggggttatgtgtcgactgaagggtgatgtgcagaagagcttggagagtggatcagagagactaggacagttactgcagagctcctaagtcaccactcaaccagtggctgtttcacaaggatttgagggcacttgcctgtcttgtgaggtctgtgccacaaggtgagtcttgaacttgactgctccagctaagtgatccagggcacgttgaggagtattacggtgttcctcagcacatacacctgttgggaaaacggaccgttttgggtcctgattcccgggttacagcgcccagtaattcntcctttctttcagaggttttnttggcnttcccgtttcccaagg

SEQ ID NO: 379897 - DNA, 509 bp, Homo Sapiens
  misc_feature (24)..(24): n is a, c, g, or t
  misc_feature (417)..(417): n is a, c, g, or t
  misc_feature (474)..(474): n is a, c, g, or t
ttatgagaggattcatcgaaatanctgtgctttgtcatttaaaaagcatgggcatacacatgataatgctttacgtttctggatttaaagtgccttcacaatacagaactaggaaaaagaaggccatctttttaaatgaagatagttttaagagagcaataagagactattactttgttatgatagaaggttgggctgatgtcataatgatgttatgatgtcactgacatcatattatttcctcagtcatacctattaaccatttcttgagcatccactatgggcttaatagataagaaacactccataccctttaagagccctgaggtgtgtgtgtgtgaacagcattaaactttggagtcatgttacctggggtttaaatcccaagttgcatgaatactggcctttgtgtgaccnttggacaaactatttcacttgtgtcttgcctgcagtttctcccatctgtaaaaatgntgattaaagcttttctgcaccgccattattgatgg

SEQ ID NO: 379898 - DNA, 359 bp, Homo Sapiens
  misc_feature (263)..(263): n is a, c, g, or t
  misc_feature (297)..(297): n is a, c, g, or t
  misc_feature (344)..(344): n is a, c, g, or t
tggtcacaatgtcatgttcttcatcgtctccccgttccaccttgtactggtttccaagggtagtcgtttaaaagtaccacaaaaactgggtggcttggaacaacagaaatttattgtttcacagttctggaggccagaagttcaaaatgaagtgttgggcagaaacatgctgcctctaaagggactggggaaaggatctgttccagggcttccctcctatcttctggttgttccttggccttctggctggcgtaactctagtncttcatttggtgttctccctggcatggcatgggnttgtgttccaaattttcctttttttcatgagggccatcagttcatangggattaggggaccc

SEQ ID NO: 379899 - DNA, 610 bp, Homo Sapiens
  misc_feature (15)..(15): n is a, c, g, or t
  misc_feature (48)..(48): n is a, c, g, or t
  misc_feature (429)..(429): n is a, c, g, or t
  misc_feature (446)..(446): n is a, c, g, or t
ggtccgccaagaccngaaccttggaaccagcatccatacccgctgggnccctaacagaccacaaccagccagttacacacgtttttcctcaagtgccaaatgggaccctttcctctaggatagacagtatgttagatgactaaacaagtcaacaaatttcaaaagactgaggaaataaaatatcttttctggcccacagtgggatgaaactagaaatcagtaacagacaaaaaactgaaaagtacacaattatgtgaaaattaaacaacgctctcaaccagcagattaatggggaactcacaagggaaattagaaaatatcttgtggtaaatgaaaacttaaatgtaatatacaaaaaaacaggtacagtcaaagcagtggtaggagggaaatttgtaactgtaaatacacatattaaacaaattaagntctcaagtcaacccaanatttacatctgaaagaactagaaaaagaagagcaatcaacccaaagccagcagaatggagattataataataataaagattagagcagagacaaaatagagaacagaaaagcaatagagaaaaataaatgaaaccaagagtttgttgatagctaagagtgacta

SEQ ID NO: 379900 - DNA, 484 bp, Homo Sapiens
  misc_feature (20)..(20): n is a, c, g, or t
  misc_feature (49)..(49): n is a, c, g, or t
  misc_feature (59)..(59): n is a, c, g, or t
ccaaaaaacgctctttccangtttgaattgccggtggaaaaaaaacaanggcccaaaanaatccagaaaaaggtccaaaacctgaaggggaacctccccccacggaaggcctgccagtgtgaacctcccaatccctggggcggatgggcccagagaatccagaaaagggtcaagatctgaagggggagctccccatggagggctgccagtgtgagctcccagtccctggggcggatgcgttctgcgatgccctccacactggtgccttgaggaggaattacttggagctgagggaggccgacctctaggctcagggactggggagcttctgagaggaatggatgtgtgttgggtggtgcttaggctattaatgtaagtgctcattacgttagaaagtattatttcagtaaaagatgtatatgcgtgtgctatcaaactagtgagaatctgagaagcatatgatgaaaatagaaaatgagtttta

SEQ ID NO: 379901 - DNA, 467 bp, Homo Sapiens
  misc_feature (16)..(16): n is a, c, g, or t
taaggagtttggtaangagctacttggtttcctccggataatttacttaaaaatttcctttccttaattccacttgtaaatggctgccaggatcgtcctactgcccatcattaaatccgaagcctaagaagttgaaaatgaggttagtgatatcagtacacactgacttcagcaagtgtttggtaagagcagcctgtgtgtcatctgcaaaaaacttcatccctttttcaaataacctaatgttattgtacaggtttgaaacttcttcttgcaagtccttgattgtgcgttttctgcccgtcccagaagcagaagttgttgaagacatgaatactgaacgtaccacctcgagataagttttattaagaggttttattaagtactcagcaagttccgaaataaactcctcaggggcatcttgtatgtgttttcttaaaaaatcttcaatctcatcctggaacataaaa

SEQ ID NO: 379902 - DNA, 486 bp, Homo Sapiens
aaacagaaattggtgtccagcagagaagaaatgtagaaataatcaataaagacatcctgaagactctcttttgtctttctcgtcgttcacggtgtcgtttcacagctcgccggagggcaattattacagaaactgaagttcttacaccaaagactacatttctcccaccactgctttgtgacatgtctgtagccctcatgttgtgtggttagagaaattgtctttttctttcttgctttcttcttctgccctgttgaaaatcttgtgcctattcgaatattaagagcctgaagtattttggtgtatgtgattaacattactacaacagtgaaaaagaatattgggatctgtactaacaggtgataatacattcccagttcagtgtagtattcatttgtactgacacataaaagtgtcttgttttcccaggtatttccactttgaagactgaaaaaatttacctcaataaaaggaatcaggaaagag

SEQ ID NO: 379903 - DNA, 369 bp, Homo Sapiens
  misc_feature (162)..(177): n is a, c, g, or t
tctgtccaggaactgaagacgaaccttggccgcagtccttgcgaactgttcgcaaaacagtgcgggctgcggtgggtcagcgtcacatgctaatgacaggatgttcctcgtagctttttattttgtgcgtcttatgtttgtatagtgtgttgtcattttgannnnnnnnnnnnnnnnaagtataaaagctgcttagaatagttctatcatgaagggcacttttcagattgtgggctggaaagggttattttatctgtgggaggagggagggagacgtgaagcctatttaaaatgagcctgtgacgattatgcacatgaccagaggcggccggtaatcagggcagagtctggtgtggaccgccgggcgca

SEQ ID NO: 379904 - DNA, 200 bp, Homo Sapiens
aaccaaagacactgaccatagattgacttatacttttataagtctaattgaaatacttggggtactatgaaaggactgttccttgagtggctacgattagaaaatcaggactaacaaacttttctttgtctggaagcatatatatttgtgatataattttaatatgtataattttggtttaataaatcaaatctatgacg

SEQ ID NO: 379905 - DNA, 472 bp, Homo Sapiens
  misc_feature (28)..(28): n is a, c, g, or t
  misc_feature (45)..(45): n is a, c, g, or t
gtaaatgccaatatacatatggtacaangaacccgactaggccgnattcacaaaaacaaatataaatggacaagaagagacggtttcccttcctcctcattatccaaagaaatgccaaattaaaatgaggtaacacctgttaccccatctgattggcaaaaagtaagtttgacaaaactggatgtcagtaagaatgtgaaaaagaatgcctcagaccttgctggtggtagttgtcacaactcttcagaaagtctggcattttgaaaactaaaaattgcatgtactatttcatccaataatttctcttgtgggaatgtattcaacaggcattctcataaatgtacaagaatatctgtataaagatcctcactgaagatttacaacagcaaaaaatggtaaacaaatgaccatcaatagaggattgataggtacattaatttatatttgtaaaatgaaatagtatgcattggtt

SEQ ID NO: 379906 - DNA, 484 bp, Homo Sapiens
  misc_feature (17)..(17): n is a, c, g, or t
  misc_feature (38)..(38): n is a, c, g, or t
aataatatgtaaaacanccttgggcctggaagtttccnaaacctgaaacattgcctttccttccccatccatgttgaagtaacctccaatgccaagtcccagaattagctggccataactgaacaaaaccgttcccaaggttttgggaatgcctgggtctttggaacacagctcaaataaaagaaaataaccctattatgaaattccatagttggaccagtaatcagcactgctaaaaggaatggggtatcgggcagggactgtaaccaaacatctattcactaaatcagtaaaaaatctgaattcttgaactttgtttctggatccagcagctctattatttgcaaagacaagataatccatccatatcttctgtactatatcacatctcatagccacccctaatgctgcctcatatgcctccactgtttctttaatacttgattgaagaggatgacaaaggcagtaaatcagccacaaataa

SEQ ID NO: 379907 - DNA, 542 bp, Homo Sapiens
  misc_feature (58)..(68): n is a, c, g, or t
  misc_feature (99)..(99): n is a, c, g, or t
gagagcatgatttaaagaaaagtaaaaaattagttggcagcacaaattttaaaacagnnnnnnnnnnngttgttgtgggaagggtgggaaaggggtttnactttgtgtgttttaagcttttgtatactctccaaacttttaccttttgctttgtacacttaaaggatacagtagtccaattgcccttgtgtgcccttcccatctcccccttaaactgaatgtatgtgccagtatatatgcaagcttgtgcaaaataaaatatacattacaagcctcagtgcccgtttgattttccttaaagaaagagtgacttttaatttttggacctgtatcccaattgtaggacagtaggcctagttgtgcccagtaatgtcaagtatggagattttctttcactacaattccttcattctgttagccctaacgtgcagctcctagaaacaacctcttttactttagatgcttggaataattgcttggatttctctctctgaaacatctttcaggtcttaactttatttagccctgaaacttaaaaaaaa

SEQ ID NO: 379908 - DNA, 602 bp, Homo Sapiens
  misc_feature (289)..(322): n is a, c, g, or t
  misc_feature (374)..(374): n is a, c, g, or t
  misc_feature (443)..(443): n is a, c, g, or t
  misc_feature (502)..(502): n is a, c, g, or t
aatatttaacctcatggctgtcattatgtaagacatgagattttaataaataactacattctcacgacatctgttgaatttactaggaacactacagtgactgtatagacagttgaaagcattcttgaaaatcctgctctctccttttaaaagttaacaatctcttttatcagatgtcaagggcaagggtaatgcagtttctgtaaatttatgaaatttctttttctatgtacatgaagtacatttagtaagtaacacccccccttcccatgcggcacatgtgcattannnnnnnnnnnnnnnnnnnnnnnnnnnnnnnnnntgtcataaagctaatgatttgggactttaaaaaataggatgtcctccggggncaatcataaatttatgaaagaaagagtggtttacagactcccctgaaagaagcagtgtatatgtgaagncagtgcaaaaatctctttgccatgtatattatagcgtattcattggtgtgaatagtcanatgttccttctggtccaactctgtgtttgcaaatttccaagaggcattgttttcaaaagctcccttaaaatgtactggtttttgagtagaggttccgttt

SEQ ID NO: 379909 - DNA, 448 bp, Homo Sapiens
atagtttagtgtctagcttctggtccacttgtactggtgttgactatgtatcagcccagcttatgtggctacagggattttcgttgcacatctgaatgaagccaaaaacatacgcaaggttttaagagtatttgatgtcttattggcaatatgaggtggaccagccatacagttagtaacataaccagcattggcttctggcacttagttctgagttctttccgaagaacttatatatgcagaaactggacttagcactcacttaaagaagaaataactttgataagaaccaggtgggttgttctttctctttattggtttcatgttttcagatcttgctaactctccccagctgtgccctgcagtgggagacctatttgagactctgttatggatatggcccaaggataccacacatgccctagggttctttccccctaggcggaca

SEQ ID NO: 379910 - DNA, 436 bp, Homo Sapiens
  misc_feature (74)..(74): n is a, c, g, or t
gaaaatatgaagtaaaaactatggacttggccactaaaccttaaaaaactccctacttccagaaatgtcaaaanggtgaaaatgcatgagttgaaaaaagtttccatttttatccataattagcatgattaacataatcactgtcaacatatcatcatcatttatccctggcaaactctccccatgctaagcagctgtgatttccttgctctacaaactctttgagtccatatcttcccatacacgaccctatgtttccttacagtgatattcctagattttcctctagtacagacatatgggttgcttggaagcttgttccaacagaaactctctaaagcagtgactttcaaacttttatatcggtaaagaaacacatttcacacacacatatacacaactgactcactaccatgcatagtcctctgtgaaattt

SEQ ID NO: 379911 - DNA, 404 bp, Homo Sapiens
  misc_feature (81)..(81): n is a, c, g, or t
aaaagtggagaatccagaacgttttaacaaattccatgaaagcgaattgcctgcttgtcaggagccagattttgaggtatnccctggagtggagagcccactctttttgacctgccctacatcagaagtcaccgagctcccagcctgcagccagtgtggaggccaaaggatatttgagtttcagcttatgccagcactggtccagcatgctcaagagtgctaatttaggtctttctgtggaatttggaacaattctagtttacacatgtgagaagagttgctggcccccaaatcatcagactcccatggaagaattttgtattatacaagaagacccagatgaattattgtttaagtagagcatttccttttattaatataaattaaaacaaatgtttacatcc

SEQ ID NO: 379912 - DNA, 495 bp, Homo Sapiens
  misc_feature (19)..(19): n is a, c, g, or t
aaagaagaatcctgaatgntggaatccaaagtccaaggaaagttaggtaaatccgagggaaaaaagtttcccatccattttggatgaactgcatgagttctgggttaagtactacaatgtaatctgtttcccagggaaataagctattggtagttgtaggaaatcttagtatattttaaaagctgacatcccacctaattttaatctttggtctctaaaaagtaaatttcaaatttatgagtttaatcacttcaaatatgaatagcaaaaaatgagagcttgcttacttctaaaaactgaggttaagatatagctagtgtctgaacgacactccttaaagtaagttccaaatgtaaaacactccttaagttccaaatgttttccgctaatagtctgtcctaaagcctttgccattcctaatactcgttttgtaataattgctgtatttctgtgtaataaaatataaaaataaaatattcagtggtattcaacatc

SEQ ID NO: 379913 - DNA, 392 bp, Homo Sapiens
  misc_feature (77)..(77): n is a, c, g, or t
  misc_feature (253)..(253): n is a, c, g, or t
ggactaaactggaactagatccagatcaaccgcgggttactgtccaacacctgtgctggatcccattggcacaggtnggaagaataaattgcggaagtgccactcccctcctgcgtatcaacaacgctttgtgggcaaataatgaagaacacgtgtgttaatccccagcctccaagttaaaaaggaacaaatatcaatcacttcgcggatatcaaaactattaataaacgtttaaaaggccgggcgccaatantcacgcctgtaatcctagcactttgggaggctgaggtgggaggatggcttgaacccaggagtttgcagaccagcctgagcaacatagcaagacccccaactctaaaatacataattaaataaatgaataaatatacctt

SEQ ID NO: 379914 - DNA, 535 bp, Homo Sapiens
aaatcagtgggacccaattaaatccctgaaaagaccccatcctactaaaactcgcaaagggatgaaaaggggaatacccccaataacccttccaaaaacattttaccatattgccaaaacattaatgtttaagcccataatttaaccttattttaaacctagtgggtcccaggggttccccgatttgtcaagaacatttgaaaatggaaaatatttaattttaatacatgactcattaagtcaaggaatcgatccccactgtgggatatctttgcacaatgggtacatttatagagaatgcaggcaaaaatgatactatgttcatggttaaaggaaggcataattgttttaggtatagtagcttcctctaagatcacagggggtatcaaatgtaaatgttgtggtatcccaacggtattattcttatttgagccctgtattaacggacggtggacatttcccaagttgatgcatttcaacagatgttgaagttaattcacaacctattttgtagaggcataaaactcaatcacca

SEQ ID NO: 379915 - DNA, 483 bp, Homo Sapiens
  misc_feature (13)..(13): n is a, c, g, or t
  misc_feature (23)..(23): n is a, c, g, or t
  misc_feature (60)..(60): n is a, c, g, or t
  misc_feature (65)..(65): n is a, c, g, or t
  misc_feature (80)..(80): n is a, c, g, or t
accccgatttggnttggggaagncctaaagtggcccattttgtaaggatccaaagcctanttttnaatgtccaattttgnttttaaaaatttaatacaatagtgatgttacctagtaaaaaatgtttaatagataacacgtagagcctattaactgttcaaaagccctacatgataggcatattttgtatttcgtgttgcactcgttctgtttcatattggactttttacatcccttttttagcaaaaaaaagagacacatttgaattctctttagcataaagctgtgcattggaaactatgtgactgtatccatacggttagcaaaatactctttgccaccaaaggtaaatgaaactgtaaaatacctctggatatttgtgccaatgaacttttcttagcatattaggattaaagcaaaaataatcttttcagtatgtttcatctaggacttacaataaatgtttaaaccatgaaaactttt

SEQ ID NO: 379916 - DNA, 225 bp, Homo Sapiens
  misc_feature (20)..(20): n is a, c, g, or t
  misc_feature (83)..(83): n is a, c, g, or t
cccagaggggtcccccctcnagaaaactggatccatccagggcctgtgtaagccttccaggtccccttccccagggcccacgnactcattttgctgctgaaacacccaccctgggactccctgctggggcttcccaggaggccatttggtatcatggccccagtaccttgtgcctcacaaagcttgaagctctgtgttcctagtcacttccctggtgaatgctgt

SEQ ID NO: 379917 - DNA, 534 bp, Homo Sapiens
  misc_feature (467)..(467): n is a, c, g, or t
gaaggcttctcggaggatgctggatgatgaaatgacagtcagcctttccctgccaagtgattctagcatgttcaacaataaccgctcctcatcacctagtgaacaagggtccaactcgacttacgatcgcatctttccccttcgccctgactaccaggagccatccaggctgatacgaaaactcccagaatttgctccaggggaggaggagtcaggctgcagcggtgttgtgaagccagtccagcccagtggccctgagggggtgccccactatgcagaggctgacatagtgaacctccaaggagtgacaggaggcaacacatactcagtgcctgccgttcaccatgggacctggttttcagggaaaaggatgtgggctgtgggagggagtttcccccagggaaattcctaaacttttcaaaaggaggaagttgggggagtaagggacattttggggggaggtttcntcttttgttgaaattggaagggattgggaaaaatttcaaaggtccaaagttttttgccctaggtttt

SEQ ID NO: 379918 - DNA, 518 bp, Homo Sapiens
  misc_feature (249)..(249): n is a, c, g, or t
  misc_feature (444)..(444): n is a, c, g, or t
  misc_feature (473)..(473): n is a, c, g, or t
  misc_feature (488)..(488): n is a, c, g, or t
  misc_feature (508)..(508): n is a, c, g, or t
gggccggtgtcctccaccagcatttctcctctggtcacatctacgtcctgatgggcttctccctcctccttggaccatcagctttacagtccagaccaccctgcagccacccggtggtctcccagctgccccagtctcgggcaggatggcttttgagcctgttgggagagaccttgccaggagaatggtgcccagggaggcaagaggacacagactctgggagctagaagagttgcggcccagggcagnggccactcccagaggacaggaggcccaaaagcggggaaaggctccatgttacggtggccccatgctgggagtttgtgctgccttctgtctccctgactgcccaagcgtggggtggtgttggggcaggaggcatcctctggtgtttccctagcagcccagggttttgttgccaggggctcccattttgttttcttnagttgcaagaagggccacaaatgttattnaaccccaaaaatttnggacatttaaaacacgaggntttaggtttg

SEQ ID NO: 379919 - DNA, 344 bp, Homo Sapiens
  misc_feature (302)..(302): n is a, c, g, or t
  misc_feature (304)..(304): n is a, c, g, or t
cccctttagatttaaggtaattagaatagattgggaaatgatttaggattacccttcccaccctggaaatgtaacatcctacttatgttccatgaaaagaacacaataattgttcaacagcaagatttagtttctctaaaaaacaggagcactttgctctaattttcacagaaggactgcagaaaattttccaacatgaaagctagaaattgaggccagtaaagaagcttctttagtaatcaggacctatcatagttagagctctttggaatgtgtctcatacatacaaaggtatcacaaancnaaatcttcagcatattcataagttcttaaatgagaaagat

SEQ ID NO: 379920 - DNA, 592 bp, Homo Sapiens
  misc_feature (362)..(362): n is a, c, g, or t
  misc_feature (549)..(549): n is a, c, g, or t
  misc_feature (559)..(559): n is a, c, g, or t
  misc_feature (567)..(567): n is a, c, g, or t
aagcttttggtctgaaaaactcaggtgctgatttgtcaggtcagcctgagagagtgcagagatactgaggtcagcttagggagaagaattgtatggaagggtggaaatgagggttcagtcttaactatgtgtccaagaccttatcctgagagtcttcatggaataatctagaaagggctgtagaagcaatcaaactctaaactgcgctctagactttgtcaatactttgcttcgtaagaattagggattttcatatcagagtgataccatgttgcaatctctttagagaagagagagcctagcaggggaataggctagttggaaggaaaaacatacttgagatggttacccattgggtcccntgcaggcatctggggccacccttttcctgtaggtatatattctgccgttgtgaaacaactatattattagatgtcagcaaactataatcagaaataatttttaattatagtgggcaacttgattaatggaaggctcttcatattacaaccttcacaaacaaaaaggaaacttttatttacgtggaantggtaggccntatgtccnttggggttttaaaaggcaacatggc

SEQ ID NO: 379921 - DNA, 471 bp, Homo Sapiens
gtccacccagagtttcccagagctgttaaattgtgttccctctccccccccacattccatcaatggcccttaatgaactgttttcctacagaaagggtaaatatccatgggctgtaatggtccaggcccctgggcctattggatgcctatccggtactatagggtgaagtggaaggagaaactggaatatctagatgatcttccccatttctccaacagctcccaggacagcttttaaattagaactgacaaaggctgagggaagttttaggtaggtggaaaggaaggtaatgtttttatacctgcaatctttttgcataacagattattttgttatttggggttaataaaggcaaagaatagggtaagaaaaagctctttttgtctttctctaatgaccaggggagtctcaaactctaatccaaggatttacgaatgagagagaaagggatttcaagaagtgtattgtga

SEQ ID NO: 379922 - DNA, 364 bp, Homo Sapiens
tcatcctgcaaaaaggcccacagactctggctctcccctcatcctaacaccctgaatgaatatagtaaacctaaatagtagaatttttaattcagacatttcaaataaactggagcagattcccgagagtttatgacgttgttacacccaaagattgaagccgtggcgccgagcattggatttagtattgttagtacttcagacagacagtgaaataattactggacatggacacacacagataaattcacaggaattaacgggctttctatttttgtagtgttactggctaagtctttggaaaataatttttcataatatgtcatgctaataataaatatattgatagccaagtcaaaaaaaa

SEQ ID NO: 379923 - DNA, 525 bp, Homo Sapiens
ggtccaagatggggcctttatcaacttgcccaacttaaagagcctcttccttaatggcaacgatatagagaagctgacaccaggcatgttccgaggcctacagagtttgcactacttgtactttgagttcaatgtcatccgggaaatccagcctgcagccttcagcctcatgcccaacttgaagctgctattcctcaataataacttactgaggactctgccaacagacgcctttgctggcacatccctggcccggctcaacctgaggaagaactacttcctctatcttcccgtggctggtgtcctgggaacacttgaatgccattgtccagatagacctcaatgagaatccttggggactgcacctgtgacctgggtcccctttaaacagtggattcgaaaccattcagctcagttcagtgtggttgggtgatgtgcttttgcagggagccctgaggaacctcacgcaccgtgatgtgcgcactattgagctggaagttctttgcccagagatgctgcacgttg

SEQ ID NO: 379924 - DNA, 544 bp, Homo Sapiens
acgcggcaaatttacggaacttggatctgtcctataatcagctgcattctctgggatctgaacagtttcggggcttgcggaagctgctgagtttacatttacggtctaactccctgagaaccatccctgtgcgaatattccaagactgccgcaacctggaacttttggacctgggatataaccggatccgaagtttagccaggaatgtctttgctggcatgatcagactcaaagaacttcacctgggagcacaatcaattttccaagctcaacctgggccctttttccaaggttggtcagccttcagaacctttacttgcagtgggaataaaattcagtgttcatagggacagaccatgtcctggacctggagctccttacaaaggcttgatttatcaggcaatgagatcgaagctttcagtggacccagtgttttccagtgtgtcccgaatctgcagcgcctcaacctggattccaacaagctcacatttattggtcaagagattttggattcttggatatccctcaatgacatcagtcttgc

SEQ ID NO: 379925 - DNA, 547 bp, Homo Sapiens
ggagatgctgagacagcgcccaaagaactcttctttgagcttcggagacctccacagcatggtgtgcttcttaagcatacagctgagttccgaaggccgatggcaacaggtgacactttcacctatgaggatgttgagaaaaatgctctacagtatatacatgatggttcctctacccgggaagacagcatggagatctcagtcacagatggcctcacagtgacaatgctggaggtgagagtagaggtgtccctgtcagaagaccgagggcctcgactggctgctggctcctctctgagcattactgttgccagtaaaagcacagccataatcactaggtcacacctttgcttacgtggatgattcttcccccgacccagagatctggattcagttaaattatctgccctcatatggtactctcttaagaatctcaggatctgaggtggaagagctctcagaagtttccaatttcacaatggaagacatcaataacaagaaaatcagatactcagctgtgtttgaaactgatggtcatctggttact

SEQ ID NO: 379926 - DNA, 521 bp, Homo Sapiens
  misc_feature (471)..(471): n is a, c, g, or t
  misc_feature (481)..(481): n is a, c, g, or t
  misc_feature (498)..(498): n is a, c, g, or t
  misc_feature (509)..(509): n is a, c, g, or t
gctgcaggaagctgttcgaaagctccacaaacaatggaaggatcttcaaggagaagccccttatcatttgcttcatctgaagattgatgtggagaagaataggttcttagcctctgcagaagaatgcagaactgagctggatcgagagaccaagctgatgccccaggaaggcagtgaaaagataattaaagagcacagggttttcttcagtgacaaaggtcctcatcatctctgtgagaaaaggttacagctcatcgaggaactctgtgtgaaactcccagtgcgggacccagtaagggacacacctgggaacctgtcacgtgactctcaaagagctcagagctgccattgacagcacctacaggaagctcatgggaagacccagacaagtgggaagggactacactagcagatttttttgagtttttcatcttgggatatctacaaattgaggacacatttaaagggggntccagggttnagggccttcgttattgnccaaccacggngaggtttaactt

SEQ ID NO: 379927 - DNA, 522 bp, Homo Sapiens
  misc_feature (409)..(409): n is a, c, g, or t
gcctgtgtgacgcctagggatgacgtcacgcagttctcttacgtggactcagagggctccccagtgggtgtcgtccagctcaccttcctgcggctgctcagcgtctcagcccaccaggacgtctcctacccctgctctggagcagcccgtgacggtcccctgagactccgtggggccaatgaggatgagctgagcccggagactagcccctatgtcaaagaattcagagatggctgccagacacagcaaggccggacggtgctggaggtgcgaacgcctgtgctggagcagctgccagtgctggatgcctccttctcagacctgggagccccaccgaggcggggaggggtgcttgctggggcctgtctgctttcatggggataggaccgtctctgtcttgatcctgtcncatttcggaaccaaggcccacctggaattcccacaacatcagctctgtgccacctcccaagagggctcctcactatctagggagccctgggccagggcgtggagagccctcag

SEQ ID NO: 379928 - DNA, 261 bp, Homo Sapiens
tctatagacacccagcattggagagagtggagcagcccttcaagaagttccaacctctgcccaggactggttttaccaacttcactaggcttagaatcgtaggaagtctatttgggacttgcgagtctcacgtattcctgcctaaatgtttatggatacctgtttagagctgaaatcttttcagctcccataatatgagggaattaggtctcaaagaagatcatgtattttgatcagaccttatagctgagcagtggaaag

SEQ ID NO: 379929 - DNA, 458 bp, Homo Sapiens
  misc_feature (218)..(218): n is a, c, g, or t
  misc_feature (430)..(430): n is a, c, g, or t
  misc_feature (437)..(437): n is a, c, g, or t
ctgctggccggctcctctttaatggcttcaccctacaaatccagcagcccaaagctgtctggggccatgagctcgaactccttgggaattataacccctgtccctattcctgtccatgtgctctccttcagcgctgactcctctgccaaagcaggggtctccaaggatgccatcgtcacaggccctgcccccgggtccttccaccatggccttggcancagttcttctggctggcttgcactccagcccgccccatgcagcgcctctcccacacgctgcggtgcccacccatatcccgcagagtctgccagggtgcttctcagcttcacggggaaaggggcctgctgtaaccacgggaaattgtggaccgctttcagagggcaagggtttgccaattggggtctggggttggaattcagaaacgttgcanggtcttnccagggatgttacattcaatt

SEQ ID NO: 379930 - DNA, 1083 bp, Homo Sapiens
  misc_feature (583)..(583): n is a, c, g, or t
tgccatctattgaggtgacattacattgtgtttttatctcgtcttaattcatgacattaaattattctactaacagtaataatgctgtaataaacatcattatagattttgcttttttatatcttgtttgctttttcatatttccttagaatttacttgaaaaaattgaattactgggtaaagggcttttgcaaagtattgttaaattcctcgagttgcatttttggaaaggggacgtgaatattttatcaactaatttggtctccctgctgccattagtgactgaatatcttaatctggaatctcaggagtgtagtggggtttttaggtaggtgctgaaggacaagttttctaaagtgtattatggtgataaattatattttaaaaactgtcaatggcttgaagcacaatagcctaataactaacgaaaatgcatacaagatagaaagtgggtagtatttcttgtacttgcatttcagatctaaatattttaacatatttaaatttcaagctgcagataaatgcattacattattaaattcatttcccattttctctttgaagaaattaaggcaaaagtgtntaaaagattttaactaattcgcacaagtgaattgtgaaacaagtagctattgctgtgaaatctgcactcctctctgagactcattctgaagatggagatccccagttctttgtggattcctcttccttattcatggctttttgccaattgtcaaggaatgactaggtaccaagcaactttaaaaaatgtatatttaagcattgaaataatatcaaatgtgatttctctgcttgtggttatattgattatattatcccttttaataatattggcattatattcttggtcgtaaaatgtcaaggtcttatttattcaatatatttatgttctgtattttcatatatattatctattttcagccatgcattatatataatgtcagtaatagtatttcattagcattcattataaaaaaactcgtttttaatatttgactaattcaagtcacagtacttttgagatagctgaaaaggaaaataaatgtgttttaatgtgctact

SEQ ID NO: 379931 - DNA, 456 bp, Homo Sapiens
  misc_feature (15)..(15): n is a, c, g, or t
  misc_feature (29)..(29): n is a, c, g, or t
  misc_feature (63)..(63): n is a, c, g, or t
  misc_feature (78)..(78): n is a, c, g, or t
  misc_feature (159)..(159): n is a, c, g, or t
  misc_feature (211)..(211): n is a, c, g, or t
  misc_feature (227)..(227): n is a, c, g, or t
aaaaccccttaaaanaaaattcccctggnccttgaagctctggtttttaaactttccctgtanttggataaagaactnctcctaggttaccccaagtttggaaatgctggagctaccctgtgaccccatatatctgtttttactgacgaaaccctggantttgtcctaaaaactgacttgttaatctttactcatcttttgatgatgttantgttatttgacttaantcattgttcgcttttcctctgggttttattaatacattccaggttcagttcaagacatttttttcatgcaattttgcctgatttatgcccttgctcttcctcttctctaaccttcaacaatggttgatttctaccaaaagacaccattaaattgttgcctgccttatgatgtttgatgttgtgtgcacacaatataatcttcctgctgaaataaaagctcctagagttc

SEQ ID NO: 379932 - DNA, 383 bp, Homo Sapiens
  misc_feature (48)..(48): n is a, c, g, or t
  misc_feature (97)..(97): n is a, c, g, or t
  misc_feature (166)..(166): n is a, c, g, or t
ggaatgtcccatgcacttgggttttaaatccagcagttcccctattancctgattttaagctgttacctgtgatgaacttagagacagtcatcggtntctgcctgctgtgtcccccaggtcttgtgtgggtggcacagatctgggcagttagatagtgctctgtgncctaaggtgaagccacactagggtgaagcctcacttccctgtttgagcaatgcagtgcctgctgcccgtgtgcatgaaggtacagccattcagataagtggaactattgagttacataaagaaaatagatttgcatttgtcaggcagacgtttatacaacaccacggtgcttttatacattgtgcttattttaataaaactgaaattctaaaaaaaa

SEQ ID NO: 379933 - DNA, 106 bp, Homo Sapiens
aataactgaataaagatgtaggttaatgccaacattttgtaaacagaattgtgttttcaatgaaaccttgtaaagggataacatacaccctttccttttttaaaaa

SEQ ID NO: 379934 - DNA, 304 bp, Homo Sapiens
  misc_feature (21)..(21): n is a, c, g, or t
  misc_feature (28)..(28): n is a, c, g, or t
  misc_feature (33)..(33): n is a, c, g, or t
acagagtaccatacctgaaangaacaangaaantccacattaaattccatgtgccatgaaagggaaaacctgaacctgaaagtaagggaaatacatggtgaataaatggtggtgtgcccatgacttggtggcaagcagagtgtaatggtcaggagagtgggcttttggccttgagataggctgcctgagttcaaagcctgcctctgccactcattagctttgtgaccttgcacaagattgtttaacttctgtgccttgattttcttatctgtaaattgatgtaatgataatacctaactcattt

SEQ ID NO: 379935 - DNA, 412 bp, Homo Sapiens
  misc_feature (94)..(94): n is a, c, g, or t
  misc_feature (161)..(161): n is a, c, g, or t
  misc_feature (226)..(226): n is a, c, g, or t
  misc_feature (366)..(366): n is a, c, g, or t
  misc_feature (369)..(369): n is a, c, g, or t
aatagaaaatggagataagggatggacctggacagtttaccagaagaagaaatgtaaatggcccagcaaggctaacaaaaggtggatcaaaccncattagtaacccaaggaggcatttcccattaatcagccctagcaaaaactaaaatgactgataacancccagttcctgatgatggtgtggggaaatggatgctttccttacccaatcctttttggaaagatnctcaggcatttaaaatgttcatttttcatggccagtggtctcagtttgggaattttactataataaaaacatctgtgcattggaatgtatgtaagatttattgtgatgttgtatgtgtagtaggagagaaaacattgaanccnggataaacataatgaataaattaataaactgtggttcatccat

SEQ ID NO: 379936 - DNA, 504 bp, Homo Sapiens
  misc_feature (23)..(23): n is a, c, g, or t
  misc_feature (39)..(39): n is a, c, g, or t
  misc_feature (49)..(49): n is a, c, g, or t
  misc_feature (54)..(54): n is a, c, g, or t
  misc_feature (59)..(59): n is a, c, g, or t
  misc_feature (87)..(87): n is a, c, g, or t
aaaccccggcaacctcggaaacntcccccttcctcacangtgccaaaanccccngaacnttgaaaaccggaaaggaacgggaatgtnccgtaatgttccaaagccccctcatttttgccacatgtgggaagtgaggtatagagaaaggcggagtgacttgtcctagtggcagttagcctcgtgagtagccaggatcaagatgggaacccgggtcttcatgaactctccgaatgccttctttcagcagttactttggaattagaaccgattaaagtgtttgctgccttgatgtggggtgtgagttgtgttccacagacacagagcctcggtggattaatggtgtgctggaacgtgtttaactgtgggctctctgaggggaaaaagcgtgattatccataagtacgtaagtttattatacattttgctgttatgaaagatgtggaacatgcaatttataataacgataaaatatataacactctttgttataaattccatagaacc

SEQ ID NO: 379937 - DNA, 350 bp, Homo Sapiens
  misc_feature (18)..(18): n is a, c, g, or t
  misc_feature (73)..(73): n is a, c, g, or t
aaaaaaacctaaaaatanggaacagtcccttatccaaaaccttgaagaaaccatattgggaagaaagaaacancccccggagattaccttccctgttgaagttttaatattgtaaatttttccacctgccctcatcccccttgccatggtgttttactctttaagggactgtagaactgttcatatgttaaaagacatgacactgaaatgggtccctcctcactgatcaactattagcggactgtgatggatttgactgtggaaaaatttacgtctactaatgtcttgcttcccttagcaattcctgagatgtttttaatgtgtccttctgaagtatcattaaaattatg

SEQ ID NO: 379938 - DNA, 542 bp, Homo Sapiens
  misc_feature (49)..(49): n is a, c, g, or t
  misc_feature (56)..(56): n is a, c, g, or t
  misc_feature (72)..(72): n is a, c, g, or t
  misc_feature (94)..(94): n is a, c, g, or t
tcaaggaaaaggtttccaggcccgctgttcccccccaacccttctgaantgccccnactccatgcctacgtnaccccaataacaacaacgtccnttcccaccccttcccatggtgaatgcactggaaacacccgtgagcatggccgaaaggcaaagttgtccaaagttggtgaatgcccgtgccttgggacccatccccagccgggcctttgcacacccgtgccgttcctggcactgcccgcccgtggcccgtttcccagcgcacaaggggaagggtcatcttctgctggaacatctcaaatggccagaagaagacaggagacgggagcagcagggagggagacatgtgggcagagaaagaagtcagagagaaaagtgacaggatgagggatgggatgggcaaagcaaccatggcaacaacagcgcaagacatgtttaaatcaggtccccagatgtgaattaagcaacataagaaagtaggctttccatttaggctgctgttaatttagaaggtcagtcctttccactcactgttgtaaaag

SEQ ID NO: 379939 - DNA, 443 bp, Homo Sapiens
  misc_feature (15)..(15): n is a, c, g, or t
gagggatcactttanccccggggcctcgagacccattgtgggccaacatccacaagacccctatctccaaaaaagccaaccccaaacaaaaaaccggaagcagagagggtacaaaacaaatacttcaaaactcaggaatagttagcagaatttggaaataagttcatagaatgggatgagaaaacggtggctctaagtgaaagggtgagcaaatgagaatatgaaagagagtagcattgagagagacagaaacaaacattcccagggaagagtgtttctttctactaagtgggaaattcctcagatagaagcaagtctccttggttaagcaaatggatgttccatgaccaaaatgactttgttccccctaatctgcccattccactcccaatttctaaaaatttattttcatttttcctgaatacacacacagagtctagttg

SEQ ID NO: 379940 - DNA, 488 bp, Homo Sapiens
  misc_feature (383)..(383): n is a, c, g, or t
  misc_feature (458)..(458): n is a, c, g, or t
taatttcccaggtcacgtagacaatcattgataattgaaacaagtcctgagttgaaataaccttgagttgagcaaaaatatcctcattttggcagaagctgggcttggtagtacagtaaaattttagtgtaatgtgctcttgtaattgaaaagggatagataatctggatgtttctgcaaaggaaaataggtgtgtacttaacagctttggctctactcagtttcttaaaaagataagagcaaaaaaagttaaatgttaatcaaaacatttaagtttcctttaaattgtaggtaataaaatatatggaagctcctttttttactttgctctgtgactgggtttaaagggtaagtttgttatgttgttgggtaggattttgccngggcttctcccaacagagtaggagtgatttgggcctcattaacttcacagtgggttaccctttgttccatgttcngggtttttgtaaagggtagtaccgggattt

SEQ ID NO: 379941 - DNA, 420 bp, Homo Sapiens
  misc_feature (131)..(131): n is a, c, g, or t
  misc_feature (295)..(295): n is a, c, g, or t
agagatgcctgcacaggtgcttgggggaaaagcaggaccatcctgaagggagatggtgtctgtggacaaagaactctgcagtggttcttatttgcatgatttctgctggtggaggctgtaaatgtgagccncaaactccccacataagtgagttttcattgtaatcccagaatgtttttaaatcaccctacttctattgaacttgcactatcatctgttaacctctactgtatttattaaataaacctgaataggtaaatcacagtacagcaaaaggttctgtgttccccagaantctaatcaaactccaaaatcctgaaaaggctctagtcctttcctatatgtcaaatttaaatgataagttttcattttggaacataaagagggattttgaagaccacagcatagccctgggttttt

SEQ ID NO: 379942 - DNA, 373 bp, Homo Sapiens
  misc_feature (28)..(28): n is a, c, g, or t
  misc_feature (138)..(138): n is a, c, g, or t
aattttttgtaacgacagggtctccttnatgttgccccaggctagtctcaaactccctgggactcaagagaacctccaacctcatcttcacaaagtgctgggagtcacaggcgccagccacggtgcccaacctgtganaattattttaaactcattttacaaatgaggaaagtgatattcatacttgtaaagccattggggctgaattttcatttttgtatccacagaactaacacataaagtttacatgccattagaatgtaagctctctgtaagctacagatcttttctactgtaatatccttagtgcctagggcagtgactagcatatagtaggtgttcaataaatatttgtagaattaatgaaaaaaaa

SEQ ID NO: 379943 - DNA, 460 bp, Homo Sapiens
  misc_feature (20)..(20): n is a, c, g, or t
  misc_feature (27)..(27): n is a, c, g, or t
  misc_feature (44)..(44): n is a, c, g, or t
  misc_feature (70)..(70): n is a, c, g, or t
  misc_feature (78)..(78): n is a, c, g, or t
ggggaagtccatttcccccnatggaanggattgggaaaaccaanggataaattccctaaaccctgtaaanggccccanttcggacctccattggccttaacaaataggatcctaagcctcttttttcctgccttaattccgaactcccttcccagcttccccatcacatctgtaacaaacttttaaaatgatattgcccacacccacccatgcacaagccctacctgcacagtagagatagattattcccatcgcattcagatggttaacagaggttagtcaagtcctgtattatatatttatatcgctttctaagaaagtgcatattaatgtttactttaagaatgtgtaaatggtgctatcaagaatctgataaattttatccccgttttttgtgtaccacttctaatgtatgagatttatttttttattggaaaaaaataaacagtatgaaagcatt

SEQ ID NO: 379944 - DNA, 403 bp, Homo Sapiens
  misc_feature (23)..(23): n is a, c, g, or t
  misc_feature (117)..(117): n is a, c, g, or t
ggtttcccaaatgaaaggacatnaccccgcttgtcagtggaccagcaaagcaaggtggagcaagagaatctccccgggtatcgtcggcctcagaggtctcccagaaacaatagctgnccgaagaggacacagactctaaattcaagtgtaagttgtgctgtcggacatttgtgagcaaacatgcggtaaaactccacctaagcaaaacgcacagcaagtcacccgaacaccattcacagtttgtaacagacgtggatgaagaatagctctgcaggacgaatgccttagtttccactttccagcctggatcccctcacactgaacccttcttcgttgcaccatcctgcttctgacattgaactcattgaactcctcctgacaccctggctctgagaagactgcc

SEQ ID NO: 379945 - DNA, 480 bp, Homo Sapiens
  misc_feature (51)..(51): n is a, c, g, or t
  misc_feature (99)..(99): n is a, c, g, or t
aaaaaacagttaggcaaagaacctaagcaaacccctcctgtggggccaagnaaagagaaatttaaaaataagtatgtggactttcaaccctccctgccnattaatccacataattgccaggaggtatcaccccagaaagataagtaacatgttgaacatgatttggctgttcctcccacccaaatcctcatccttgaaatatagctcatgtaatcccccacatgttgtgcagagggacccagtgggaggtaattgaatgcaacaggggcagttaaccctcatgttgcacgtgatagtgagtaagtctcacgagatctgatggctttataaggggctcttccccccgtggctgggcacttctctttgttgccgccatgtataagaggacgtgtttgcttccccttatgccatgattgtaagtttcctgaggcatcctcagccatgctggactgtgtgtcaattaaaactctttcctttatg

SEQ ID NO: 379946 - DNA, 453 bp, Homo Sapiens
  misc_feature (270)..(270): n is a, c, g, or t
aaaagtgtgtgtgtaacatgtgtgtgccacacatggtaacgtgtcccatgtgccctacctgatactttcacatgtaattaaattcccggcaacccagcacaagagcccgtgagcttggcacatgtgctgctccgtgagcaggaaaatcagaggagcccactgatcctgagtggtatttaggttgaaggaaagatttctcctctcaagtgcccagggagcagcccacacgtctgtctgtgtttagagagggaagagggttctcccaggttncaccatttgggttgtttatatgttggtagaaattctccctgtatgcctagaaggatcagtgaatgtaagagccttggaaattaacaaaataacagccacatacacttgcggcaagtctgatggaaagaaaaagataaaccatccgtggggtagatgcaataagcccacgtatttttacactgg

SEQ ID NO: 379947 - DNA, 444 bp, Homo Sapiens
agctgattggatctgtgtgacaaaattatttcttagctataatcagcacatccacttagttcaaacaaaattccccagcaaatgttaggataagtaggtatatccagtcacctggggagttttcttcataatatgcatattcatcttgtaatgcatacatagttatcatcctccttctcaacccatctccctaaccccacatgcttgccagttcttgaagggataaagtgattctaataatgttttacttctctctgttcaatttaatgtgatataattctagtataaaaatattttggacagttgcttaacatggtcataagaggatttgtactatagaatatcttctagtactaatttttctgtagagcaaattatatttctctcactggatagtttttagatgtgtttcttcatataaaattaaaaactgagatggaattc

SEQ ID NO: 379948 - DNA, 333 bp, Homo Sapiens
  misc_feature (28)..(28): n is a, c, g, or t
  misc_feature (44)..(44): n is a, c, g, or t
ctgtgcccccctggaaaccctgaagtancaagcccaaacctaancaattaaggtggggaaaagtttttccctcaaaatcaagttgccttggctgtaacctcatgctcatgccacagatccaagcatgctccttactttctctcttctgtatattggaatcctacatgatttggccgaaaattgagcttttgtcgtgaagctgtccctcttcttcctaccattgccctcattagaccaaagtaagcagtacccctcagcaaaccaccttgaactcaatttttgtattttttctaatcgttaacactttgtcattagccaggtgtagtggtgcgt

SEQ ID NO: 379949 - DNA, 312 bp, Homo Sapiens
cctttcacccttcctcaagtttcccatggccctttgtgtgttcctttttatgttgatttaaattcatatggttttcccacaaatcccttctttggcctacattgtctccttattcaatggattatccctttgtgggggctgcttattttaaagatgttgggggggaaacaaacccaaatctacgagcagtagttgcacatagttgccagttttaccttcttagtcattagatttccaaaccatgttgcagttttttggtccagatatagtatttctttctaataaagttttatgttgctgctctaaaaaaaa

SEQ ID NO: 379950 - DNA, 529 bp, Homo Sapiens
  misc_feature (480)..(480): n is a, c, g, or t
gtagatttaatctaaagcataaagtacaagctagagcaatccctccagtgctgcagaaactgcctgcatgtggctcccacattgtttcttggagctttggtggtggtaggggtggcaggggcaggtgttatgtttcttggtttctcaccttcaggtctccttacccatgtttcctttgtcagagtcattggccttgatggaggggagactgggttactctgagttgagaagcaagcttgactgccctgtggtttatatcagcctagcttagtttgttttctgaagtcttcacaaataaccaaatatccagcccagtgcagttctcaatgagtagtctccagttcccatcccccaccacacacacacacccaaacactgtggcccacctggggagacccatttttcatttatcttcttctttggagtgcccggggaggttggaacatttgattctttttcaaacattttttctctcaactnggcccgttagggtttttgaggcctttgaaaaggccatttcccttacaaa

SEQ ID NO: 379951 - DNA, 507 bp, Homo Sapiens
  misc_feature (32)..(32): n is a, c, g, or t
  misc_feature (51)..(51): n is a, c, g, or t
  misc_feature (60)..(60): n is a, c, g, or t
  misc_feature (69)..(69): n is a, c, g, or t
cttaaaaaggtttcagtgtgaaaaaacctttngcacaagaactaaccttanaaggcacancgaacccanaaggcccagaaaccccaggaaggaaaggactcagggaaatgtttgttgccccctcatgccccccttctcactttagaacatatattggagagaagcccctgttatggtcacccggaaacagccttctggcccaactctggatgcctgttatactgggacaaaccttataaatgttatagctatgattgtttttatcagtgagtatttcattcttatatgtgtcacaactgtagatcctatgaatattttagttatcttttcagtttaattgcattgtgaacagaacacatggtcttcaatatgtagattctgtgtgacatagatttgaacataattgctggacactgactgatgtactgtggcagacagaactagttgctgtctcaatatccattcctcccttctttcttaaagtaataaaatttaccatttagttca

SEQ ID NO: 379952 - DNA, 501 bp, Homo Sapiens
  misc_feature (319)..(319): n is a, c, g, or t
  misc_feature (330)..(330): n is a, c, g, or t
  misc_feature (388)..(388): n is a, c, g, or t
  misc_feature (453)..(453): n is a, c, g, or t
  misc_feature (490)..(490): n is a, c, g, or t
ggagcaaccccttggctaactaaagaatcgttccaaagtagatcccatagaagcagtttaatttactaaggttaattttctgaattgagccatatcaaatgccaacctggtaaccgccatttgtgtgtttcttcagtgagttgtgctccacttgggatgtgagcccagatagctttagtcttagcagtgaaaagacccttccagatccatttagatatggatgacagctaagattcccaaaatggaagtgattaatgtgaactaagtgtagggtgctgttattttgggaggaccacctgtaggctactctctagaaaangactattatgnagcccatgtattatggattccatgttctatgggaattacatgcttgggcactcctttnaaaaattaaggatttaccaggaccaaatttaggcttaggagggaacagatgttttcctttttccnggggaattaaaaaggacagtagggttatttttcaggntatttaggtac

SEQ ID NO: 379953 - DNA, 455 bp, Homo Sapiens
  misc_feature (125)..(125): n is a, c, g, or t
gaactgaggagggggccattggggatccgcgtactgggctgaggaaaagtccagtttgggggctgtggcagagaagaggccaagccggagtctgaagaagaggccatatttgggtcctggttctnggacagagatgaggcctgctttgacctaaatccctgttcctgtgtacaaggtcagtgataggttcagagatgcagctgagggagcttaatgcatcctccaggccccaaacctgggacgaggtcactgttgaattcaaacctgggtctttttcatggggttgggcttccgatccacaagcccctttggaattcccgaagaggcttctgaaatgcttgaggcaaagccaaggaacctgggaacttagcccagaaggagaagagcaggaatctttgcttcagcctgatcagcctagtctgagttcacatttcagtatgatcttctacccgtca

SEQ ID NO: 379954 - DNA, 1000 bp, Homo Sapiens
  misc_feature (14)..(14): n is a, c, g, or t
  misc_feature (85)..(85): n is a, c, g, or t
  misc_feature (220)..(220): n is a, c, g, or t
  misc_feature (229)..(229): n is a, c, g, or t
  misc_feature (231)..(231): n is a, c, g, or t
  misc_feature (268)..(268): n is a, c, g, or t
  misc_feature (489)..(489): n is a, c, g, or t
  misc_feature (985)..(985): n is a, c, g, or t
ccaaatgtgctganttcccacatgccaaagcttgtcaaatttaacagctccctagctgggagaggtcccaccctggtcccagtgncaatccgtggggcaagctcttggagagcgtcctgatgaacacctggccgaaggctgtcccaagcccacagcgcatccctggcaggcggcataggcgcgcatctcggcttcgggaggcagctgcaccgtggagggncgcgactgntngctcctgtggctgacgctgcacaggtccttgctgctnctgcacagccacaggaagcttccttccttcgtgggagctgcagaagccaacacaaaggcccattttgtagcagaagctgtccacggggaaccacatgattccagtaggtgcctatgagacttcccttagcgacgtggaattcattcttgcccgaggagatccagacaccgctgttattgaccccgagaaggcttggctggcactgaagctgctgggaccanaacgccatgcgcagcttatctgccaccttttctacgggggcttgggctgctgtggccaccgagtgagtggcatggattatcgtctgaaataagctgcactggtcaaacaccacatagtccgtgatgctcacttgccaccaatggtcgtcatctccttggggcttcttggaaataatgccagttctgaaccacaggttcccatggatgtccagggcccagagagtctgctgatccccgagcgttatgcagacgggttctaaagcttgcctttcgctgacaatgtcacacttccactgctcgccttccggacagaagctgcccacgccctcccggtacaggagggccctctgctctgtcagcgcccacaccacattgttccgggctgtgatctgggacagcgggtagggacagtccacctttacggctctggcacaagggcgatccacgctcagacctgtctgcaagtataggtccccactggtcctgatgtccaggnccgtgtcatcgctca

SEQ ID NO: 379955 - DNA, 507 bp, Homo Sapiens
  misc_feature (26)..(26): n is a, c, g, or t
  misc_feature (35)..(35): n is a, c, g, or t
  misc_feature (42)..(42): n is a, c, g, or t
  misc_feature (49)..(49): n is a, c, g, or t
  misc_feature (70)..(70): n is a, c, g, or t
  misc_feature (108)..(108): n is a, c, g, or t
ccctggggaaaaagaaactgtactgnacacccaangggttgnaggcaangcttcaaataccccatgcaancatctgtttcaacttgaagctgggccttcgaagtcggnagggcccctgaccactggaaagtgtgaacagccagagaaagggcaatttgttttcagggacacctcagagtcgaggcactgggcctagcaacagctccccgttccacaaaggatcctttctgagagggaaggcgcaacctggtattgaaacctggagcttctgtttccatcttgtttctcctgtgtctgccccttcaagttccattaacatcaacctggactagacaagatccgtgtgagaaaaatgccattaagtactttcctctcattaaagggcacttctggtcaagtgcttaatgcccctgaaagatgaaaaaagctgccattttaaatgtaaggcctaggaccaccctctcaggcatttacaatttaataaagactcttaccaggagatctcag

SEQ ID NO: 379956 - DNA, 539 bp, Homo Sapiens
  misc_feature (513)..(513): n is a, c, g, or t
ccctgcctctgtgaataagaaaggaattggaaacctgcttaaacaagcaatctaacaacaattttggtaaaaaaagtcaatgctaatgctgggaaaccctctctgccctctggttggtttgtactctccaaaaccctgcaaaaacagctgagtcacccaaaacagcaaagatggcagcctgtcccttcccctgggagttccatcccaggtaggctcaaaactgctactggtggctggctggaattccaagccagtgggtcttatcctgtgaggtgttatgaaagtgagacctgcagactgtctctacttggtcctcttgattcagccttttttcctaagggtatgtacgggggtctaacatcctgctttgctggagttgcagttacttttgctgggaagtttggagttcctgggtctttgcctgtgccggagcagctgctctgccaagactccccatatctgtatgtcagactgaaggctctagtggagtggcttcacaagggcgtctcttgnaccaagggttgcaaagatccgttgga

SEQ ID NO: 379957 - DNA, 472 bp, Homo Sapiens
  misc_feature (14)..(14): n is a, c, g, or t
  misc_feature (44)..(44): n is a, c, g, or t
acggcaacccaccnacctccctaactcccggtgaatcctaatanccagacaagttttaagaaaaactccctaatggatagtgaaaagaatacttaaagaaattttggagatggcataagtgcaatagctataccttcacacttaattagaaccgtgtgttttcctatgaccagcagggattacttttattaaacaatgataatggcaaaatatctggttcaaaatcatctctgctcagattttgttcttttttgccactgatagtcatttggaactaggaggggaaaaaggagtgtgtcacttcatagttcagttttaagtttctcatataagccatcctgatcaatcatgtctgtgtgcccgttccagcggtgataggcaaggagtgcagcgttgtgggctgcaatggcactcatctccatggcacttgctgcacactctatgccattgaggtaataaagtcgatcatgga

SEQ ID NO: 379958 - DNA, 556 bp, Homo Sapiens
cgccagcttggcacgagggaactgtcaaatctgaccagagacgtccccatctttgtgtgtgccatggccttccccacggtcccatgtccactccacgtttttgagccccgctatcggcttatgataagaagatgcatggaaactggcaccaagcggtttggcatgtgtttatctgctgagcacgcggggctttcagagtatggatgcatgctggagattaaggacgtgagaacgtttcctgatggaagttctgttgtagacgcgattggcatcagtcggttccgagtgctaagccaccgccacagagatggctataacacagcggacattgaatatcttgaagatgaaaaggtggagggtccagagtatgaagaacttgccgctctccacgattctgtgcatcaacagtctgtttcctggttcgcgtctctccaggatcgcatgaaagaacaaattttaagtcattttggggtaatgccagacagagaacctgagcctcagagtaatcccagcggccctgcctggtcctggtggatcctggccgtgctgcccctgg

SEQ ID NO: 379959 - DNA, 519 bp, Homo Sapiens
  misc_feature (26)..(26): n is a, c, g, or t
agtaatcgtacataggtggggtgagntgaaggcaatctgaattataaaacaccttcctttgaagtcaaatcaatttttattcttaatctgtgaacatgagatgggaacaaataacttctgagtgaaataaagatttcttagcctgtcaagatttatcttatcaggctgaagaggtgggattcctgttagcaactggcagttttaaaaatccattcgcctgaggaagtgtgaaaacagtctgcagaacaaagacactgagctattgctgcattgagtgcttatttgctccttttttacatttcctgcttgagacctcgccagggtccaactttaaaacgtttgcaggctaatggggagtgtgtgcacagggagtattcagaaatcatttccttagggggagggaggtgtttttgtgggtgcaaaatgttgagggtctgtttgccaaaacaccaactgccaagaggggtatttttctgtggaacttctgggtgggctttctaggggattctcctgttcatt

SEQ ID NO: 379960 - DNA, 462 bp, Homo Sapiens
  misc_feature (11)..(11): n is a, c, g, or t
  misc_feature (24)..(24): n is a, c, g, or t
  misc_feature (31)..(31): n is a, c, g, or t
  misc_feature (44)..(44): n is a, c, g, or t
  misc_feature (52)..(52): n is a, c, g, or t
  misc_feature (86)..(86): n is a, c, g, or t
tcaaaaccccnttccaacccaaanggggccncccccaaaaatgncccgcctncctccatcaagacagccatccaaaattgaacacnggatttccctgtttccccttgaagtttttcctttcctgaaggctccctgtgtccgggtaaaacttaatccttaccgtaaacttgccacacttttcctctggttaacctgtcatttgttcctaagggactcgaccatgaacctagcgatggctgagaaatcatttcccccctagccggcctaactcatttgaaggagccattacctatcgtgtgggagtcatacttattcctaaccattttgaagagattcatctttaaattaatatattacattaaatgtcttccttcagaaaagacaatcttgtgaacaatccctttggtgactgaacatcacgagatataaaacaggtagaaaaagaaaatatttggggtggct

SEQ ID NO: 379961 - DNA, 453 bp, Homo Sapiens
  misc_feature (21)..(21): n is a, c, g, or t
  misc_feature (28)..(28): n is a, c, g, or t
  misc_feature (36)..(36): n is a, c, g, or t
  misc_feature (87)..(87): n is a, c, g, or t
ggggaaaaaaaccctactcanccctttngaaacttnactcaaagtgtcaagctttcaattaagctcctcccacccccccaaaccccnggtacagtctatcaatcccctttatggtgaccccaatggtccccgtattccacttttccttgccatgcatgtgacactgactacacccatagtctaatacaatttagcaacctacatttactagaatgtaaattccaaggactgtgacttattttctttgttacctcagctattagacatcggaaccctacagaagtcatgtaatacatttactgaatgaatacaaatcggtgcaaagaaaacattttaaagtcccctgggttaaaattttgctacttatacttacaaatctcagattttagtcagattgcttctgtgaatatgtgagaccaaatgtaaatgtttccaaaaaccttataatatatg

SEQ ID NO: 379962 - DNA, 601 bp, Homo Sapiens
  misc_feature (564)..(564): n is a, c, g, or t
cagaaaccagcagagtctggctgtgagcaacatgggagcacgctccaaagggcagtgctgaagccacccattgtggtccattgcagtgcaggcattggcaggacaggtaccttctgctcactggacatctgcctggcacagctggaggagcttggcacccttaatgtgttccagacggtgtcacgcatgaggacccatcctgggagttcgcagagaaggagggcatggtatcctctggccaaaacctgctggccgtggagagtcagtaactctcctacgaacctcctacctgttggccagccttccttaaactaccctgggacaccgctgagcctataggttgccatcagttacgctgaagccatggatcaacttctttcttgtgtcttcccagcacacgtgtgcacgcaaggcagcctttccctttggcttagataaatgtggtgaaatttgccactagaaagggccagtagcaatgtgttctttaatttcctagcatctgctattcaaactgttgccttattaaaaaccaaattgtgggctatttgattttttgctagggtnccccaaggtaagtgggggaagggaaccttccctcctt

SEQ ID NO: 379963 - DNA, 535 bp, Homo Sapiens
cgccagcttggcacgagggtggcctgccaattgaagccccagcccagggcccttgccacagtgctagtgggccacccttgcccatcatgcagcatggcatccatctgctcagcaccctacacaacaccggaggtagggggagcccaccacggaacccctcaccaagaaggtcctcaccatggagaaactgaggtactggaggcggggcctctgcagtcacgctgggtcacgtgctccagtcagccaagctgcagcggccaccaagggtgcccagggtctggcctgttggtcacagtgttgacctcatggcctgaaatgggtcttccctgaccagacaggttccagcccaccatcatctatcactgcctcagccctggtgggtgcggagtggctgggagaccctgcccctcacaccctgggctgggggcattcaatgagcccccaacacacattccagggcctctgctccagattaggccacagcctgtctaggcacacaaggggcacccacaccctggaggcaaagagacatatg

SEQ ID NO: 379964 - DNA, 318 bp, Homo Sapiens
  misc_feature (16)..(16): n is a, c, g, or t
  misc_feature (63)..(63): n is a, c, g, or t
tggaaaaaggtacttnccctggacaagtccatgttaacacccccagaaggagggaaaccctcnaagggaggtggtgtgccctgtgaagctggtcaactctacagagaggcctctttggcaaaaggttggcctgaaggaagtggaaggagaccgccctagggggacagggagggacggtggcctcccctccctgcccaggcccttgaggaggtatgatcctgcctcctttaggttgagagtcccagaaagtagaaattacacctgcagctagaaatttagggccatgctgtgatcatggacagtttgtgtttttttgaa

SEQ ID NO: 379965 - DNA, 421 bp, Homo Sapiens
  misc_feature (16)..(16): n is a, c, g, or t
  misc_feature (32)..(32): n is a, c, g, or t
  misc_feature (63)..(63): n is a, c, g, or t
  misc_feature (68)..(68): n is a, c, g, or t
  misc_feature (357)..(357): n is a, c, g, or t
tcccagctgggcatcntctgaagggaggaaangagggccccaaatctgtgtcaccctggcagnacccntcccctcccatggctttgaagcccatgagatggccttggacaaaacggcaatgggcccttccctgagacaaagtgcggccatctactgggaaactgccccagtgtgactctgatgactgtgatgtgaatcccacagcaaagttgagcagtgcgcaacctgggctactgcacctggcagccctggctcctcttcctctgcctcttcctgctccttcattctcccccagagctctaattgtcactgagattttatgtttcgtttaacaaatgactgtctccccgcttgaanagaacctccatggggggagggaagagtgtctgttgtataaatagttgtatttcagtgcataaaa

SEQ ID NO: 379966 - DNA, 487 bp, Homo Sapiens
  misc_feature (22)..(22): n is a, c, g, or t
  misc_feature (65)..(65): n is a, c, g, or t
  misc_feature (105)..(105): n is a, c, g, or t
gaaccatcaggggcccacacgnatggcacatgccatggcccgaacgggatgcctcctgggcctgncaacatttaatacatgggtgatggccagagagcgatgggnctcaagtagtgacagaatgaaattacatgttttctccaaacttagggctggccaaggacaaccctcttaatctctcagtctctacagcccacattcataacaggaagataataaacctcacttgcctcactgcattgacgtggggataaaatgatgtaagctatcttgtcaaacactgagctggaactcgctcaccctctagttctccagggtaaaaaacatggtgagcatttcagatcataaatctatgtgcatttggaataataagtggttctggtcagtaagaggcttacaaaacagcagtacttcaataaagtctacagactacgtttattcacattatacacaatttcccctctccctggttttattttttcacttt

SEQ ID NO: 379967 - DNA, 498 bp, Homo Sapiens
cgtagcaatggaaccgcctataagccaacggaaacccctagggttaaaatggggaaaatccaacagttttaccccacattagccctgtaggaactatgccaggtgactgtatacaaaaattccacaacattagttcacaagaaatttatgggactacaagaagccttttcatcatgcttttgtgtggttatccaaacacttccttggggcaaaaatacaaccaccacatctgaaaatgcttaataaagtcagtgttcctcatgcaaaactttaaatgtattggcttaactgagctccaaaaactgaatgaaataattatcctacctactcagcattgctgcctcactgctaaatccctttggaaccttaagacttctggaacgttcagagatgtattcatcaataaaaatattacatacaaaaagcatttaaaaaggaagacaaaaagccaaacaggaattttcctattgtaaataacagtcttagaaatggaagaaa

SEQ ID NO: 379968 - DNA, 450 bp, Homo Sapiens
  misc_feature (53)..(107): n is a, c, g, or t
aatttccacagagacaaggtctcactatgttgcttgggctgaatctctaactnnnnnnnnnnnnnnnnnnnnnnnnnnnnnnnnnnnnnnnnnnnnnnnnnnnnnnntattgaaataaagtttagcctaaagctgcctccttatatatttaagtttggccctaaaggtttgtctgtatatcgtgacaagtggaggtgtaaacagactacacttgtgccaatcactgagttttggccaatcaaatgtagccaactgttcaaaccacgttcagataaggcaaatgccaagctgtagccaagcccagctgtttctgtacctcacttccattttctgtccgcaaaccttccaccgtgtgactgcgctggagtgtccgagcctactctggctgggaaggctgcccaattcttgaactgtttattgctcaattaaactcctttaaatttaaaaaaa

SEQ ID NO: 379969 - DNA, 694 bp, Homo Sapiens
  misc_feature (27)..(27): n is a, c, g, or t
  misc_feature (58)..(58): n is a, c, g, or t
  misc_feature (111)..(111): n is a, c, g, or t
  misc_feature (393)..(430): n is a, c, g, or t
accgtaatccaaaatggaaaactcccnaaactcaagaatacccccaaaattcccacantcacttaaggatggtttcaggtgtgtcctttaacaagagggccttcccatggncacacagttggtgacctattgaatggttaggcccttaaacttcaggtacgagggcatcccctgggtggccgagcccatcaggcccacccccaggctctagtgaggagtgcggtggctgtcccagaacatctgaggacatcgctgtggggcaggccattgtgggaatgtgtgccagcctcaagtggaggtggggaggaacggggagagcaggtgctggcagggaatgaaagccctacagtgtaagagctggatgaaacttcagagctcatctagtcaaagccnnnnnnnnnnnnnnnnnnnnnnnnnnnnnnnnnnnnnnggaacatgactccccctcggagacaaagccagggctggaagctgtgtcttcagagcctcagccctatgctttttttctcctagagtatgctgccttccaaaatcaaatatagagcccaggaagacatgtccttcatattgaatctgccattaaaatgctgcatttataaaaaataacattggaaccctgaaaaatacttcattaaaacacaatgcgctttcttgaaaatactccagagcaaaatttcccagattcggacaggat

SEQ ID NO: 379970 - DNA, 552 bp, Homo Sapiens
  misc_feature (34)..(34): n is a, c, g, or t
  misc_feature (186)..(186): n is a, c, g, or t
  misc_feature (508)..(508): n is a, c, g, or t
ggactgccccagaggttgtggttaaaccctaaanccaagctggtaatgtttcctgaggaccccaggcatcaggctgaattcccatgtacttcacgaggaggaaactgcccttctcccaggttgatcccacgtctgaagttccttgtcatcactttcatcccagtcgcctttcagttccccagggcnaagaggttattgtatcctctttcaagaatctgccttgccctgggtgttctgtgttggaatctgtaataataaagctaagctgctgtagtcaaagttttcatccagggctataagtgagccatgcacaccgctctcaagtatattatttgcatattctcgaagtccaattgcttgtatccagcgaataactcggtcattgctccacaccaacacgtcttttatttcatgttggcttgcttcccgtcttctttctagttcttttctgtcataattcaacctctttaagcacataattccatattgtaaacttgttcgatggganctatccaccatttttaaatggacacggagatctttttttgttag

SEQ ID NO: 379971 - DNA, 537 bp, Homo Sapiens
  misc_feature (53)..(53): n is a, c, g, or t
  misc_feature (67)..(67): n is a, c, g, or t
tcatgaaacccgccatcgggccccaggtatttactgagtggattgcctgaaanggttaaatgaggangccaagtgaaagcacctgtcacacagtaggcatcccaaaaaatgcctagtcttcctttctcccacctttcatgccttagttcttgcagggatcgacttgagtgtcccataaacagatggctggataaagaaaatgtggtgccatttatacacggaatgctgctaggtcctcaaaacgaatgaaatcctgtcatttgcaacaacatggatggacctggaggccattatcttaagtgaaatgacttaggcacagaaagtcaaacgccgaatgtcctcacctgtaggtgggagtgaaataatgtgcagacatggacatagaaggtggaatgacagacactggaggcgtggaaggatgggggatgggggattgagagatgacttatgggtacaatgtacattgcttgggggatggtacactaaaatcccagacttcaccaccacgcaatatatccatgtaacaaagctgcactt

SEQ ID NO: 379972 - DNA, 339 bp, Homo Sapiens
  misc_feature (264)..(264): n is a, c, g, or t
  misc_feature (269)..(269): n is a, c, g, or t
  misc_feature (287)..(287): n is a, c, g, or t
  misc_feature (300)..(300): n is a, c, g, or t
gtcattttacaaccataacttttaaaattatactggaggcgagggagatgcatcttgcctagccatggcactcctgggggaaaggctgacttggcttatggctgtcagtgcacagcagcgccagtatgcagaatgcctgtgcctctgctgggagcagctcagtgagggcggacaccagggtcacttttaacttagttttgggtgccaaactagttttgttgagatagcttgcaggaagtgctcgtttcttgttctgtttgccanttcanttttgggagacagggtcnttgttctgttcanctagggttggagtgtaccagtggcggccatcagagttca

SEQ ID NO: 379973 - DNA, 423 bp, Homo Sapiens
  misc_feature (29)..(29): n is a, c, g, or t
gtaaaataaccattaatccagaaataaanggtagaaatcctactcctaatgaagcccctgtggtccgaagtggatagttccagcactttacccctgtaatagtttgttatcctaattgtttaatgtatgtgcgattgccttcacaattaaagcattattctttagtcatattttctctcttttctcaattttctcaggaagaaaattgacatgtctgtgaaccctgtgcatgtccccaaatggagcttaacccaaagttgggaatcactaaataattgttcatgaaatggttgaatatagctcttcattcaagtgatgtagattctgaatatcactattttccttaggatatgatgtttagctaattcagccatgctaggcaaaagaggtcagcattgtagaaataagcaatgtcttatactg

SEQ ID NO: 379974 - DNA, 401 bp, Homo Sapiens
gaatttttagcaaaacatcctgtttttacttaaaattcttctcatatttattatagttagaaggcaaagatcaagatgacctgccgtttgactgcttttacatcaaactctgcccagtatttgcagcacaactcaggggaagggccttagcttacaggtactcccagccttcatctgcccctgcagagcgatggctgtcagccggatgcggcacttttctgtattttcatccacacagctgcccagccagagttcggcaacactgggatattttacaccaaataattgtgggttgacttgtctggaaggccagctggacaaaagggtccagctttttcccacttgtattttttttaaaaagagggggtttgtggatccattgtcacagagtggggtgctgg

SEQ ID NO: 379975 - DNA, 427 bp, Homo Sapiens
ttgaaacacgttccaaatacattataataaattgtgtgttttgctatttttgggtgcagtttttatatcaaagtatttaatcctactgctttaaatttttctattattattgatattttgtatcctttttgctatcagttattgaaaaaggtatattaaagtctttatgattgaagacgcggctattgctccttttagttctataaaaattgtaaatgtgtgttaactgtgtgtgagtgaatatacatacacaagtttgacaacttcctcaatagttgattcttttatatgggatgatgggatacatcttcctttcaagtaataatttctgccttaaaaatctcttttgtctggatattaacataggctaaacaaattttcaattgggcttgtggtttggattaccctttcatatggcatatatgga

SEQ ID NO: 379976 - DNA, 522 bp, Homo Sapiens
  misc_feature (317)..(317): n is a, c, g, or t
  misc_feature (442)..(442): n is a, c, g, or t
  misc_feature (482)..(482): n is a, c, g, or t
gacaaacctgggtgcagccagagaggtccagatagatgagcttgtggcatccattccccaagttcagcctagggactccacgtaccccagctgggtctcattgttccagaactgcattagttaagattacccagacttggatttcaaaggaatactttcattgttccgtctgtaacacgaagtaattggggccagctggatgtcaggatgcgtgtggttaccattgtaatcttgctctgcttttgcaaagcggctgagctgcgcaaagcaagcccagggcagtgtgagaagccgagtgaatcatggccgggcgggtnggaggcccgagaggctccaacccggttcaaacgctacgcaccaggccttcccgtgtgacgtgtacacatatctccatgagaaatacttagattgttcaagaaagaaaattagtttatgtgctgcngggtggcctcagggtttgctgcacatgctgctagcaaganacaagatccgcacattgaagaacaactgttttccaagttt

SEQ ID NO: 379977 - DNA, 332 bp, Homo Sapiens
  misc_feature (36)..(36): n is a, c, g, or t
  misc_feature (43)..(43): n is a, c, g, or t
  misc_feature (63)..(63): n is a, c, g, or t
  misc_feature (83)..(83): n is a, c, g, or t
  misc_feature (103)..(103): n is a, c, g, or t
  misc_feature (110)..(110): n is a, c, g, or t
  misc_feature (138)..(138): n is a, c, g, or t
  misc_feature (143)..(143): n is a, c, g, or t
  misc_feature (175)..(175): n is a, c, g, or t
  misc_feature (284)..(284): n is a, c, g, or t
tgaatgtccctgtcccctggggctggtcctaaaagncccccantccattggcattggcctganttcctgcccgggattggcancactgcgttccggcttgtantccccanagttgctgtgctctttccccgtgtgcancgcanaatcttcctctgtgccctgtggttgctacgancgcatgggggagggctggggtcagcaattcaagactggcttttaaactttttatgatgggaaaatgtgtgaattttcccctgggaaagtatagactggagacttagatnccagtagatgaattgaggaatttctgtgtagcagtttaatatagaaaa

SEQ ID NO: 379978 - DNA, 448 bp, Homo Sapiens
  misc_feature (230)..(230): n is a, c, g, or t
  misc_feature (329)..(329): n is a, c, g, or t
  misc_feature (358)..(358): n is a, c, g, or t
  misc_feature (424)..(424): n is a, c, g, or t
ttttttttcacttctaaaacatcatgtttaaaatttgctttcaacaatacataaagtaactcctaatggtaatcatcttggctaaataaaacagcctttgctttcaatatgtcatttgtaaatgttacattgttctgatatttagtgatattaagtatttttccattttaaatgtattttataggaagaatgattaaaaccttttaaaattaagggtgtccatggacagntgcctgagctcaaccagcaatgggtaaaaggggcatcagggattcccttttgttctgttaccttggacttgtatgggggaattaactgggtccaatgtnctcctttgggaatgtgctctgtactgggngtaatgtgccactggcaactctagggtaatgttttccattacccaaggaaactggatgtggctccnataagttagggcacactgaggaat

SEQ ID NO: 379979 - DNA, 422 bp, Homo Sapiens
  misc_feature (20)..(20): n is a, c, g, or t
  misc_feature (30)..(30): n is a, c, g, or t
  misc_feature (44)..(44): n is a, c, g, or t
  misc_feature (130)..(130): n is a, c, g, or t
cggaccctgtgggtaaaccngttaggtttnacctaagaaatttnggaaaaatttacccccctttatcacaagttttcccaaacctcccttccccaccctatcctaaagtgttccttacctttccatgggncccagccgagggtagaattcagaatagagagttatactcctgcatacatgctctccctctcattgaaaggtttccttagtcctagctctgctcatgaatgaacaaagaagcaggcatgtaaaatggatccttgtcctaacgtcactttcccaagtttcaaaagtcacattttcaggtatttaaggaatagtttgaagctaataccatcaggctcagagtttacatgcatttttacttaggaagtggtaaacgggtgaaagagggtttcaataaaattttaaataaaaacagc

SEQ ID NO: 379980 - DNA, 498 bp, Homo Sapiens
  misc_feature (16)..(16): n is a, c, g, or t
  misc_feature (32)..(32): n is a, c, g, or t
  misc_feature (41)..(41): n is a, c, g, or t
  misc_feature (81)..(81): n is a, c, g, or t
  misc_feature (103)..(103): n is a, c, g, or t
  misc_feature (112)..(112): n is a, c, g, or t
caccctttaaactccnctgtgaatttaacaanttaattaantggcccccttaacaaatcgcctccccagagagggaaaaanacatgaatgatggtgccctgancctccacanccagcaagcaggccgtgtgtgctcaagccagccacgtggctcatctgcctaggagcttgcctaaacacgatgttcctacaaccattgcttaacgcaaggggagacgctcctgactcagagggtttaattgctcacctacttctttttccgccctcttgggcttctgaaatgaaaagaaccctggggtgatacagtgagtcaaaggggtgccagccgcatcacagcataatagattcctaaaaaatccctggcctaagatgacagccttggctggatcagtttgaatgtgctgatagtggacacggtagaatgaagctggttgaaatgttcatattaaagaacttctacccagattgcaagaaaagagagaggaatggagatggcag

SEQ ID NO: 379981 - DNA, 503 bp, Homo Sapiens
  misc_feature (19)..(19): n is a, c, g, or t
  misc_feature (36)..(36): n is a, c, g, or t
  misc_feature (54)..(54): n is a, c, g, or t
  misc_feature (66)..(66): n is a, c, g, or t
  misc_feature (88)..(88): n is a, c, g, or t
gggaatgggcactgaaagncgtccccaccaaaaagncctggaaagtgtctcgtncaccgggggccntgctggctggcagcccatcaancttgtgcgccctaagtggagagccctaacaccttccaggacacgtcggtgtgactgtctttcctgcccttctgaactgaactcagtattcccagctataaaccaaagtgctcccagcccaggcaacagtgagacccaaagtttcccaaagacccgtctctgaggtagtgttgttggctctcaaacaccaccacgggagtgagcccattcggaagcacacaaccgaggtgcggagaattaactgggctctgtgtgcaggcggcctcttatcaaggtcaagtgacattcagtggacaagtcatttgaaacatctaaaacctgtttataaccatagctataaattaaagtgctttacattttgcttaatatttgaaatcagtgattagaatcctatttcaaaatttgctagcatgaga

SEQ ID NO: 379982 - DNA, 485 bp, Homo Sapiens
  misc_feature (29)..(29): n is a, c, g, or t
  misc_feature (80)..(80): n is a, c, g, or t
ttttggccccaaagtgacctctctgcganaatggcaaacataacgctctcccagaaaccagggcctccagccccttgaanattccattttcctttctgagcttgttcggatccctctttattaacaggacctctatgaatgagaaaaaggaaacacttctggtgagatggggaacactaaacagacactaactttgcaaccaccagaacagtcagggtttacaaaacatcacaggtctttaaggaaggtttctcagcccaccgatgtgacgggcagcatctaatgcaccagcagcctccagcactagtaccaacaccttagaaagtgcttcattgctttacgagaaaagggatgtgccggtgagacccgatagctgcacgtctcacagccgccccatgtacctttcacaatttcattgttagaggaaagtcaatagagtgcactcttccaatcaggccttctaaagacaagcggtcaggctgagt

SEQ ID NO: 379983 - DNA, 518 bp, Homo Sapiens
  misc_feature (11)..(11): n is a, c, g, or t
  misc_feature (22)..(22): n is a, c, g, or t
  misc_feature (34)..(34): n is a, c, g, or t
  misc_feature (64)..(64): n is a, c, g, or t
  misc_feature (94)..(94): n is a, c, g, or t
aatcctttcanggtaagggtgntgtttccatcantgtcctttgccccccaaaaactggtgtaantgaaagccagaaagaaaacacatttaagangggaaactgaaggagggtgtgttcctgttttccttcccacgggcctttgtaatcaaacaggaacggctgtgaaggcccaaagatagcagaatcctactcccttgcagatctggggtcgccttctttaaaggagcgaagtgtgaacgttctctattccagattgtcacagcccactatccacaagatagttaggacaagtttgtaaagtcccaaaataagactttatatgcatcagcctcaggcccaaagaaacagacctcatttgtccagttaggggttatggggcttgggttacgtatatatatattttaaatccactttccctttctttccaggccccctgtgtcataggaatccaccaggcggcttgagcactgaagaggcaacactaatgagccacgtcgctttctcctaggactttttt

SEQ ID NO: 379984 - DNA, 546 bp, Homo Sapiens
  misc_feature (29)..(29): n is a, c, g, or t
  misc_feature (38)..(38): n is a, c, g, or t
  misc_feature (49)..(83): n is a, c, g, or t
  misc_feature (467)..(477): n is a, c, g, or t
taaaacctggaaatgggtccatccatggnaaaaagggntctggaagaannnnnnnnnnnnnnnnnnnnnnnnnnnnnnnnnnnccttcaagggatgccttaatacacttggtcactggggccccttccccaactagtttgatggggctcgtctggacacagaaattcagacatgtgactaaatgctgatgggcatgtatacacattcacacccacacacacatgcagacacctggtgaagaaaaggaaaaataaaattcctagccctggggtgtaggcctctttccagagttacaagcatcagtgcctcctccatctagaataatggttttaaaaagctacccctcactggctcagactggggcagaaggggaacggctaggaaaccaggaagagggaagaggggccaggagtctttcgaaaatataaggcgtttttgacctgtgatcaaatcaaactatgttcacnnnnnnnnnnngcaacggttatcagttggggcctgtccttgtagggacaatgtgaggtgagaccctgagccttccccttc

SEQ ID NO: 379985 - DNA, 230 bp, Homo Sapiens
ggcatctgtgccgacgtacaccgatgagacgctgcactcgacgacgggggagtacaaatccacatttaatggaaaccgaccctcctcttctgatcggcatcttattcctgtggccttcgtgtctgagaaatggtttgaaatctcctgctgactggccgaagtcttttttacctcctgggggcagggcagacgccgtgtgtctgtttcacggattccgttggtgaacctgt

SEQ ID NO: 379986 - DNA, 431 bp, Homo Sapiens
  misc_feature (82)..(82): n is a, c, g, or t
ccaagcccataataaggtgccattgttatggttcctcaaaaggccgttgaattctacaggccaaatacacctccactcctcnatcacgactccctgggcccagcttctggagctagtcatggagataatggtttctttgtgctcctgttgtgaccaggaaaggggatctcctggctgcaccacccacctgatttaccaagagtgatcccagattatgcagttgttttgtgagctaactgtccataaaggtatgacttgtgtactctgccacagtgccaaaaggccaggggactgatcaagttcccagcaccctcgtgagaaatgaagaccgcaagaaaagagacagcagccctggcaacaaaaaccggacccatgattttgtcatcctgggttgtatatacacatataactgtcatccccgaaggataaaa

SEQ ID NO: 379987 - DNA, 486 bp, Homo Sapiens
  misc_feature (26)..(26): n is a, c, g, or t
  misc_feature (39)..(39): n is a, c, g, or t
  misc_feature (47)..(47): n is a, c, g, or t
  misc_feature (53)..(53): n is a, c, g, or t
  misc_feature (77)..(77): n is a, c, g, or t
  misc_feature (88)..(88): n is a, c, g, or t
  misc_feature (95)..(95): n is a, c, g, or t
  misc_feature (143)..(143): n is a, c, g, or t
gtccacggtcggacctttggccaaangtacccggggaanaacctttngaaccnggcctaaaaaggcccccataaacnccctggatagncccccanggaattcctcccctggctagccgggaaaacaatccttaatattttatntattccttccataaatacaatgtatataatataaaacactttgtgcacatgtttcccaacaatttcattttcctatgcatctttacataaggtagtagctaataactctttctgtggacacgtattttccagttttctaaggtttatgtgttcaagcattgtaaaaacatatttaaaaattgaattaccagtaaaaatattgaatgtacaggtcattatgctcccacaaatacaaaatacattgaaaaattatatcaacagataattacatatgaaatatgaggcatatattttcttctattatttattttctccctaaagagttctaattgattaaatctca

SEQ ID NO: 379988 - DNA, 428 bp, Homo Sapiens
  misc_feature (43)..(89): n is a, c, g, or t
  misc_feature (145)..(157): n is a, c, g, or t
ccaaaaacctcctcctacacaagcccttaaactctcaacaatnnnnnnnnnnnnnnnnnnnnnnnnnnnnnnnnnnnnnnnnnnnnnnngaaagcactatacaaatataaggtatattattactacacttagttttcactaaggnnnnnnnnnnnnnccataaaacactaaggtacctcctaagcagactgccttgttacaaggaaaaatagtaactatagagtagaagaaccagactatatcttgaccgaagttaaaatcactaatgaggggcaagtgggcattatgtatctccagatgtgataatctgagaggaaaacatcacttttgtaacattctgactaaacataacctgactacaatcaaaaagctaatcagatcaaatcagacaagtccaaattgaaaaaccttccgtaaaataaatgacc

SEQ ID NO: 379989 - DNA, 381 bp, Homo Sapiens
  misc_feature (142)..(142): n is a, c, g, or t
cttagtgccgccccctttgtagttacaatgcccccgtgacccccaaccactagttttgtcattttgagaatgttgccgtgaagtcatgtagtatgtaatctttggagattgatgtgtgtaaaaatgtaatttgttgtaattncataaagtgaaatcctcagaaagtttacaaaaatagaaaaaattccttaattctatcactaatacagtcaattttggagctttttatagcctttttcatatacatcctctatcacttatagtatatactcaattttgtttgctactttttacaaactttatattaagtattttccgtgtcaccatccatcatatttagttgttgctatcataaggaaatgttgcaaaatataaaaaaaa

SEQ ID NO: 379990 - DNA, 592 bp, Homo Sapiens
  misc_feature (17)..(17): n is a, c, g, or t
  misc_feature (38)..(38): n is a, c, g, or t
  misc_feature (91)..(91): n is a, c, g, or t
  misc_feature (159)..(159): n is a, c, g, or t
  misc_feature (205)..(322): n is a, c, g, or t
  misc_feature (490)..(490): n is a, c, g, or t
ttctccaaaacagctgnagaaggaaaacaggtttcccnattaaaatatcttagtacttggataaccaatagatgttcacaactgatgaaanccgtgaaagagagataacggtaaattgttacaataacacaattttcctgcacctgtcgagatttcccnaaaaaaacgcagaatgtgggatgcacctaaggcataggaaagagannnnnnnnnnnnnnnnnnnnnnnnnnnnnnnnnnnnnnnnnnnnnnnnnnnnnnnnnnnnnnnnnnnnnnnnnnnnnnnnnnnnnnnnnnnnnnnnnnnnnnnnnnnnnnnnnnnnnncaccggtgttactaaaagcccccaataaaatggttttccccctgtgggtaagccctacaatgtggacgaatcttgaaaatattgtgactacgtgttatgtcagtcataacagctcccctattgtgcaattccgcttataggaaatgtccacaatatggtaatctatgncatatgggattgatcgcactaggtagttgctacctagggctgagggtcagggagagggtttgagacagaatgaggagtgactaatgtctacagggtttttct

SEQ ID NO: 379991 - DNA, 238 bp, Homo Sapiens
ggaagtccagtgtcttaaatcattcatgaaggagtccatttcctgcactgtggtcaattgtcgccttgctgatctatccccttccccacaggtggggtgattttatgggctgtcttttctgttcctgtagtctgtgtatccctgcactcttgccagattatgttaatgactattgctttgtagtcagtgttgaggtccctaaaacaggggccctccacccctgggcctcccgggcttc

SEQ ID NO: 379992 - DNA, 507 bp, Homo Sapiens
  misc_feature (27)..(27): n is a, c, g, or t
  misc_feature (62)..(62): n is a, c, g, or t
  misc_feature (121)..(121): n is a, c, g, or t
  misc_feature (188)..(188): n is a, c, g, or t
ctatcagtggccccacaaacaaagtcnccagccaagacacttttcctgaacatttttaaggncaaacataagccacaaaaacataacactggggaagctgcctttaagtcccaaacttttntccttacagtagtccacacccatgttgggttctggaactgaagtatccctgaaaactgtgtttgttntctgttaaacccatctgtccaacaaattgctcctctttagggagaacagaaacttcttcaaccaaatggggttctttttctttttctacgttagtaactacatggtggtctgattctccttctttcaaatatttgaagtgaatagtaatgtcaccatagcaaaatttgtcattgaatcccttttgcatactcagattgcgtagtgcggttctagtgactatagccttaggtgagggggcttccagtctcaatttggaaaggtattccgtgtttgatgtagctaggcatcctaaagccacatcttcaagttttaaactaa

SEQ ID NO: 379993 - DNA, 488 bp, Homo Sapiens
  misc_feature (42)..(42): n is a, c, g, or t
  misc_feature (61)..(61): n is a, c, g, or t
  misc_feature (88)..(88): n is a, c, g, or t
gggagggtactcccctgtcctaccttacatcggaccatacanttttaatagttgggccaanccctggttccaatatcctccatagtangaaatgaggaaatatgtgggtttcccatcccaaacactccagataaacgcagtgccctgatgatataagggataccaggaggacacccagattgaatcagacattgaccctgccctatcttcccagacattgacaccctattaatggaattactacacaaacactacaaagtagaaaatatgcatttgcagatctgaggtttagattcagtgttatgaacattcagaagaagaaaatcttaactttcacctgagggtggacagccagggagggggcttagtgagaagttctcaggtgaaattagaaagcatgaaacctgggtcctgcatacaggaccaggcactgctgaggacacagtgctgaacagacagtccctatcctcctaaataatatggtgttt

SEQ ID NO: 379994 - DNA, 491 bp, Homo Sapiens
  misc_feature (32)..(32): n is a, c, g, or t
cccgggaaaatgaaggataatgtgcagggcgncctagtcgggaaacaaaaaggactttaaaacaattgccccccagctatggttgtggaaggggcaagtgtggcacacaggaagcaagactaaaggaacatacttatgtctctctgggcctgcatacctcatagaactcaaactgctctatttttcttttctctatattttattgaggtagatggtgggtgagtttgcacaaagctacaaatttctgtcagaaacagtcactttctaatgcaacaacctaacgtgcccattcacaccacagaggctctagcattgacatttcaactgtctccacaacatcactctcactttaagatgatattctcccagccaacacacatataggtcatctgctatactccttagcactatttttctaagaagaatttagtgtctttgactgagctgtacatcttgcttaaccgtaaagaatgtaaagtttcaaaaatcct

SEQ ID NO: 379995 - DNA, 470 bp, Homo Sapiens
caaagaacccattcccaaaaagtcatggataaaagaaaagaaactgagcttttaagtgtctcaaaagaggtcggctggaaaataagttcagaagaaaatacattaccacaaacatgaacaatatagcaaacatgagagcaaattacacttagacatttcctttatcagaatttcctttaaattcattccatggccacggcttttcttaggctaactacagtagacatagctcttctattatgatatctcctctgcactttctagtatactttacatcacaacatgagttttctttttcaagcaaggtttagttattgttcccttctgtaggctgtgccttcccaaagctaccagttggtcctcaaatcaaatttaaaacatctaaacatagggtttcaaggctccataattcccggggcccaaaccattccagctttattcatcctacagttcatggcacatgggctcac

SEQ ID NO: 379996 - DNA, 501 bp, Homo Sapiens
  misc_feature (14)..(14): n is a, c, g, or t
ctcagtgacgaccngggcggacactgaagaattgaacttccctggcaactttaagatgtaatactgaattccagatgttaactatttaaaatacgtacatctgtgaatataaatacaggaaccccccctactgggaggccccatttacaggagttattcaggatttggaactaagaatacccaaagttaggaagaaggcaagacagaaaccaaagtctcaaaaacaagacgaggtctgacaagttacccactgaagggaatgaaagcacactggagacaggcagagtcaatcaagactctgcagccaggagcaggttgaagacgagcaggctgaggcttagtgctacagctccgtccacttgttttcggacttcaagagtcaggagagaagctatcccagcttcaattcctcatcaataagatgcaggaaatactctctaggattactgaggaaatgaaataagcaactgtattttaagtgttttatatactgtaaaagca

SEQ ID NO: 379997 - DNA, 496 bp, Homo Sapiens
  misc_feature (394)..(394): n is a, c, g, or t
  misc_feature (415)..(415): n is a, c, g, or t
  misc_feature (424)..(424): n is a, c, g, or t
  misc_feature (429)..(429): n is a, c, g, or t
  misc_feature (441)..(441): n is a, c, g, or t
  misc_feature (458)..(458): n is a, c, g, or t
  misc_feature (473)..(473): n is a, c, g, or t
  misc_feature (481)..(481): n is a, c, g, or t
gctgagcctgacccagcaggtcccagcagcctggcagcccggccagcatgcagcagcagcctctgcccgggcctggcgccccacaactgagccaaccaagcctccctacagctacatcgcccttattgctatggccatccagagctcaccggggcagcgggccaccctcagtggaatctaccgctacatcatgggccgattcgccttctaccgccacaaccggcccggctggcagaacagcatccgccacaatctgtcacttaacgagtgctttgtcaaggtgccccgcgatgaccgcaagccaggcaagggcagctactggacggtggaccctgacttgccacgacatgtttgagcacggcagcttcctacggcgtcgccggcggtttcaacnggcagacaggttgctgagggnaccgggggncccgncaaaggcaaggnctgggaacccttaaggngaaccagcagggacnccaggganttcccaaaggccaag

SEQ ID NO: 379998 - DNA, 413 bp, Homo Sapiens
  misc_feature (291)..(291): n is a, c, g, or t
  misc_feature (313)..(313): n is a, c, g, or t
  misc_feature (322)..(322): n is a, c, g, or t
gtttgtgaaacaggatctgataatcaacctcttggtaataatcaacaatcaaattgtgaatattttgttgatagcctttttgaggaagctcagaaggttagttccaaatgtgtgtctcccgctgaacagaagaaacaggtagatgtaaatataaaattatgggaaaaacggattcaccgtcaacgacgatttcaggaagttattccgatgggtgccagtcaggcagtttttggaactccatccaaaaagggggaattaccttcagaattacagggaatttttgataaagangaggtggacgttaaaagttganggacaaganaaatgaaatatgtttgtctacggaggcctgtgttccagccctttcagggacagggtcacagactagggaagtgccacaccaaaattgtttc

SEQ ID NO: 379999 - DNA, 566 bp, Homo Sapiens
  misc_feature (22)..(22): n is a, c, g, or t
  misc_feature (27)..(27): n is a, c, g, or t
  misc_feature (109)..(109): n is a, c, g, or t
  misc_feature (124)..(124): n is a, c, g, or t
  misc_feature (177)..(177): n is a, c, g, or t
  misc_feature (235)..(235): n is a, c, g, or t
  misc_feature (363)..(363): n is a, c, g, or t
aagggaacaaaatataacattnggaanccgggtaagggtaataagaaaatctctttactatttgtaacttcccaaactgaaaatacccccaaataaaattttaaaaaancccgttaaggcaaangtcttgtcaattcaagagattaataaaaagttaaagtatgcctcccctagcanttttgaagatgaacaaataaaactacattacctgttctcctctgtaaataacatattncagctaatgctaggccatttacactgggcctaccagtgactgagtgatgacctggaggagaatgtgccattttcattgcactgaactgcaggaaagactttcccaaggttacccggcaaaagagcagnctgcctgtggcaaatgtaacaagatctgtctttgtgaactggacacccagtacctcctccaattccatatacatattgattgcttttggaagagttttcagcaaaataaatgccagctccaaacataccacctatgtacgcatgcctttcatcaaagcctttgtggataattgcattcacaaaaggagacccatgaaatagca

SEQ ID NO: 380000 - DNA, 511 bp, Homo Sapiens
  misc_feature (489)..(489): n is a, c, g, or t
catgcagggggtctctgtggaggttggcaagctggtccataagttccatgtaggggttggtagcttggtccaggaaacccttgtagaagttggcagcccagctgaagagatccctgaggaggtcatccagccataccaggagttctctgtggaggttggcaggctggcccaggagacttctgcgatcaatctgttatctcagggcatccctgagattgataaaccatcccaagagttccctgaggagattgatctgcaggcccaggaggtccctgaggagataaattagaagtcctggggtggtccctgaagtgattgatcagcttgcctgggagagggtattcctcaagcccagcatccatctggtgatccaaaccctcagagccagtctcttagcccattgaccagcacttcacccctttccaccagcaacatgttgattaattttcttcatttagtggtattcacaatattaccagccttttgagncagcaaccttttctgtttgggt

SEQ ID NO: 380001 - DNA, 441 bp, Homo Sapiens
  misc_feature (17)..(17): n is a, c, g, or t
ccggttgaacactcgantccctaacagccattcctttgtgtgtggtgcatttgccatgccatacctcagaaccccctgtgaagtggaaatggatttgtggtattccttctgtttgcaaacccagataaccttaaagggcctaaagagattttgctctgattatttagaaagattgacctttttaatacccaatgtaggactgtctctttcaaagacatcattgagaagagtggggtaggcaatagcaaacacctggtcagagttaatgaagatgcatgatctcccgaatgtttgtgatgtgcttttaaaccacgtaaagatctgtgataaatggcaaatgtgaagagattgtaaaaggcaaaaatgtttgttattgaaaattaaaatagaaaagactagtgtttaataaattaatgtctgcacctttgaaagtaaaaaaaa

SEQ ID NO: 380002 - DNA, 487 bp, Homo Sapiens
  misc_feature (21)..(21): n is a, c, g, or t
  misc_feature (43)..(43): n is a, c, g, or t
aggctgaacagctcctccccnttggtgttggtttctgcaatanttaagcacccaaaatgacttgccactagtgtattcccgccaaagtaggcatccactagagaagaacattaaatgttcaacctgaacccagaaggaccaaagatcctttgccctcaaagtgggaaagcctctgtcctaggagtaaatttgtgcatgatctgctgaatggaggaagcagcacctcctttttcttgtttcttgactagaggaggttcagtgatgcccaaggtcccctcagagttcagggatatcattagagggcagagttaggttcacatccaaagaaagaagaattgggaggtcccatggccacaacaccctactccaaggtggacacccaacagcaggtcactctcactcagtccaggagaggatccggtgaggttggcatggcagagagaccagcctgggtgccctggagcgttcatcaaaagacacaaaagag

SEQ ID NO: 380003 - DNA, 473 bp, Homo Sapiens
  misc_feature (56)..(56): n is a, c, g, or t
  misc_feature (115)..(115): n is a, c, g, or t
  misc_feature (425)..(425): n is a, c, g, or t
cttggcaagattaaaaagtaaaatcttaacaaaatccaaaaacactaaagtgagtncaataagaagacccaattatgtctgatctcttgaagttactctgctgaaatgctcaagntccaggttaacctcatcaatctaaatggattagtcttaattcatttaaacttagaaatagttgaactactcatttttaggtctcatgcaatttacctgtgtgactcaacatcaaatctgtctgctaggttcatttgggcatgttttgtccctaaggatatctgccaaaccaatgcaatcaacctctcagaagcttttttcatatttaagaactgcttttaatttctaagccttcgccatggtttctgtcatgtatttctcacaaatgacagctactgatatggcagcagctattgggtattgggaggganatggggctcaatgttatatagcttgtatcgttttgagattattatatg

SEQ ID NO: 380004 - DNA, 452 bp, Homo Sapiens
aagatccaatcagatgaacaatattcttcgaataattgctgatttacaagtttcctgcagctatgatcacctcaccaccctgccccatgtgcagaagtacctgaagtccgtacgctacattgaagagctccagaagtttgtggaagacgacaactacaaactgtcgctcagaatcgaaccaggaagcagctctccaagactagtctcttccaaggaagatcttggcaggtccctctgctggctccggttctgcgaggttcagccggaggtcaacctgtcctgacacatctgttgctggcagcctccccacaactccagtgtcccagacaacagggaagagccacagcctagggaacaatatggatgtgttcagttgagtgttagttgaggagtaaaagtgcgacatttcccttcggagaaaggcaagggcacctacttggacgacagtgttc

SEQ ID NO: 380005 - DNA, 506 bp, Homo Sapiens
  misc_feature (25)..(25): n is a, c, g, or t
  misc_feature (32)..(32): n is a, c, g, or t
  misc_feature (41)..(41): n is a, c, g, or t
  misc_feature (72)..(72): n is a, c, g, or t
  misc_feature (493)..(493): n is a, c, g, or t
taaaccaccactcctgaataaaacnccctaanacaaaaaantgccctggtaactgcctgtttttgaatccangtcctaaaataacccaaggcccctaggcacttgtggttaaggtttaattttcctgccaaggatactttgccatccttacattggaatggttctttagggaaatgtacagctcccttttgagagtagtttgaggacagtcactgatgtccctagggaagttgctgccagacgttttatttcatgtccctgatatttacttcataaacaagctaacaaatgaggtttgggtagtttactgagggggaagcaatgcttgcagtgaagggagaactgggtgagattgggccctgcactgctaagggacagaggagaggatctctgctcaaaagactgtgggaggggttaggcagaatttgcatctccagggggtgagccctctgagcttgccaggcagggagtatttccagagaaataaaatgcntctatccatccca

SEQ ID NO: 380006 - DNA, 451 bp, Homo Sapiens
  misc_feature (349)..(349): n is a, c, g, or t
  misc_feature (375)..(375): n is a, c, g, or t
  misc_feature (382)..(382): n is a, c, g, or t
  misc_feature (437)..(437): n is a, c, g, or t
cttccaggaatccgccgagtgacttgaggaagatgctaacgcagtaaggtctgtgctgggccaagagcagctttgaagctccagagaaccaccccgtcaggttccttgtggaagctcccctcatccgtggtgcagcaggctgagcactgcgcgtttgccacgtgctgcccgtgacagcacattgagccacagcatttgtagacaggacagaggggtgcctgccccctgcccctgctggcacatttaacccttgtcccctgacctcagttctgtgccccaccaaatgcccaggggcaagaaggccaccctggaagctgccaatcttccaaggtgggtgtggggcacggtnggggcgggcagctcccaggccctttngcaagtncttggggttgacggcagaggccacagcaccagcttttgacaagtcctattcatcntttgttcagcattg

SEQ ID NO: 380007 - DNA, 427 bp, Homo Sapiens
  misc_feature (74)..(74): n is a, c, g, or t
  misc_feature (80)..(80): n is a, c, g, or t
  misc_feature (125)..(125): n is a, c, g, or t
  misc_feature (137)..(137): n is a, c, g, or t
tcaaactacagtgtcacaattcctattttacctgtcagtgttttaagttgacagcacacccattatatgactgnaaaaanaattacatataatctctaccacaaaagcaaataaaaattctttcnagaagaaataanataagtgcaaacacctaaaacaggcaactgaagcaactgttgtaacctgtagagaaacacaaaacatttaaaaaaggacaaaatatttttataaataaaagataatgttctccacttctgaaacactgagtaaatataaacttctaagtgcagactgtttttagggaccaaggtaccatattattttttaaacaaaatgcaaaaatttcaaacacatatacaaatcaccagattaatgtatatgaccacccccgatataatttaaaaagaaaatattaaattattattta

SEQ ID NO: 380008 - DNA, 467 bp, Homo Sapiens
  misc_feature (24)..(24): n is a, c, g, or t
  misc_feature (33)..(33): n is a, c, g, or t
  misc_feature (46)..(46): n is a, c, g, or t
  misc_feature (90)..(90): n is a, c, g, or t
  misc_feature (103)..(103): n is a, c, g, or t
  misc_feature (296)..(296): n is a, c, g, or t
  misc_feature (359)..(359): n is a, c, g, or t
tctctcttcgtggttccctgcttnccccttccntctttccgaggangggtcaacctaatctctctcaaagctaacccctaggccaattgncctggatctcctnccctctcccttctttaaacgagcttgcctccctccctgcccaagtttgagggcaaggcctaagaaatgtcagcccacggaaacaactcctattatctggtgaactttgggtaatgtgaatcagtgcctgaggacctttgctgtgtcctgggtacagaaccatccacttgacctaactacctcccctggtccgntcctcgctcttctcttctttgttaagccaacaactatcaccctctcctactcttcttctcccnctgccccctggagggcactgtgtttggttgtgcaaatgtatttactatgcgtgtttccagcagttggcattaaagtgcctttttctaataaaatcagtttattatgac

SEQ ID NO: 380009 - DNA, 499 bp, Homo Sapiens
gcatccccctggctgctgcccacccccttaatagcctacactctctcttgagaacgagccatgtactctctgggtcacacctcaacaacacactgtctttacaaataaggctgctaacacatggcaggaacaactgagttcctaaccagtccctcggctacctgattcagcacgtgactcattcttttttgccttttcagctcaaagcttgtacccccaagggactatggtccttttaagaactgtatctgtgttttccctgggaggtgtttaatatccactttgaataacactgatctggcattcccttccctggggcttggcaagggcccttctggtgcagcccctagcctgggcacagcttctggttccaactttctggctgtttgctggctccgggccttcaggcacggctggcactggattaaagttacaattggcatttttcctccccaaaatgattgggtgatggggtaggagccttttatagttttacaca

SEQ ID NO: 380010 - DNA, 329 bp, Homo Sapiens
ctacagacaactggacaggagagagagaaaacagccctctggattctccaggatggcagccgatgtcactagaagctcagggctgatgttcctggttggctattgcaccatttcagctgatacagtccaccatcactgattaccggcgcggttgcgctggatgcacttgaaccaaaccagtgtatctcctgtgatttgttttcatgtgtccgaagacaccagggaaacagagatcctggtgttgttccttgttattacgttttactgctgaaagtaagaggtttatttttctgtcactcagtggagacataccctggaaaggagagggg

SEQ ID NO: 380011 - DNA, 439 bp, Homo Sapiens
  misc_feature (16)..(16): n is a, c, g, or t
  misc_feature (25)..(25): n is a, c, g, or t
  misc_feature (46)..(46): n is a, c, g, or t
  misc_feature (72)..(235): n is a, c, g, or t
ctacagtaccccccgnaatagcctnaatcaaaaaaaaccccacaantgccctaacagtaccctttcctgtannnnnnnnnnnnnnnnnnnnnnnnnnnnnnnnnnnnnnnnnnnnnnnnnnnnnnnnnnnnnnnnnnnnnnnnnnnnnnnnnnnnnnnnnnnnnnnnnnnnnnnnnnnnnnnnnnnnnnnnnnnnnnnnnnnnnnnnnnnnnnnnnnnnnnnnnnnnnnnnnnnnctacttcacagagctactttagagttgtcaaggtaagtaggcaacaagctttggtctcttgagccctttataaaacaatgggccagaacatatatctaccaatccctgggctgaggccttgtaacctgctggtgatttgatctcatgctggagcacatggtagagcagcaaaagataaagcatgaatggctattgagaaagaca

SEQ ID NO: 380012 - DNA, 503 bp, Homo Sapiens
  misc_feature (87)..(87): n is a, c, g, or t
  misc_feature (492)..(492): n is a, c, g, or t
aaaaatagccatcttcagtcctttgcctgtactgttttttccttctgaaacatttacaaagcaactgtcagacaatgttgccaaggntaaccatgcacagaaaaaaataagacacgtcaatttgactttttagaaaaagagaattttccagctgacaaccgaatctcaaagttggccaatccaagtgaaaagtgcttggaagtgttctgtttaaggttgggtgaagcctctgttcatatccttgaatatttaatttggcttttctgttactaaggaaacatggcatgatgagtgaatatgcacattacttccatttggggtggtgactaaggaaaaccatcctcccttaggatacagggccttactgtagtcattatccatgtactgaccacaaacaaacttggccatcttggcctcccttttcaaggattagggttcaactatagaatgaatgaataggaaggctttaaacatagcttgtggaagggattngggggaaacct

SEQ ID NO: 380013 - DNA, 733 bp, Homo Sapiens
  misc_feature (111)..(111): n is a, c, g, or t
  misc_feature (318)..(318): n is a, c, g, or t
tggttcccatcccctaacccctcatcttgggtctcctgaagtaccatcacccacgtttgatcccaagatcttcctccttcttccatgctaataactcactccagaatggcnaggcccctagggctggggtccacaggctgcagactagtacccgtctgtgggggtccatggcctattaggaaccaggccgcacagcaagaggtgagcagtgggccagtaagcattgccacctgagttctgcctcctgtcagatcagtggcagccttagattctcatagcagcgcaaaccctactgtgaactgtgcatgtgagggatcntaggctgcgcactcgttatgagagcctaactaatgcctgatgatctgaggtggaacagttccatcccaaaaccatccccacaccatccacagaaaaattgtcttccaggaaactgatccctggtgccaagaaggttggggaccactgccctagggtgtggaaggtagtggactgtagagacaacaggtataattcaccttcccactccccaagaaatccacaagcaatatatttttccaacagacaatctatacctaaggggaaaaaaacagaatttaatgcaaattaactcaaactacaatgtattaatatgtctaaagtctactaaatatttatggaatcaataaaatggatcctatcagaagcccaacaacaaaaaaaaggattaaaatgtcctgagttgccatgttaggag

SEQ ID NO: 380014 - DNA, 533 bp, Homo Sapiens
  misc_feature (64)..(64): n is a, c, g, or t
  misc_feature (71)..(71): n is a, c, g, or t
  misc_feature (86)..(86): n is a, c, g, or t
aaccgttgtaattgaatgttaagttgcaaacattcatatccactgtggaggaaaacttgagaanaaagccntctggactgacaaanaccccagtagccccagccctcggaggccacaggaacccatgaaagatggaggctctggttcatgatggaaaactgagctactaagccccatgttatgcaagcccaggctactacgtaacccccatgctccctccccaagcaggggagaggtttactcttcagagaaactgagaaggggctgcagaccccaggaaacaggcaccatggagaacagagctcagggcaaggggcacccagaacaccaaccacacgtccacctccacaggcaggagattcaagggttcttctctggagaaaaccaaccacctgagaggaaaaccatctacataatgacagttgtgtgcagggttccaacaaaaaaagatagctcaaaatctgttctcctaaagaaaagctcatcaaccaactaccccacctatgcatgctgagctcacggacaggcatctg

SEQ ID NO: 380015 - DNA, 562 bp, Homo Sapiens
  misc_feature (63)..(63): n is a, c, g, or t
  misc_feature (71)..(71): n is a, c, g, or t
  misc_feature (121)..(121): n is a, c, g, or t
  misc_feature (298)..(298): n is a, c, g, or t
acccgacggtgccaagctgaagaaccgaccggaaggcaagcccgtccgacagataagccctgnggaaaggnccctgagtcacgctgaggagagccttcactcgggagttccagcctgaganggaccagagttcatgcgacgtatattttcctttggaaacagaatgaagccagaggaaactccttaatacttaaaatcgttccttggattagtatccgtgagtttgaaaagtcctagaactcctgtaagtttttgaactcaagggagaaggtatagtggaatgagtgtgagcatcggngctttgcagtcccatagaacagaaatgggatgctagcgtgccactacctacttgtgtgattgtgggaaattacttaacctcttcaagccccaatttcctcaaccataaaatgaagataataatgcctacctcagagggatgctgaccacagacctttatagcagcccgtatgatattattcacattatgatatgtgtttattattatgtgactctttttacatttcctaaaggtttgagaattaaatatatttaattatgattt

SEQ ID NO: 380016 - DNA, 462 bp, Homo Sapiens
  misc_feature (377)..(377): n is a, c, g, or t
  misc_feature (388)..(388): n is a, c, g, or t
  misc_feature (427)..(427): n is a, c, g, or t
  misc_feature (442)..(442): n is a, c, g, or t
acaagaaaaaaggaaatatctcttaaactataacattaatgtcaacagagactaaaaggactataaggcttataaggattaaattttataaaagatatgtaagactttagataaaatttgaaaactttattgaaagatataggtaatctgaaattaatctggacatctaccatattgtggatagaaagactcagtgtcataatgatgtcattttacctcagattgatctatatagttaatactaccttagtcaaatctcaactggttagttcatgtaacttgacaagttgctgccaaaactgcatggggaaccaatgagtgaagggccaaggaacagttaaggacacttcatgaaggaaggaacaccatgttgggtnggggacttgtncctgttacaggatttatttataaggaccatatttaattnaggacagtttggggnatgggccacagggttgggcc

SEQ ID NO: 380017 - DNA, 482 bp, Homo Sapiens
  misc_feature (472)..(472): n is a, c, g, or t
gggtgacatcgaattgatgctctcgagctcacaaagccctttgttgagctccattgcatttgttcttcacctgcaccctgcattatgttgccagggttttagcgtcaactagcttacccagttacccgacttggaagtggcagagatggactcaactgaagcctgctaactctcattttagcccctttctaccacatgctgccttttataacatagaccccagcatgcctgggtggagatctgctggagtttatgagcctggggtaccctggggaaaagatgtgggatggggattgagtgaatgggaggtgcaagtagtttctctctctggggcagcagccacttgcttgggacaccacaaacactttccctggcagctggaggcaccaggtttgattaggaggcattaacattttccgggggaaaatggggaaaactttgcaaaatgcagtttgtttttttcccagaggtnccttgaggat

SEQ ID NO: 380018 - DNA, 176 bp, Homo Sapiens
gtagttgggagtaagtttgtgaatggaaacaaacttgtttaaacactttatttttaacaagtgtaagaagactataacttttgatgccattgagattcacctcccacaaactgacaaattaaggaggttaaagaagtaatttttttaagccaacaataaaaatataatacaacttg

SEQ ID NO: 380019 - DNA, 462 bp, Homo Sapiens
  misc_feature (271)..(271): n is a, c, g, or t
  misc_feature (276)..(277): n is a, c, g, or t
  misc_feature (302)..(302): n is a, c, g, or t
  misc_feature (308)..(308): n is a, c, g, or t
  misc_feature (312)..(312): n is a, c, g, or t
  misc_feature (316)..(316): n is a, c, g, or t
  misc_feature (338)..(338): n is a, c, g, or t
  misc_feature (366)..(366): n is a, c, g, or t
  misc_feature (377)..(377): n is a, c, g, or t
  misc_feature (404)..(404): n is a, c, g, or t
  misc_feature (421)..(421): n is a, c, g, or t
  misc_feature (451)..(451): n is a, c, g, or t
ttaagtgaaaaaatatgatctgatgagtaagtggcaagagtgttaacgtatgaatattaagagttgttctgaggcctttttccttttctgggggttctgtgcttgtggtagaactcttggttattttataaatagttcctgaaaagtgagagagtacagctggaaatcagatttctgatgaataaatcaaaccctattaagagaaacaggttcaagtaattttaaaaccatttgaatttccataaatgttttgttaatgattaattataanacacnncagtgactctagctggaggcttttntgtgtntccntttnagtcagctaggaaaaggaaganaaattcaagcttagtcaattgtggtttncactgaatctnttttaaagtaatgagctggtttgtctncttcatcactatagcancttaagctagtttttccttttgcatttttnatttctcctag

SEQ ID NO: 380020 - DNA, 195 bp, Homo Sapiens
ggtttttgggaacaaatgaacttataaagtggttttatataaaacatcaattgtcttgtatattttggataagcagcagtaccagctttcatttgtaacagtctgtggcattggaaaaaaaggagtctgtgattgttgaagtgaattatgttataaatgcaaagagaagataaaatattaaaaaacatattttct

SEQ ID NO: 380021 - DNA, 474 bp, Homo Sapiens
  misc_feature (290)..(290): n is a, c, g, or t
  misc_feature (373)..(373): n is a, c, g, or t
  misc_feature (438)..(438): n is a, c, g, or t
cactcccctagttcaagttctcatcagctcttgcctgggtttaccacagtattctctcaacaattctttggccccaccacaatgtaaccaggagaatccatcttaaatacaaacccagggaaatcactggcttgtttgaaacactttggtggccccccagtactcttaggataatgtctttaaatggcttaggggaacttgcgtcatctgagttgtttaccctgttagtctcacttggagggttttctgacgattagcatgggtatgtgtcaatgcatggtatgcatggngcacaaaataaatgaggattcctgcacctgttacctggaaccccatttttacagataagggaaaatgaggactcactgagggntaaggcaacatggccctaatttcacacagctagtttaattaacagctattgttgaggggatattntgaggcacgttttttccacagggcagtttaaaattt

SEQ ID NO: 380022 - DNA, 427 bp, Homo Sapiens
  misc_feature (42)..(42): n is a, c, g, or t
aggttttcttcattactcccaacaacaaaaagcaactttttntttgtttgtttactgcctacaacattactagcttctttttgtcactttctttcacatgcagctgagagtgaaaagtgcagaaaagaattgtagctagaggtctaacatttacgcattccatagaactcctcctgcaggcataaaagaggggataagatagaacttgtggctaattctgtctattttcttgtcaatcctgggaatggagaaagagaaagataaatcacctagaccatgaatcctgagttcacaaacagcttagatacacctgatgattgggacttgaaccaaagtaataattcttttctcctacttcattttgtgatataacatttattcgaagttagcccttgaatagcctttcctgtttagatgagagaaaata

SEQ ID NO: 380023 - DNA, 434 bp, Homo Sapiens
  misc_feature (99)..(99): n is a, c, g, or t
aaaataacatacataaatggaaagcaagatgtttattccaccccacacatagcttttccagaaataagacctaaatgtgtccataataaaaattctggncatgtatcctaatccagtgatattttgccacttgtggtagttaaaaaaaagatgtcacatagcctattttacagctatagatgtgatctggtttgataaacatttattattttctttccactctattgccataactaaggacaaagttgtcacatagaacttggagagatgggcttttattatctctgagcatctattctaagtgttgcatgcttggccaattggtcagcatggctctagaggcagtaacataagccattttcataaccatctcctttcataacaggaaaggaattggaaaagggagagtttgtttgcccttaaagtaaaaaaaa

SEQ ID NO: 380024 - DNA, 596 bp, Homo Sapiens
  misc_feature (37)..(37): n is a, c, g, or t
  misc_feature (68)..(68): n is a, c, g, or t
  misc_feature (76)..(76): n is a, c, g, or t
  misc_feature (327)..(327): n is a, c, g, or t
  misc_feature (530)..(530): n is a, c, g, or t
  misc_feature (575)..(575): n is a, c, g, or t
ggtgatagtgacccagcttctgggctgctggctgtgnagatcaagctgtgcaaacacaatggtcctgncctttggnaaaagcagaacaaacttgctagggcataaagcatcctccattctgcctggctgtccatcctctcaacagccccatgaagaaggggctctccccattttatggacaagaagacagactcagctgggtcaagtgggcttgcccagggatcacacaggttcagctgtggaagacccagggcccctggctttcagtctttgggtccagctgtctcctccagggcagtgctgccagtgtccagggcatatggcttngcaaagtgggagaacctctgcttggggtctcgattggagaaaggaatggcttcctctcccctgatgtgagccgtcccagggccatgttgccgtaaggggtgcacagcctgtccactagcccagctgcggaagcacagctgtgtcccacgtgcagtgcctcagaaggagaggaagctttaggttggggcccaagacccagattntacataagctttccacttagacaaggtacctaagcaaggttgttncttagtttcccattgtaagag

SEQ ID NO: 380025 - DNA, 559 bp, Homo Sapiens
  misc_feature (22)..(22): n is a, c, g, or t
aaccaccaaaggtaaaaacagnaaacaccagaaatatttatttatatgaaggttccactgttggctataaaagaatcctttaaaaagtaagagtctttggaagcaaaagataggaaggtgtaaactaattaaaaacaggctaatgacaggcaacatcatgtgtatgcccaagatggagtatagcccataaagccaggcgcacacatgcaatgtattaagttgaaaatgcatgtctcttcagcttcatatctattaaaggaagaaacaatttacaggttgctgcattatgggagtatgatatgtggagtgtcaaccttttctcttcaaactgaaccatgttaagtaaaatcaatgatggggtttggggggtaggggaaggaaggggaaaagcagggagaaagaaagtttttaaaaatctctgcctcagcaaaagttttcattaaaattttagacaaatcatccctgtgtccttctcccttgctgcctggggctccatgctatttctatgcaaataacaacctcgtggtttatatcttattatttccaccggagctgcagc

SEQ ID NO: 380026 - DNA, 419 bp, Homo Sapiens
  misc_feature (17)..(17): n is a, c, g, or t
  misc_feature (26)..(26): n is a, c, g, or t
  misc_feature (35)..(35): n is a, c, g, or t
  misc_feature (45)..(45): n is a, c, g, or t
tgcactgcaacccctancccctgccnacttgtgantgagctgaanctcaagcagggtggtaatgctccctgctccgtgctccccctgctttgcaacaccacagcctgcgtggttaatatcccggatgacagttgcttgtttttattccaacatgaccagttagaagcagggcaaccgtggacaaggtggtgaacccctttgtacttctgtgttttcagttgaaaaatggagacgtcaagttccctagtcacagagcagctgtgtgggacccacgtaaacagccctgatcagtagtgaagagcaacatgtggcacacagggcctcctgcacaagcaacagtcgctgcttgctgttactgtgggctccacgttgggatcagacacacctgtcttcagtggcttgcagttgcagcaaggacc

SEQ ID NO: 380027 - DNA, 511 bp, Homo Sapiens
  misc_feature (154)..(154): n is a, c, g, or t
  misc_feature (478)..(478): n is a, c, g, or t
  misc_feature (487)..(487): n is a, c, g, or t
ggtaatttataaataaaagaggtttaagtggctcacagttctgcaggctgtgtaagcatggcaccagtgtctgctcggcttctggggagccctcagggagctttactcatggtgaaaggctaagtgggagcagagatgtcacatggcgacaggnagcaagagagcagggaggtgccacacaccttcaaacaaccagattttgtgaaaactcactcattactgcaaggacagcaccaagccatgagggatccacccgcaggacccaaacaccttctattagggccaaccttcaacattggggattacatttcaatatgagattgggaggggacaagtatcccaactatattcaggcagaatatatggcattgatatatattgaaattattaacattctctataattcaagtgactgtaaattatgtcggatctgacctggggggatgtgttacctaagatttgactaggatcaggggcnctgtgtccngtccggggtgtatttctgtaggtc

SEQ ID NO: 380028 - DNA, 1096 bp, Homo Sapiens
  misc_feature (358)..(450): n is a, c, g, or t
gctaagcagaagacaccgggatgagagaacacctattacagaccatctcacgctctctagggacgactggagtgagcactggcctgggagtctgaagattgtgccttcagacctacttcgtcacttactagctggcgactttggtcagtcatctagtttttccgggccttatgttccttacatgtgactactaaaaggctagtagattataggatttattaaagatccttctgactcttaatttccagtggtcagattaaaaatagtttgctaataatggctatgttaaaagagctctgaccttggagtcaatttatggctccacatccaagctctaccattcactagttttgctttnnnnnnnnnnnnnnnnnnnnnnnnnnnnnnnnnnnnnnnnnnnnnnnnnnnnnnnnnnnnnnnnnnnnnnnnnnnnnnnnnnnnnnnnnnnnngtgggaggactttttaaacttaaagtgctatatacattttaagaggtgttagttactgctccgttgttggtcagctgagataaatcttcagtgttccctggatcctggctctggagtgaagaaggtagcttggcagttgactttgagtcctcccgtttcgctgggcattggcagttctgggagcagagcagccttggcatgccatggggtggattgtgtgtttatagaaaagtctgggacgtaagcgaggaaatgggccacagctcagcggaagggaggccggtggtgaggatggaaatggtggagaggccaggctcaggtgtggcccaccaggagctgccttccccacttttttgggaggtagggtggggaagaagaaaagagcaaattgtttaaaaatacacatgtatatagaaaatagtaaaactgtaaggttatctgtgtgttgttggattcctgggaaattcacattttctctaatctctgtattttccaaattttctataacgaatatgtatttcttagaataaaaatttttttcttcaaaatttggaggaaatcgctttttacaaatgtgggttcatctttttctgcttaaccttttttctcatttgattaaagaactaataaaaatgtttttgaaatt

SEQ ID NO: 380029 - DNA, 420 bp, Homo Sapiens
  misc_feature (17)..(17): n is a, c, g, or t
  misc_feature (93)..(93): n is a, c, g, or t
agttggatgtgaagaanggtattgcccgggcaaggccctccatacagagatttaagaaagaaatccccaagaaagtgccagtatccatagaancccaggagaggagagaaggcccataatgaaggcctctggtcaacatggacactttccttcccaacaaagctgtaagaagaatgagagtgagataataactagactgggcaatgacatggtttggcaccatggtttacatcttcggaaagattgtattgcttcagggagtgataaagtgaatcacaatgaggaagaatagtccatttttatgtattacacaattaattaattattaagtcacctctctgccttcatttacttggataatttatcattgtattatcattaaaattagatcattagttgggataatacagaactcaggga

SEQ ID NO: 380030 - DNA, 460 bp, Homo Sapiens
  misc_feature (19)..(19): n is a, c, g, or t
  misc_feature (79)..(79): n is a, c, g, or t
  misc_feature (247)..(247): n is a, c, g, or t
taattatccctcaactttncccaaggaggaaaaagcaaggcctcaagaggaagataataacaaacttgtaaagtggtcnactcaagccccaggattggaccccaacctgactcccatactcttccccatgactcctactcctaccagcttagaagaaagtaattagaggttaagagcgtgccctgacacatgctgctcaggtaaaaggcactgatgtatgctctttcccctggcaaatgcaaggaanagaatcacttactggctacactgctgtaagagtttggacacagccctccttctagtaaagtttttccatctgatccaacgtaagtttgccattcatgtaaaatacttccgtgtaaaagaaccaaaacatgattaggctcgctggtgacttgctgggggcggtgctgggggaagattaccctgtatgtttgttttaaaatagtcaataatgtcg

SEQ ID NO: 380031 - DNA, 470 bp, Homo Sapiens
  misc_feature (18)..(18): n is a, c, g, or t
  misc_feature (41)..(41): n is a, c, g, or t
atcacttgagcccgggantttgagcccacccgggcaaacanggtgaaaacccggtgtcctaccaaaaatacaaaatgtatcccagaacatggtggtgtgtacctgtagtccccagctactcaggaggcaaagatgggaggattacttgagccccaggaggtcaaggctacagtgagccatgattgcactactgcagtgcaacctgggtgacagagtgagaccctgactcagaaagaaccacttgcccacagtccagacagatggattgtaggtgggttttctggagattagtagatactgtatagagttgtatacataaaattgtgtcagtagtacaaagtgtatataggctgtttactcttatatttcctactgtaagatacagatttatggtactgatacctttaaattatatcatattttgaaaatgtaattactgatattcaaaataaattaaaggacttaaaatc

SEQ ID NO: 380032 - DNA, 592 bp, Homo Sapiens
  misc_feature (86)..(86): n is a, c, g, or t
  misc_feature (94)..(384): n is a, c, g, or t
tactgacacaatttatgatacaactctatacagtatctactaatctccagaaaccccacctacaatccatctgtctggactgtggncaagtggnnnnnnnnnnnnnnnnnnnnnnnnnnnnnnnnnnnnnnnnnnnnnnnnnnnnnnnnnnnnnnnnnnnnnnnnnnnnnnnnnnnnnnnnnnnnnnnnnnnnnnnnnnnnnnnnnnnnnnnnnnnnnnnnnnnnnnnnnnnnnnnnnnnnnnnnnnnnnnnnnnnnnnnnnnnnnnnnnnnnnnnnnnnnnnnnnnnnnnnnnnnnnnnnnnnnnnnnnnnnnnnnnnnnnnnnnnnnnnnnnnnnnnnnnnnnnnnnnnnnnnnnnnnnnnnnnnnnnnnnnnnnnnnnnnngtggacaagttttacaaataaaccaaaataaaaatattctcacttttcagctgcacatggtggaaatgtacatgtatgatgacaaagtcggagatatttattacgctgaagacatttaactttgttccatgccagccatgagtgacaacgctagagattccaaatggggaaaggatcctctacagacggctttgtttaaaatggttac

SEQ ID NO: 380033 - DNA, 423 bp, Homo Sapiens
  misc_feature (109)..(109): n is a, c, g, or t
  misc_feature (160)..(160): n is a, c, g, or t
  misc_feature (246)..(246): n is a, c, g, or t
gcgtatatagtgaaggggtgaggatattctaaacaaacaaaaattgaataatttattcacagaaactattaagattgtattgtaaagctcacagcaaggctcagtgggncagcagctgcaacatctcaccggggaaattattttatttaacgtgagtgangatgtgggccggagaaggtagctgaagctatttataaaacgttgtgtaccttcttccgagctctctcccctttgtgaagggcgcanaacttatacccttgatggatgggagatttacgcaatgtgttttactgggtagagtgacagaccttgggctgtccctgggagtttgaggaatctgggaccttatttcccagggcagagaacactgttcctcagaaaatgggccttcttataattaaaaccaggttttccacaatttct

SEQ ID NO: 380034 - DNA, 563 bp, Homo Sapiens
  misc_feature (17)..(17): n is a, c, g, or t
  misc_feature (25)..(25): n is a, c, g, or t
  misc_feature (41)..(41): n is a, c, g, or t
  misc_feature (74)..(74): n is a, c, g, or t
  misc_feature (144)..(144): n is a, c, g, or t
  misc_feature (160)..(160): n is a, c, g, or t
cccacaatgtgaaggtncatggagnaattttgagggtgtgnagtgacaatgctatatactcccttctcctaatnaaacccaatcaattacggcttaaaaagtataggcttaaccaatgaatcatctggcaaaggttttatatantttatagaaaaagatncccataacttaggggaaataaagacaaacaggaatctttttgttagcgaacataaagatggtctgagggttattagtgtcattttaaattgcctgccctaattacaattaaatcatttatctgtgtatgaattagccccctacagagcccaaagttgcccatccctttcagtggtttgacacacacacccccggggctccacccccaggtcatttttcacttccaatgaaatgtcacccagcaaacttttcaaatccctcccagcacctactatgaagtgtggacagaggcaaacaattcaattttatgaacggcctgcacatagaaaggcaaacaagaaggatggataaattatcccatgaacagagccatcccatcctataaacagatgagcctaaaacag

SEQ ID NO: 380035 - DNA, 435 bp, Homo Sapiens
  misc_feature (50)..(50): n is a, c, g, or t
  misc_feature (69)..(69): n is a, c, g, or t
  misc_feature (77)..(77): n is a, c, g, or t
  misc_feature (131)..(131): n is a, c, g, or t
  misc_feature (134)..(134): n is a, c, g, or t
  misc_feature (181)..(181): n is a, c, g, or t
  misc_feature (186)..(186): n is a, c, g, or t
  misc_feature (204)..(204): n is a, c, g, or t
  misc_feature (226)..(226): n is a, c, g, or t
acctcaaaaacaaaacatttgccaacccccacagcatccctgaaaaccgnactacctcttcaacttgcnaaagcagnccaaactgtgaagaccccaagtggtttgggtttgttgtttaaccttagcgaganccnttaactgcagcaatattcaagaccagatatttggaagcaaatgatanttccncttgcagtgtccacaaanctgaatattaggggcatgaaantaggcttaccatctgatttgtaattacaattttggaaatctctgttttagttgctgaggcctgagttttctggctcttaaagcatagatcatttcacctgatgtttttgaagcatcctaagtacagtagagtagaaaactgatttctttgttaattgtacactgaataatgccttttaaaaatcaaaataaaattaacaaataatggtg

SEQ ID NO: 380036 - DNA, 550 bp, Homo Sapiens
  misc_feature (447)..(460): n is a, c, g, or t
  misc_feature (492)..(492): n is a, c, g, or t
  misc_feature (518)..(518): n is a, c, g, or t
aagctaatagcactggaacccttgttatcacagatcctacgcgaattatattggccccaattaatgccgatatcacagttggagaaaacgccaccatgcagtgtgctgcgtcctttgatcctgccttggatctcacatttgtttggtccttcaatggctatgtgatcgattttaacaaagagaatattcactaccagaggaattttatgctggattccaatggggaattactaatccgaaatgcgcagtgaaaacatgctggaagatacacatgcactgcccagacaattgtggacaattcttcagcttcagctgacccttgtagtgagaggtaaaaacagaaaaggtgggagagaaaaacatggtgggattcctttctccccgtctgtggcaagccttgcctccaacctgggtgatcgttgacactcaccatttctgtgaaagacnnnnnnnnnnnnnnaacatattattacttagattttgacttaactncaatcttgtagcttcttgcagttctncccacccccaacctagttcttagggtattgtt

SEQ ID NO: 380037 - DNA, 580 bp, Homo Sapiens
  misc_feature (52)..(52): n is a, c, g, or t
  misc_feature (59)..(59): n is a, c, g, or t
  misc_feature (104)..(226): n is a, c, g, or t
  misc_feature (413)..(423): n is a, c, g, or t
tgtggtgaaacaggtgaaaacccttctgtaactaaaaaatacaaaaaactanccccagntgtggtggcaacaaggccctagtttatttatttatttaaaagaannnnnnnnnnnnnnnnnnnnnnnnnnnnnnnnnnnnnnnnnnnnnnnnnnnnnnnnnnnnnnnnnnnnnnnnnnnnnnnnnnnnnnnnnnnnnnnnnnnnnnnnnnnnnnnnnnnnnnnnnnncaagcctcactcctacatcttcagtgctggacgtcatccagtgtcatggcatcatgtgatttttagggtactattcatgtgtgttcagttatgtaaacttgtttctcagttgtatcaataggcgtaaataagttctcattgttgatgttattgaagtgtatccataagtatgtatggtcattcctcnnnnnnnnnnnaaggatgatacatatatttatttcttaaaaatttcaggggacgtcccagtgttagccacttcttgtcccttctgtgggctacatccagttgtaaattgttccagtacaacacatcagggtgtttggaaatgccccaaagtccaggaacactaactta

SEQ ID NO: 380038 - DNA, 519 bp, Homo Sapiens
  misc_feature (286)..(286): n is a, c, g, or t
  misc_feature (435)..(435): n is a, c, g, or t
  misc_feature (441)..(441): n is a, c, g, or t
  misc_feature (456)..(456): n is a, c, g, or t
  misc_feature (494)..(494): n is a, c, g, or t
  misc_feature (503)..(503): n is a, c, g, or t
atttttggagtactttccagtagagttaattgatttcgctctcagtccagggtttgtcaggttagctcaggagagaactaagtttgacctccttaaggaactatataccctcgatggtacagttggcattgagtgtccagattacagaggcaatcgtcttagtactcaccttcagcaagaggggtctgaattgctgtggtatttagcagagaaggatatgaattcaaagcctgaattcttagaaactgtctttttactgggagaccatgctgggggggccccagtnacgtcaagcaccatatgattttgcctcatacccgatcttcttgacttaggaggtccagctttgatgtttaacctggaagccatttacccttttaataggaggaagccacggccgggcttgaaaatgttaggcccaaatttaagggcttngagccngttggggagtccagnctttaccagatggattttgatggaattaagtttacttnaaaaggggnaaggcaagagggacat

SEQ ID NO: 380039 - DNA, 550 bp, Homo Sapiens
  misc_feature (12)..(12): n is a, c, g, or t
  misc_feature (24)..(24): n is a, c, g, or t
  misc_feature (37)..(37): n is a, c, g, or t
  misc_feature (536)..(536): n is a, c, g, or t
aagcttggcacnggtagacagatnttgtgtaacagtnaccttaaggacacatgccttaaaggactattgagcaaaaaaaataactaagctctttccaggtaacactcagggaacttttgcagtgtcatatccgttctctggtacctatgtgtccgatcttcctgcccatctgtttttttcactcaaagtcccagaatcctatgccacgggaaggattttcacctctcaatatagacccatgtaccttaccccatgttccaactgacttcctgagaaataaatcattgtccttgtatttcataagagacaacaaacattgattttgttgttaacatatgtgaggcttcgttcatccaataactatatattttaatcaccaataagtatcctaaaatttcagacgctaatgccctgagggatccaacttttaattcaattattgactacagtttgaggggtgccatgtccagattaaatgcagtatgatttatcctatggtaagtaaatcctctccacttggagtcttgaaaggttgntttaaatgccttaa

SEQ ID NO: 380040 - DNA, 452 bp, Homo Sapiens
  misc_feature (374)..(374): n is a, c, g, or t
  misc_feature (405)..(405): n is a, c, g, or t
  misc_feature (427)..(427): n is a, c, g, or t
ctccccactagctgggactacgggttggcttggcttccatggctgtgggggctcctggttcatgccctttcctcctttctctcttgttcagtgttttcctccatagaatggctaaggccgtgccagccacctgaaaggagctgagttctagcctctactgattttgcgtgtgagctccttgccactccaaaatttttcttagccagagggccttgctgtcacttcttttgacttgctcatccatgctccctcagaaggtcctgggggctcttcctttgatagcccttggcaaagactgcaagctcttgagcttcctctcagctggcaaccaaggtcttaattatcagaaagtttaatctttctgacaagggttncatcttgccaaatattcagtagggggtggantggcaaactaatgtcccaattntcgataaaaatcccttagatcaagg

SEQ ID NO: 380041 - DNA, 517 bp, Homo Sapiens
  misc_feature (95)..(95): n is a, c, g, or t
  misc_feature (457)..(457): n is a, c, g, or t
aaaaatagccctcaacctctgtggaatcccaactcccaggtaactgggcaaatatgcaagcatttggttgacaatgcaacccatctccgcttggnccaggagaccgttctcatctgaatcatagaggcgaaacatgaactccagcttatcctgaggcctccccgtctccagcagggacaggtagcacacaacatccttcaggtataccactggggattccgagcttgaagaccgagggacggggggttcccagggggctcgcagccacttggtcttcagctggtgcttgcttctcagccatatttgattcagtatcaggggcacaggcctcgtctgctttggtggcattatctgcattctgtatattagtatctgcgctgttggcctcactgttgctggctccctccgtcgggtggtcagaggtctcgtgtctgggctttctggctgaaggccaggnagaggtgagtgctcagtggctgggccaggtccacctccaggtacgccctcatgaacagct

SEQ ID NO: 380042 - DNA, 617 bp, Homo Sapiens
  misc_feature (106)..(106): n is a, c, g, or t
  misc_feature (567)..(567): n is a, c, g, or t
aattacaataacttagcctcacttgcctaactaccacactggcccggccggaccctgtctttcatttaacaagtttgaatattttggttccttcacgggtttcctncatcactgtgaatcttaaaaatccatttcagtaaatattacctagagtgaatgactgacttttttggtgggcattacattttatgtctgagccacacgtatcactcacctcctcttaatcttgaacctactacttccttctcccaggccccaggtctcaggagcctttcctatctatcctccctctacgaagttggcattctagtcttagggctgctcagtgctagacttgctgcagtgggaggcagtctatcaagggcaggctctttttgtcttacgaaccattttgaagatataaggataagacaaatgtaaatggaagagggccattttatctgctaggagacacccacacagagccaggaaccattgaggtagaggggagaaaagtgtggtgctgaacaacctagcaattccacctctcactacctgtgtaacctcgggaagttactcaagcactgnccctgtgctagctgtgtcatcttgggcaagttatttttagctttctccct

SEQ ID NO: 380043 - DNA, 894 bp, Homo Sapiens
  misc_feature (54)..(54): n is a, c, g, or t
  misc_feature (528)..(528): n is a, c, g, or t
aataaatagaaaattaaaatccagaacagtaataacctaaacatgaaaaggaancctatttgggaatttccttccttgggaagaaataagaggggcaaacccactcctaattgctataaatgacccacaggtttcaaagggacttttcgttgcctctcagtccctattttttcccccacttcacccctctgactccctccccagctgttgagagcccaggctttttacaatccctgagtcacccaaactcttgagtaattttaactgatctcaatatattcttttcagaagtaaacaattcacaggcagtcctctactttcacttgtaatgagtaaaatctcacagaaacatacaatgtaggaaaggtgaagggtagaattacatttttaaaaggaagttccatattcagagtgctaaaaaaaatcaactcctaattttctctctttgggcataatatttgatgaaatattttccatatctcctatatgtgagtttattttattctttttcttcccaatcacttatangcccatgagagcctaggatttgagatattttaagcacatctggagcgatctagctttggacacatttttattaggtgcatgaaaactaaatgtcttattgccaagtatcatttttacattttctcgtcaaatttttataaaagcttaagagcaaaatgcagtaggatcttaaaaaaattctacaaacatagctggataaattctgctgctgagccagaactgttggctggaaggcagcgccaccatgcgatcgttccaaaggctgtcagttttgtctaaagacacaagctgggatcctctaagagttgggcaactaatagcaaaagcccacttcctgtcataggaaggttattttcaaactccaaa

SEQ ID NO: 380044 - DNA, 492 bp, Homo Sapiens
gaaagatgtataatgtagagaactgacttctctcttaaaaagtacagagagcctgtgctgtgaacccccttcaatgggaaaaagctgcagtggtgatggcaggctcctaaagactgctgctaaaagacacaagaattatacagtttccctctataagtgaatccaaaattcactgacgaattcagagattgagggcacttgcttgaaatcaaggtgctccaacttagtttaagacctccagactctaactttatagatcatctcttctagagtgtgcatggatgtgtgttgcagggtggagaagtggggagaagtgtatagtagtacacggggggaagaggggacctccatgtccctttgttggatacatattacagaaatatgtgccactcactttttgttggttctggaatcttcctggaagtgttactgacatttgggctgcacagagccccacaccttcactttacacctcctcttctaggattgctt

SEQ ID NO: 380045 - DNA, 466 bp, Homo Sapiens
  misc_feature (28)..(28): n is a, c, g, or t
  misc_feature (34)..(34): n is a, c, g, or t
  misc_feature (94)..(94): n is a, c, g, or t
gggaataacaactttggaacaaaaaagncccaanaccccaaagaactaaccctatttgtcccaattccatgaaacatccttaaataaaaacacnggaattcccagcatcgctccctgcccttttaaataaatgaaatagtttaaccatttggggcacattttttccccttctgtacgtggatcacatatttctgcttagctggaaaacattttgtcagttatcaggggcatagctgtggccctggcttctagggccgagcatacccgctcataacaagagttgtgtttcttggagggtgttgcttcattggactcagtagagtcactaactgtgatggggctgtctcttgcaaagacctcagtggactctctccataagcaatccacagatattttaaaacaataactgttacactttggcctggaggtgtgtgttgcattgttgaaaatttgtctgctatttgaa

SEQ ID NO: 380046 - DNA, 441 bp, Homo Sapiens
  misc_feature (416)..(416): n is a, c, g, or t
atgcaggcacggagatgaagatactgcggggccactgcggaccagtgtacagcacgaggttcctcgcggacagctcagggttgctctcttgttctgaagacatgtccatcagatactgggatctggggagtttcaccaacactgtgttgtaccaaggacatgcctatcctgtgtgggatctggacatcagtccatatagcctgtacttcgccagcgggtcccacgaccgcaccgccaggctgtggtcatttgatcggacgtacccgctgaggatatatgcaggacacctgggcagatgtggactgtgtcaaattccaccctaattcaaactacttgggccacgggcttcaaccgacaagaccgtcccgctgtgggagcgctcagcagggggaactccgtgagggtttttcacaggncaccgtggcccccgttgtttttttt

SEQ ID NO: 380047 - DNA, 525 bp, Homo Sapiens
  misc_feature (273)..(273): n is a, c, g, or t
  misc_feature (454)..(454): n is a, c, g, or t
  misc_feature (463)..(463): n is a, c, g, or t
  misc_feature (468)..(468): n is a, c, g, or t
  misc_feature (486)..(486): n is a, c, g, or t
  misc_feature (504)..(504): n is a, c, g, or t
ttgaattctaggcatgtgactgtgctcctagacatagacaacagctaatttgatggtaaaagacatactgaggaaagttatagtttatttttgttccccacagttatcaggaaaaccaaatcaaatttaacactgagaatacagaaagtttcaccacaattctctgatttagctattccttttttggttttctctaaggaagtagaacatatgacagtgaatactgcagctacttttcacttcctcttttatagccatatattactgtaagtntacttgcttaagttccaagtctcttgatttaaacacatggatttgcttggatttcatggaagggatattcaagcctaatagaagtaggagtatctgataatctgccttctgagtttctaggcctcttagagtttactattaatctagaagtagtaatcaggagccttgtttttgtttgttnagttttgtnttagncccttcctcaccgttgtngggaagtaatagtaatgncctaatagtacttgggcttca

SEQ ID NO: 380048 - DNA, 456 bp, Homo Sapiens
  misc_feature (34)..(34): n is a, c, g, or t
  misc_feature (50)..(50): n is a, c, g, or t
ccaaaggccctaccagggttaagaaccccctacnggaagtgaacctgganagacagaagtagcggtagggaaaacagaaagtcctgaaatagatcacaaagggactcctagtaataggtaagagtggtaaagggagtaataaatggagaacaaaaggaataagaggctaaggtactgaaagaatcatctagatgaatactgtaatcactatacagttacaactataaatagggaatgggataaatgtagtggcagatgactacaaaaagaagtggtgagttagaatgattaatatgagagttaggctgatgctgtgaggatttttacaatctagacagataaactttatcagtcttattgctaaacataaggcttcagtgtgtcttccatttgtgatgatgctatgacccaacattaagcagctcatgtgctttcatgtcaacatacctctattat

SEQ ID NO: 380049 - DNA, 393 bp, Homo Sapiens
tgctaacaagagaaatttaaaggtagttttctttagtaataatttatgtaagtgtcctctcttgagccctagtttcctttttggcagaatgatgtcactgtaccagacaacctcttaggtttcatcccaaatctaaacttgtgggcctcttcttgacccatttgaagactctgcacttgggagtgatggggccccaacagtaggcagggaactttattttgggggagccttatctacattcatattactttatatccactcttgtgggttaaaactacactttctttcctgtgtccacagggggcttaaaatctacccccctggcttctctcggagggcatcaccctcccgcctttttcccccagcctttttcaacacaaaaacacaggggtt

SEQ ID NO: 380050 - DNA, 529 bp, Homo Sapiens
  misc_feature (425)..(425): n is a, c, g, or t
  misc_feature (448)..(448): n is a, c, g, or t
  misc_feature (458)..(458): n is a, c, g, or t
  misc_feature (468)..(468): n is a, c, g, or t
  misc_feature (495)..(495): n is a, c, g, or t
  misc_feature (509)..(509): n is a, c, g, or t
tgaggattaattgaaacattgcaagtacaatactcagcataaggctcagaacacagaacacattccataaatggtgctatgattggtcctgggatattgggtcctggtctggttggcagtgaaggcaaggaaaacatgtgtgtgggatatgctgacagtttaggggatgtcctagagtttcccatagttgtcccagtcagtttgatcttggtattatgcactaggctgtgtactgtttggccccagttaagattccaggtctgagaacatttttgaagcccctagatggatgggctgaggtgatgaaagaggtaactttgatatgaactatgcctcaataagtggggttctgcaaactgggggaaggcagggcttgaagcttgacagctttattagttccaaagagtgttttccccaaatatgantttaatttaattttaacccttantagcttgcantcacccaaanttgtcccccaattgaaggaaacaagancccgagaggttccntaagtggggatccagtgctt

SEQ ID NO: 380051 - DNA, 486 bp, Homo Sapiens
  misc_feature (60)..(60): n is a, c, g, or t
aaattaaacctttggcccaatatttagtttaagggattgagccctgaaagccctaccgtnccctgccatgaggtaccagacagtggtccacatatggccatgggagtccccatgtacagagggagacgctacaaaaagggagggactggagcagggccccacacttgtaaactcttttgtagtacttgtgctgtatgcacctgccacttatatatatttacagatcatattacccaggttacaatgaaacaaacccacacaacagataaacgacctaaagtgttgctgaaaagaagcagtgtgtgtggagtactccaagaaagggcagagaccatacttaactcacagggctctttgtcattcacaaggtcaaaacaatgattaatcagatctgacaggagttccaaatatattgacatgatctagaatactatttgaaaatatggatttacaactatcataaatgtttatgtctcaataaataac

SEQ ID NO: 380052 - DNA, 476 bp, Homo Sapiens
  misc_feature (364)..(364): n is a, c, g, or t
ttcactttataaacaagaagtttaattgactcagttccacatggccggggagctccgggaaacttacaatcatggcagagggagaaacaagcaccttcttcacaaggcagcaggagagagacagtgacagcaggggaaactgctgtctttaaaaccagcagatcttgtgagaactccctctctattatgataacaacataggggaaaccacccccatgatcccatcacctcccatcaggtccctcccttgacacatggggattacaatttgagatgcaatttgggtggggacacaaagccaaaccatatcagatgggtgaaaatgttatactaaaaatgcacagtctcttacaaactccctggntttcttttctgtcagtgaagtcaaatatctacacaacggccctggacaatgctacagggaggacacattaccttaatcatctttctgtcccacttctcagccacaaaggccc

SEQ ID NO: 380053 - DNA, 406 bp, Homo Sapiens
  misc_feature (356)..(356): n is a, c, g, or t
  misc_feature (370)..(370): n is a, c, g, or t
  misc_feature (384)..(384): n is a, c, g, or t
ccaaacccattaattatatagtttattgatctgcttggactttttacaataattaaataattatagatttaagtacataattttaataacatttaaaatgtaagcctcttttcattttacattagtcataaaagcatttgaatctttgtaaataatagtaaattattaacaaatatggagaaatcaattcagcaatctgtgtgaacacaagaggttttccttttacattttaaaaaatgccgaaaatgagatatcaaaattagggaaatgacatcttcttttcattagggcatggtaattattttacactatgtggtgacttccctaggatcacaacagcttaaaagagggttaangcccaaaacacaanaccaaccaaaaagnttgtaatggccccgtactaata

SEQ ID NO: 380054 - DNA, 166 bp, Homo Sapiens
aattctttaggcttgaaaattaccagagtgttcataataaggatttggaaaaggagtctattcaaccaagcagatctctgcctttctttcgtctttactatgaattctgaataaaatggagaacacactctcaatatgtagaaaaataaaattttggcaaaacaat

SEQ ID NO: 380055 - DNA, 498 bp, Homo Sapiens
  misc_feature (92)..(92): n is a, c, g, or t
  misc_feature (98)..(98): n is a, c, g, or t
gggtaggcacggtccccccgggtaaacggtaagtgttccaatggaacacccctactggaatggaattaaacattggaagcaaaaaccagaantaaaantttatccagacagaagcccgacctagcaaaaagagaacgggactttccaagcaacttatctttttccttttttccctctgaaaaaaatgttgaattatattatattatataaaaaccccattttggaaatctaacaggaatcttctgggctttatacaggaaaggtaggaaatatatttcttttttcctcccatcaatagcatacagcttcacattctgcttttgactgtggtaacatgccagaattctactagttacagtattacttagttctaaaaaacaggcctcacttaaataactggagttcatctgtagaacaagtagttacgcagtactacatgtttgtgcaaaaggaacatactggggagtactagagaggtacacacaaggaatggggtga

SEQ ID NO: 380056 - DNA, 446 bp, Homo Sapiens
  misc_feature (33)..(33): n is a, c, g, or t
  misc_feature (38)..(38): n is a, c, g, or t
  misc_feature (139)..(139): n is a, c, g, or t
  misc_feature (144)..(144): n is a, c, g, or t
acgtcccaggatgttgcgcttcgtgacccggancttcncggtgcttggggggcacatagccgtccctcaagcgaaatgagcacgggtttcggcgtcctggccggatagccattcgtccgcttctagggccggctccggncctgncgtatccgggtacagatcgtcctggaagaggtctgacttgcggggcacagtcatgatgataggttcacactttctttcgtgtagcttgtagaaccgggcgatctcacacttgctgacatccagtccccttttgggcatgaaacccatgcctcgctgcggctctttgctgctgaacgtgttcaggtagtgcacgaaaggcggctcgtcgggaatctcaaagtaccgaattgctttgtcgcccttgccacacaggtagacgatgctgaagtcgggatcgtaaaagggcaataggaccccgttgc

SEQ ID NO: 380057 - DNA, 310 bp, Homo Sapiens
  misc_feature (226)..(226): n is a, c, g, or t
ggcgccaagcaaggtcccggcctaaatgctgcctgtgcgggcgaagggtggcctgtgggcaagggctggagctgccccaacaaccgcggctctgcctcacgcccagtgggtgccccgtgatgtggcagggctggccttgagtttcctgcttctcacgagcctgcaccgccaagcccagcccctctggcccatctccacaacaccctgtgtggccgccgcttggggncaactgtgggccccacccagcctggctgaggggcggtggagagtgtccgcctggacggtgaggtcagctggcggctgctggcca

SEQ ID NO: 380058 - DNA, 387 bp, Homo Sapiens
  misc_feature (30)..(30): n is a, c, g, or t
  misc_feature (51)..(51): n is a, c, g, or t
  misc_feature (266)..(266): n is a, c, g, or t
  misc_feature (372)..(372): n is a, c, g, or t
tctgacctctgtgagtgaggctatctaatnctgactgcttatacttcaccntgtacagtactagtccacacaattcctatgtggagtgttgttggcttgattttgaagtattgtttggggttctctgtaaatcaaagttttatagaaatgtggctattctacattcgtttttgtttaataccagccaccctgaataacatgattttgagaatcagcatactcctaaagtagcccatcatatggcagacacctcaaggctaagaganatatgaacgttctcatttgtatagggtcatctttttgaaaatgaaagatttattaacacctgaaaaagataatacatagtatataagtaggatctaaggcacattnaattaggcaatttga

SEQ ID NO: 380059 - DNA, 707 bp, Homo Sapiens
  misc_feature (93)..(93): n is a, c, g, or t
  misc_feature (219)..(219): n is a, c, g, or t
  misc_feature (357)..(357): n is a, c, g, or t
acacaaccagctttctgcaattggggaacagcccaagaacccgacagctgtgcccaaacagttgaaaggtggtggctggcttttgtcttttgntgaagtcaactgtggctgaccctcctacattcctaatttatttagcatgtcggctcctagaaaagcatgatctgcagctgggtttgtcttcctctcactctaccattgccccagcccttcctcctncctggcattggggccctaactaatcaaacaaaggggagtaaaaagatcccctgagaatgcatggaaaaatacttgctctttcctgagcattatttattctgtacataaggtaagtaatccaccttttaaaaagaggtnaaaagtccccaggaaggcagtttttaatgacttacatctgatatttatgatacatatggcttttcatcccaaatgtcaaaagtgaaagaaaaaaaatagctattcatatggcaacataaggagacagaataacaatttaatatgcaatcaaacctcttttcacttaaactaaatgactagaatttgatacatccatgattggaatactattctctcctccatattaaggtgagaaatgttcataagaactcccagagggaactggctctgggacaaaaggccttggtgagtaactaaaaaaatcactgatgttctcttgcaacaagcaggtccttcataatcatctacac

SEQ ID NO: 380060 - DNA, 661 bp, Homo Sapiens
  misc_feature (23)..(23): n is a, c, g, or t
tggttggaccagcctttaaaccngagttgatgtactttccaaatatagctcattgatacttaaggcatcttcttggaatgtggcttttgaagaaaaaaattactcaaagcaaatcaagagttaacaaacctaacgtaacctgaggtttaatattctactatcatattttttagagctataacttttgattatattaaactgcctccagctgtactatgtaaaacagatttacttttaaaaattacagtatacctgctttgttctatatgtatatgtttaactcatgaagtggactcttagaaggatttgaaatggactctggccacagaatttgtgagcagacagtagtagtgataataataaaagaaggcaatcaaaatttaattttatcatgccctctcacaggtttgtgttataattgtaagcccatattacttgtgttagtagttttgtctctataggtaacataatgacagtggtgtaaagtttctgttcaagaaacatatgttgtaaagttactttatacaagatacctgccaaaggaaatggtcttactttcaaatgactttgaaagcatgtataattgcaaacagagcaggagaagactttaatcagaatttccttgtgtccttttcctttactaagtgttttgaataaagga

SEQ ID NO: 380061 - DNA, 429 bp, Homo Sapiens
  misc_feature (146)..(146): n is a, c, g, or t
  misc_feature (311)..(311): n is a, c, g, or t
  misc_feature (385)..(385): n is a, c, g, or t
agatgtttatgaggactgctacgcaagctgaaattaaggcaatataaacaaagtcaatacattttctgcattagaaatatcgcctggctttagaacaaggagatgcactggccttgttcagggctctgcagtcaccagccctgggnttctgaggactgcagcaacagaatagcgactggtacttgaagcagctcctgagtgataaacagcagaagagacagagtggtcagactgaccccctgcagaaggaggagctgcagtctggagtggatgctgcaaacagtgctgcccagcaatatcagagaagattngcagcagtagcacttgattaatgctgcaatccagaagggtgttgctgagaagactgttttgggaacttgatgantcccgaagcccagcttgccccaggtgttatccattttgccgccg

SEQ ID NO: 380062 - DNA, 494 bp, Homo Sapiens
  misc_feature (225)..(235): n is a, c, g, or t
ggatgtgtaggagtggagcatgaaacaggtttataaggctggggctgtattatcagcacagcaaattaaagaatgaaagaagtacttctttttacatttcagctccagcagccagctatttaaaaaatatttttaaatatcttccccaaagtttaagatgtgggaccatctacttgtaagaaacagtggcttatttcttcatttctcagtaatcattgtaaaccnnnnnnnnnnncttctccactctaacaaaagtaaaagaacaaaacttttgctgaggtcttggactccactacttgttagttatgttggcctgggacagatggcaggtctgtcggcagttcctcagtctgtaaaatgaagattatcattcttgcctctccctttgtcacagtgttgtcgtgaaggatcagatatggtatggaatgcagtcaaaataaactaaaaactagggaaagtgttaactatccgttgcccaccgaatttgaggtagc

SEQ ID NO: 380063 - DNA, 503 bp, Homo Sapiens
  misc_feature (99)..(99): n is a, c, g, or t
  misc_feature (121)..(129): n is a, c, g, or t
  misc_feature (403)..(403): n is a, c, g, or t
  misc_feature (410)..(410): n is a, c, g, or t
  misc_feature (449)..(449): n is a, c, g, or t
  misc_feature (493)..(493): n is a, c, g, or t
ctgatttctcaggtgactaaaaagctagcattctatgtattaaccttacaacagactctgtaagtttgagctttaaaaaccaaacttttgacataaccnttatttcttgtatttgcccccnnnnnnnnnataaaaggtgaataaaaagaaataatttaatatcaccattgtatggattcctaatcaagatttcacgttctcagcccctgagactagttttctttgctctctgtaattagagcctttggaagcaaagttgaaaggaagtatttccattctgttactgttttgtagcactttgtccatttattgatttttaaagtagatatttaggataccacccctgccctgccctgccccaaaaaggaaaaatgtttattgtcctgctaaatctatatgcctnacacctncaggaaggctggacaggatggaggcttcccaaaaacatngaggggatggaattaaatgtttagggaactgtggattattcttnctccatttct

SEQ ID NO: 380064 - DNA, 422 bp, Homo Sapiens
  misc_feature (406)..(406): n is a, c, g, or t
aatcttctgagtggctgggactacagatgtgcgccaccatacctggctattgatcaatttttagtttaccaaacaggcattatgttctgggtcccattctgtgtcgggttctcttttcactcggcaccatggctttaggatccatccatgctgctctgtgaacgccgagttgctttaactgcttggtgctccatgaggcatccccttttgtgtctctgtcctcccagtgagggaccccatcgtaccctactcccctcccacaaaggaagctgtagtgcgcgtcctcaggcgtgtccccatatggatctgctggcattcgtttgtcagtgcacccaggggtagaagtccttggtctcagtctgcagacgtcttgcctgaagtgcagccaggtgccccccccagagtnggtaagccttgttcca

SEQ ID NO: 380065 - DNA, 387 bp, Homo Sapiens
  misc_feature (289)..(340): n is a, c, g, or t
ctcagcttcggtgggggaccgtgttccctgagcttcatctgaaaccttcaaaaccatgaggacaaggctcccgtgagctctgagcatgccctcccagcgagagtcacactggccaccagccaggcgaccacagagggtaccgtgggctgggcctcggggagcaggctgccaagtgcaggggagggccgggcgcaggcaacaacagggagctccggtccactgggggcccttcgatcagtgggccttccgctttcgtcctggggccgctgtgcttgaagagaagccaagnnnnnnnnnnnnnnnnnnnnnnnnnnnnnnnnnnnnnnnnnnnnnnnnnnnnattaagaagggtcattgggccgttgggggaaagttggttaaagatta

SEQ ID NO: 380066 - DNA, 654 bp, Homo Sapiens
cattaatgccattattcataaagggtttgatgagcgacatgcatacataggaggaatgtttggggccgggatttattttgctgaaaactcctcaaaaagcaaccaatatgtttatggaattggaggaggaacaggctgccctacacacaaggacaggtcatgctatatatgtcacagacaaatgctcttctgtagagtgacccttgggaaatcctttctgcagtttagcaccatgaaaatgggcccacgcgcctccagggcaccacttcagtcattggtagaccgagcgtcaatgggctggcatatgctggaatatgttcatcttacagaggagaacaggcatacccagagtatcttatcacttaccagatcatgaagccagaagccccttcccagaccgcaacagccgcagagcagaagacctagtgaatgcctgctggtgaaggccagatcagatttcaacctgggactggattacagaggattgtttctaataacaacatcaatattctagaagtccctgacagcctagaaataagctgtttgtcttctataaagcattgctatagtgatgaatagtatgagtaactgatacatactcaactgctactgttccctttgaggaaatgtttacaggggcggccttttaacata

SEQ ID NO: 380067 - DNA, 224 bp, Homo Sapiens
  misc_feature (78)..(107): n is a, c, g, or t
ttcaaaacaaagcttattactgcttttcattatgtcttttagtaagatttgatattttatatttatacatacattacnnnnnnnnnnnnnnnnnnnnnnnnnnnnnngcaggaaactgataaatgtataagaatgttctttacctccacagggaaatatgtttaaatccattttcttgaaacatggcccttttggtatagcttttgttctctcccttttgattt

SEQ ID NO: 380068 - DNA, 595 bp, Homo Sapiens
  misc_feature (476)..(476): n is a, c, g, or t
  misc_feature (490)..(490): n is a, c, g, or t
  misc_feature (498)..(498): n is a, c, g, or t
  misc_feature (519)..(519): n is a, c, g, or t
  misc_feature (526)..(526): n is a, c, g, or t
  misc_feature (541)..(541): n is a, c, g, or t
  misc_feature (551)..(551): n is a, c, g, or t
  misc_feature (572)..(572): n is a, c, g, or t
tccttgaacttctcaggtttccaagccacatcctagcagggcatccaggagccttgcactgaacctctcagctcttttgactttcttctggtcataggtgttgggcctcccattaggtagaagtcctttgagcagacccgaaatggccaaatgagacatcatccaagttcctccctcctttactgtctcggctttttcaagcacccctttcacctctcttttctgccttttcctcagtctgtcaagttctttggaggaaagaagttcttggtcagaggtcctaaaaccaccaccagctgggggtgctgagaatggtgaggagttggacagtcccggggcttttttgaaaggggactttatggtcatttcccctgtttagggtgagggactaagaattctcaagccttcagtttcatccatatttcaatgtaagcagaaaagcacatctcaaagccaaatagaaatgattttctaantaaggcctattccnttgtggantcttgggttccctgggtctcnttaatantaattttaggggatngggcagtttnagtcagtttaacatcttttcntcagaaggggggtaattttcctt

SEQ ID NO: 380069 - DNA, 484 bp, Homo Sapiens
  misc_feature (27)..(27): n is a, c, g, or t
  misc_feature (44)..(44): n is a, c, g, or t
  misc_feature (62)..(62): n is a, c, g, or t
  misc_feature (68)..(68): n is a, c, g, or t
aggtaccctttagactgtaaacggttnaatacgtataacgggtnatttccacatccgaaccnacattnaaaaaaaattcggagatatggactggctataacactagggaaaacaagtggaatttcctggaccaaaactcattccatgggtcttcccgataaacaatctttacatatactgactgaagatatcaaatttctgtgcccacaaaatagtagaattatatcagaactacagcaaataaaactttaattataatacatttgcttgaaattaaggtgctattcatcatgcagtttttaccaagtgggcatcatgtcgggaaaccacaccctaccaagatgcttggacacttcccagtgaatctgctccaaactatacttttggtcaggaattagtacttcttccataatggataattgagataggcggccaccacacatcttcacaaactcaacaaaggcactacatgagacttcacatt

SEQ ID NO: 380070 - DNA, 352 bp, Homo Sapiens
aaaggggaaagctagttaaaaactaattaatttgtcaaatgtagcattcttattatgagtgtaatatctcatggagatttaaatatgaacgaaaggacttatccttctgctttttaaaagccccagcattactagatagtgtttgggcttgaaggccaaagctgtaaaatgacaaagttggtgattttcagcagcactcacctgagctgtgagcgcctgcacctgttcggtagaacccactaggaatcacttctctgtagggataagtgatgcctttgaatccagcaggcattaaaaatctgttctttttagttcattcaagtttttgtttccaggatatttctagcattgc

SEQ ID NO: 380071 - DNA, 417 bp, Homo Sapiens
  misc_feature (368)..(368): n is a, c, g, or t
  misc_feature (401)..(401): n is a, c, g, or t
aagggagcttaagctataatgtatgctgtgtgttcatccaggctgttgagcatacaaagtacaagatatatttaaatgtgtacatacatgcctaatcaaattcactcctattgcttttttcaatcaatcaatttaattcattttcttcaaaatcacagccaatagagccccctgggtgctcctcttgtatcccactgtggactctaggggttcctcacgactctggacataaggtacataacggaaggtaaattgtttaccaaggcattaaccgacccagtaggctgaatttataaatggaacttgttggaggggccagcagggatttccctacagtctttggatttatacatggcactcattcagtnggtacacagggaactggcattcaccaacatccnttaaaacaccgttagg

SEQ ID NO: 380072 - DNA, 434 bp, Homo Sapiens
  misc_feature (337)..(337): n is a, c, g, or t
  misc_feature (412)..(412): n is a, c, g, or t
  misc_feature (422)..(422): n is a, c, g, or t
tcatgctgctcaagcttggccccccagctaaactgtaagctcctaggggaagggaccccatgttagctttctcctgggctcctggtcagttccacgctcctgcagcctgtgtgtgtggacgctggggcatcccgtcccgtatgaccccacagtggctgcctgtccattgatttgttgtcctggtacctgggttcacagggtagtagatggcattgaagacggctgtggctcggaccagcccaagttctctttccgcgtggggccagtctggccgggaaatgtaggcagcagcccctcccctgggaccagagagcggcctgctcactgtttccccatngggcccagcgaggcaaggaacacagacacactggacaagcttcggcaggcggtgacagagctttcagagcaggtncttgcagatncggggaaggatt

SEQ ID NO: 380073 - DNA, 347 bp, Homo Sapiens
  misc_feature (330)..(330): n is a, c, g, or t
taaggaacaatattgcaaattactaaaattgtatttttataggctgtttgctctcttgtggatattgtgcctgtcaggattcttgaaggtaagttatgttataatggttaatttgaaatataattctggctgtgtcaatataaataacctcaaaaagctataagagatactcttatgataggacacttagttataattatccagaacatttgtatatagaatgattatagaattatccctttaggaaaatcaggggtcttgtgttgggtccttattattgactgaaaaaaagatgaatgaataaatgaattaaattacatagaaagaggncccttggcttacaactg

SEQ ID NO: 380074 - DNA, 443 bp, Homo Sapiens
gacttacactgacactgaccactctcacttctgctctttgtgcacaggagccattccttcctgagtgcctttgtcacagccacagcttcagtcagaggggtcagcatctgttggccttgacttgattttgcctatatgttgttaatgatgctttttaaaaactctgtaaagtcaggttatttccctcgctttatttctaggtaacaaacctgaatttggcaactggcatcataaacagaagcagtgcttcagctcccccaaccctccgacccatcatcagtcctagtggcccgacatggtctacacacgtcagacccccaagctcccgagaatcactccagctctcctggaagcaggtatgtgaagggccctgcaactagcatttgggttactcagggatggcctgtgtcccaagcaagccattcccaccttgagttctgtag

SEQ ID NO: 380075 - DNA, 289 bp, Homo Sapiens
agtgtaatagcagattgatatgttgcctatatttcctttcactcctgggctgcgtgcccagcagagaggtaagaagggacagacatcagggccaaccattgccccctgtagccctcccttccaatcttctgttcctaacccagggacattaaggccagcgaaaaattttcctccagagaggtattcctatttagtctaacactgtgggcagtgcccaagtagaggtggagaaggccatctgattcagggccagacatttgtgaagcgcttcaaatagattcatcttcaa

SEQ ID NO: 380076 - DNA, 540 bp, Homo Sapiens
gttaccccgggggtaataggttaaccctggtttggtatttaattagggtttccccatagtgcccccataataaaaatatttaaaaaccacagatttaacaataaaatccattatattattattagccaaagtgggaacaaataatgtgtagaaaattttgtgaggaacaaacataaaatttgattcatatggcctgtttgcaaaagtaggcttatttcagggggagtatgaaaataagcaaggcagactattatgagaaatagcctctaatgaagatctccatctctttagaataaccttgaaaagtaacaagaggaagtcatgaaatgccgcattatacagtagcaaaatctattttttaatacaaaggagaagaggaaaaaaaagaacacctctagtcccagtgatgaccactgatgactgtaagtcctagacacagagaccctaataatactactgcgattctgaaaagcattcctgacttgtttaacagtttggaaaagtgtccgaagtttaagtactaacgcactatgaaatgga

SEQ ID NO: 380077 - DNA, 587 bp, Homo Sapiens
  misc_feature (311)..(320): n is a, c, g, or t
actgacaagttggggattctagagtagaggaatcgtactgaaggagaatttgagctaggtgtcttcaagttacctataaactttgaggttttattaaatatgccgaggtttacaggtggaagaacaaaaagctaattgagtgaaacaaactggttaacttgataatagtttttgccttcctggataaagagaaatgagtattaagtgagaaggctatttaatgaagggctttaaaccacactgtaatttggtagattcagcagctttaaaaattggcataccttctgacatggaaattccctttaaagaannnnnnnnnngatgtagtaaagatgtgtgtgaatatttaattgtgagcatactagatgcagtattgttgattataaaagctgtgtattaatgcctttaagccccacggtaatcatatgaagtgggtagtactatttctgcttttcagaagaaaaaacaggcatagagaaatgaggttgcttgctcaaggtacctgagttagttaagtgttagggccaggacttgaatccaaccagcgtgactctagagccagtactattgatcattatatggtaaaa

SEQ ID NO: 380078 - DNA, 670 bp, Homo Sapiens
tttcaaaggtcttttccaattgaaaagagcacttacaaactcttaaatttggttcatcttagaatattgctgctaataaatctgccaagtccgtgtcctcagtctcctgctctacaccacagcgtgcttctctcgggcttcttgggcaccatggggattcaatgctatgcctgtagaggccgcgacagtattttctcttgccagtccttacatagtgcgctacttcagcactttctgcttctcattaccatggagacccaattatagacagagatgtgatctgtagaggctggcatgaccagtgctaagtccctgaagcttccaagtgtacatgaggtacagagaaaggaaagctagaaatgaaaagaaaaggaaatgcttcatgttcaggaaagctgcagggagaaacttagaaatggaagagagttcaaaaatggctaataaaaaaataggtaatgtggaaattttgtagcgaaggagagtgcctggtcgaagaaggttcttaatgtttgttaaacgttttcacttacatgttttatctttacagaatgaaaatagaaagtatgagttggcaaaaatactgtttcaaagatcccctaggcattataaggagacatgagaatggttagattccaactttgcatggatgtgctctaataaaccaaaaggg

SEQ ID NO: 380079 - DNA, 514 bp, Homo Sapiens
tggacacagcccaggcccatgtatcattagcagtaagagttggccggggcggggggcgctgttattcacaagaagaaacaaagggaacgccagactttcctcaggaaatcagagtttaagtcaagcagctcaccacaagatcttagcccttggtttctggtcttacctgtcatatttttggtggcattagaaaagataacttggggacttcacatcaatcaataattaattcaaagctcttagtactttccagagaatcacaattcaaatttacattagcccctcttgggtctccagagcagatactgcatcaaaaagtttccaagggtctggtttacaccactttcaaagtaaagcccattaataatggcagtacagaccctaatgcctacccactgataggcgagaagagctgagggatccggagcagggtgcctgatgggaagaggatggggttgaacagagacccactttgattcctgatggctctgccattagctgtggaaactcaggg

SEQ ID NO: 380080 - DNA, 709 bp, Homo Sapiens
  misc_feature (437)..(438): n is a, c, g, or t
  misc_feature (697)..(697): n is a, c, g, or t
ctcaaaagccctgtgcattcaaaaaaggcttggttgggttatttccagctgtactgtcgggaaaagagctatttctgtcttttaactctcaaatacaaagatactgctcagtgggaatcaaacattcctaattttcatttatttatcttttcattttaattttggattgggggggtatctgcgcagctctgttagacggagtatattgcatggtgctgaggtctgggcttctgatggtcccggtcgttcaagtagcaaacgcgctgcgcgaaaagctaaaggcggggtctttggaaattgcctgccaccccttcccaccaaagtactatctggcaatgaccacagctatggctgatgagaggagggaccaactggaacaatatttgcaaaatgtaaccatggacccaaacgtgttgagaagtgatgtcttcgttgannttttaaaactggcgcagctgaatacatttgacatcgccaccaagaaagcttatctggacatatttctgcccaatgaacagagtattagaatcgaaattataacatcagacactgctgaaagagtcctagaggtggtgtcacacaaaattggactgtgtcgagagctcttgggctacttcggcctctttctcattcggtttggcaaggagggcaagctctctgttgtgaaaaaattggctgactttgaactcccttatgntagtcttggaag

SEQ ID NO: 380081 - DNA, 586 bp, Homo Sapiens
  misc_feature (83)..(131): n is a, c, g, or t
atattattttaacataattctttaagattcataaattaatcggatctgcaaagatccttctgccaaatgtttataaatttacnnnnnnnnnnnnnnnnnnnnnnnnnnnnnnnnnnnnnnnnnnnnnnnnngttacatagcaatctccataatattcacaatattttaaattaaataattaaaatttatatttaatggtaataagtaatacaggttccagtgattggaacctgttatctttggaggatgtttttcagccttctacaggtgggggacattgaaagcttgcttccgaggggtgaccactgaagttcctatttgtcaccttgagtggccatttgactattagaactaagttatattcaaaatgatgtcctggttctctgtaaacttaggctggggtgcttcttttgcttaccctgccagcgtagccgcctcagcagtatgcacctgactgttcttggacttctcagctatgtgagccaatacattcctttttattctgttaagccaatttgaatttggtttctgtcacctgcaacaggagtcctgactaaaactgaatttatgaaaaagagatctccac

SEQ ID NO: 380082 - DNA, 656 bp, Homo Sapiens
gccgctgctgaagtccctgaaagctcaagtaggctaaagagtctaaacgggtcacttacatggctggcagtgcatattggctgctgagtgtgatgcctacctgacctctccatgttacctggagtgctcacaacgtggtagtttgtcccaagacacacaggcaaatactacaaagcttcttaggacctagccttggaggtcctagaatacgacttctgctgcatcctattggaaaagcaagtcattgtgaccagcacagattcaagaaatgggagattcgactctacctgtcaatgtaaacagcagcatgtgcatgcagggaggaaagaaattgagggcatcatcttgaagactatcatatcacaccattattccaactagtgaacattatgttttagatgggtagtactagctactcatctgtcctccagaaacccaagctaagcatggacatattgaagagaatgtcagcaccattaaaaaaactctagaaaaatcacatgtgatgactgaggttaattcagtctgtcaattacatcaatataattgccttcttgtagccctaagtatggtgaagcagaattgaattctacaaaagtctttcatctgttttcctatggaataattaacaaacccaataaatgtataaatagcat

SEQ ID NO: 380083 - DNA, 764 bp, Homo Sapiens
  misc_feature (13)..(13): n is a, c, g, or t
  misc_feature (43)..(43): n is a, c, g, or t
  misc_feature (289)..(289): n is a, c, g, or t
cgttggcttcatntgagtttgaagttaaaaaccaagcagggancagagaatcaggtcttcagtctccctcagtctctgtctcctgacactgagcctttcagatatcgaacatggtgtctatcaaagggtgcaaacttaggtgtcgacaggggcaagtgatgtgaatgaggctagggtcagggcccgagggaatgcacagactctcccgaactagagagaggcagccccgtctgcactcctcacccaagtggaccaaaccaaaacatctgtgcaaaacatgctcctcccnagactgccagcttcccatccctgattcagacaggcagcttctccatgaggatacacgggctggatggaaattgacttgtcatcatctctactgcccactataatcacgatccaagtggtcgtattttacacatgacccgactttaactaactcggcatttttatctcccttctgagaaaaacaatactttaaaactattgtatttgtccacatttgagaaatgcagaaatttttcaaaattgacttctttactttggaggaacacaaatggggttttaaaagtaagggtactgagtgacttccaaggttgtcagatctggaacatttacataaaacagagacagaagtggaaacatacaaagaactccatctggaggtcttgtgagatgactgggacattcggcaactgtgagtggctctgcacccaagtggaacttagtaagtttctcttgtggataaatataaaaacttaaag

SEQ ID NO: 380084 - DNA, 464 bp, Homo Sapiens
accttattaaaggggagaggagtctggagggaatgccacttggcttcactaccaaaggttttatgacttagcattttaaaaggttttccttttaccaagaaatgcagaaaccaagagcaaaccccacgtaccagatcactgattcctactgaagcagctagcccgagaaaggactctctcatactggtcttgggaaatgacttggcagcctgagccatcccagcagtggacaaggatggttaattcttattctgtagacgtccacaggaacagactaggatggaaaacacagttaagcacagccatgcaccctgtggctgtagaaatgcccctgtgtgaaagaaaaataaattcaagactggagttttggaggaaaaaaaatacaagtagcatttacaacagctctttgctctttaaatttcttaccattcaataaagtgatccagtcactcacatttgaactg

SEQ ID NO: 380085 - DNA, 671 bp, Homo Sapiens
  misc_feature (11)..(11): n is a, c, g, or t
  misc_feature (63)..(63): n is a, c, g, or t
  misc_feature (649)..(649): n is a, c, g, or t
ccaggacacanaaatttaattgtatttctatttgctagcaagaaatgaatagaaaccaaaaanaaaatcttattttaataacatttagaaatcaaaaacctaggaataaaccttacaaaagctgtgcaagacctctggactaattttttaaaaattattgaagtagacaaaacacaaataaatggaggaatataccatgttcatggattagaagacctgactttgtaaagatgttccttctttcccaagttgattcataaattcaacagtattccagcaaaattcaagcaggattttttgtcaaaattgacaaactggttttcaaattcaggtggaaaatccaggtaatcttgaataacaaagctggaggacttatgttaccagatatcaactcatgctaaagttacaaaaattaagacagtgtaatactaatgaaaagaacaggcaaactaaccagtagaaatcaatagagggtccagaaacagaccctctcctaatttatgacaaatgcaataccgtaatgtaatgaggaaataatggtctttcaaaaaaagggattgtgtggaatagatatccatatgagagaaaaatgtatctggtcccctattttcatcatacacaagaaacaattccagattaatagtatctnccatgtaaaaggtaacaatcag

SEQ ID NO: 380086 - DNA, 481 bp, Homo Sapiens
  misc_feature (13)..(13): n is a, c, g, or t
  misc_feature (357)..(366): n is a, c, g, or t
atgatgcttttcntatttacattctaaccaattgtgtcatgtgatactaatttgcagaataaagcatgttttgcacatatttccaagtcatataacatgcagacatacttcattttgtaaatatcttccttctcttactataagattgagaataggtaaagagcaacctctccaatgcaggtgatgagtgtgatttgcactatcactttggacagccaattggaatatttattgaagtcatagatgcccagcaattctgttactggatgtgtctcatagacaaactcttggacattcttatagaacactgagcccaaagaagacacatcatataatgtaagaagctaggacagcttnnnnnnnnnnggcctagatctgtgtaattgtgtgagtgttctcggacatactgtttgtaaaaaatcgagttattgagtagtttgataatatgataatcatgaaaataaaggataaagcagcgagt

SEQ ID NO: 380087 - DNA, 576 bp, Homo Sapiens
agaagacagctccagcaacgcagctctcctgctgtctctcctcccctgcccctcggactcctcccacccctgtccctctgtcccaagcctggaacctcaagaaggtatcttctgggtaactgaagtggataaccaaccgatcaggaagttccaagggccttccaagccccttctggaatgaagaatgcggagactcgatttccacctagaaacagagtcccacccctccctccttctcctcctggccccgggggtgcccagtgaagggcccaacagctcctagggcaccctgaccttcccccaggaagtgggagagaccagcggtaggaattgcaaatgacgttcattaagcaggatgctaataccatgaattacaaatgaaacccagatgaagaggaccctggcagccttacctctgttagatattaattgggcgacactttgttttaatggtacgttaattaatgcggaatttcgacggaagtcctcgtgacactcacattaatacaaacgaattcattactgtcggtgttattacaagaaatgacaaataaatctgtaacagtgggacccttc

SEQ ID NO: 380088 - DNA, 378 bp, Homo Sapiens
  misc_feature (37)..(37): n is a, c, g, or t
  misc_feature (366)..(366): n is a, c, g, or t
ctgctcttctcataattctccaatactgattattttnaccgcctatcagcccccatcatatatctgtgaataacagaatttcaaggttagaggtctattcaaaaaaggtgggttcttgcccataaggaaggaagagatcactttaggcagttactgataatttaaaacttttgtctttcagttggtgcaagcattcatttattcacaattttaaatcttatactctcgtgcaattacagagggtcaaagaagtcaaagcttgctccagcttctttatactttcccttctgcatgcttgcagataaaactcagatttgtgatgccaaatttttgatgtagacagtgtttggaagttgctacccctgnacttacgaattg

SEQ ID NO: 380089 - DNA, 731 bp, Homo Sapiens
  misc_feature (402)..(402): n is a, c, g, or t
aaggagtctgagagatattttaggtcacattatgtgacttttctgcctcactggcttctcatttagaataaaaatcaaatgcctacacccccaacctctttccttaccactttcttccctcttatccctctccagccacagtgatctactcagtgttcctggaacctggcaggagaatccttggtatatagcattttctcttcttacaacattttttctcacggataaatgtccttctctaactttctgtaggtttctgctcaaatgcttccttatccctgaggctttccctgatcaccctctataaaaatggggtgggtgcacacaccttcactttttgtacattaccaaaaactataacaggattcttgactgattttgtatattcggtaacagtgtgcnagtacataaaaatccttttttaaaattgctgaactaatccatatttatcaccatctgacatactctagatttctcttcctgctggaatgaaaacttcaagaacatagaagagcgcctggcgcccagtaattgctcagtaaatactcagtgaatataaatgatctactctgaacttttagtgtgttcctttttactaaaagcttaatagtaaaagaccacatcttaatcaaaggttgttacttaccaccctcttttggcagttctattagcaaatgtccaaggtgattttttaaagacatgtaaataaatcgttttacctcttttcatgc

SEQ ID NO: 380090 - DNA, 680 bp, Homo Sapiens
ggaatccgttttccttttctgcccccctgaatggtcgatggggtcttccctccctggcaatcacctcctcactcctttcctagagatgcttggtgggaaaggcatccttttctcttagttctccctaacatgctatcccctgaagaactccaggaggacaatatataaatttaaaaatcaagtttactgagattatgctttatatacaataagatgcacccattttcagtgtatagtctgatgagttttggtaaatgtttatgcatatgtagccaccatcactacctccctatagactattcctatgattctaaaaagattcttttgggagccttcctactcaatccccaccatctccaggcaaccactgatctgcttcccaccattagagattagactagttttagataatagattaggtcattacacttttgaggagaaattctttttttgctgctgaccagcattcactacatcaataaaaataaatgctaagctttgggtttgtttttatataagaaatgacgaaaaatgcccatttgtaagaattgtttcttccacttcccaccttaaagtaatgcaacgtttcagggcaaaattgccttcttcatgagtgggtttgcagtactgattgtatctttcacaatatctgttgaaaataaattcctccttttaaaatt

SEQ ID NO: 380091 - DNA, 729 bp, Homo Sapiens
  misc_feature (312)..(355): n is a, c, g, or t
cagtataccatttaacagataatgcaagcaattagaaagataatagttagctgtgcctccttctttagtctaactcttgactactataacctttatgaagtcatttgacttgtttcttaatggtagtcaccagaacatatgggtgagtgtgagaatgtataaataaatgctaataatatacagttaaaagcctatagaagtggaaaatgggcccaacttgtcactggtgagctttaatccagcctaatttcttttttttaatgtgttaaaaactatttcaaattatacactgtatgtgttcttatcctgaannnnnnnnnnnnnnnnnnnnnnnnnnnnnnnnnnnnnnnnnnnncttgcttccagaaagagaccaagaatgataagtgttaaaggggaaaagtttaaaggggggaaaagttactgtagttttctaccacattttaagacctatgggaataaagtttattgctatgctaatagtttactaggaaacttagaaagaattatgtatagttcagtttgcaaataaaatatattgaaagaaacatctgaaatattcttccctaaactgcaaaaaatgacgaataaacaagtctctaaaaaagggaaaagacctcatagttaccctccttattactaatttgaagttttaatggcatttatttgacacataatattaaaaaaaattggaacacttattagatgaatcatttgagctaggagaga

SEQ ID NO: 380092 - DNA, 752 bp, Homo Sapiens
  misc_feature (586)..(586): n is a, c, g, or t
  misc_feature (726)..(726): n is a, c, g, or t
cactcctgcagtaatggtactagttgattcatgagagctctgcctctaagagatcccacctcccaacaccatcacaatgacaattgaaattcaacatgagttttggtggcgacaaacattcaaactatagcaatatattgaattatcatatcaaaaatatgcctttgctctcattccttcaataagttggacagggcagtagaaatgaattaaaatttagaaaatccttcttacctgaatgtaaaatattgtaaaatttaggtttagcaggatttggcccttgtctctaatgctataacagatttagagattgttccattcagagaaaccatggtattactaagaataatgaaatacttacttaagaacatttctgccattagcaggataaagtttgattaaaaatctaaaaagtattttcttgctaattgaaaggagatatcaaatcctaggcctaatactttagcaatgttcataaaatccctgccaagatttggcttcccccatgaatcatgggaaactgtgatgtgctaagtctgaccttagaagatctatactgatctaagtgattgaaaataaactttgnttttttaaatttaattttggccaattgacttcctgtgtttcctatttatgtatgtatgtagtatgcattttgagagaaaaaatggagaaaattttaaggattatttttaatccaaaacaatcagaatcttcaatttcagntccaaaattaattaatatcagcataa

SEQ ID NO: 380093 - DNA, 642 bp, Homo Sapiens
ttttatttttggcagctgttgtaaaggggaaaattctgtacctgttaatccatcttgattggaagtgtaagcccatgtcattaaaattttaggttaagaaaaaaattattttttgttcttagtctaatgtgaactgaatgcctgagagatgttgtgggcagttaattataaagtagtgtagttatgttaattctgaagtcattagagaagatgagaagataggatgcaatgtttattttatccctgtaactatagcttgataagattgaatcttagaattagggtcaaaagctgagctatatcatgtagcgttttattttctgcttagggttatttaagaaaaagcatcctggaaatagttaagacccttttaaaggagagcagattcaaataaactcctttgagaggattatctctccttgcacatacagagtacgtaactggtaggctgtaccgcacagacagactgatctacagcttgtctagcaaaagtgattcaatcttgtgatgacctgccttgcaaacccaaacataattcattgataataatgtcacatattcctgtgataattgaaatagttaaggctatatttgtttaacattgggacataattatcttctaataaagctaaagtttctgtt

SEQ ID NO: 380094 - DNA, 818 bp, Homo Sapiens
  misc_feature (135)..(135): n is a, c, g, or t
  misc_feature (137)..(137): n is a, c, g, or t
cctcatttcttatttattgacagtttagaaggaataatttgggtcaaataaccaaccctcttgttttttaaactcaaactaaaaatagagttaaaatcaagatactacatacccacatacacggacatagatttntntttcctttctattcatgcctggtcttgttcattccctagagtcttagccaagaatgtttgaaaggactagagggtgtcaaagcttagccatttattttgactgttcttgaatgagatacattatacactaataagtgagaatcaattaagcagaaattcggtctgcttaattggtacctcctagatttggctcctaggattagctgtagttttggagagtgaaatcaccaatcctctatgccagtgtccagttctcacaccatgtataaatactggtgtggtctagataagcaaagggtttgaaaactggtaaaaccattcattgtacctaaatcagttttttggctaccatactacttggcatctgtaatctcaaagcatagtatcccctgtgctcaaactgaagaggaaattaagaaagtattgcgctgttcattggagccacttaaagtaattggcttagcttatctggtttgacttttccataaagatgaaattcatgtaatttggtaaatccttactacgattatacgttgatgataatgtcttttccttgaatatgcttccattcttaattcatgatgatatttttgactttgtaatgattgatgtcctttcctcaccaccattcaccaagtggggcaaataaaaaggaaatctgcaaattttccaaagaaaggc

SEQ ID NO: 380095 - DNA, 502 bp, Homo Sapiens
aattcggaacgaggcttaatatataagggagttaataataaagctaatacattctgcttataatgtgctaggcactcttgtaaccactttacaaaaaccatttaagttcttataaaatagaaaaagtaccaatatcccatgctccaatagataattgatagaagaaattctaataatcaataaacaaattatatttaacttcacagtacttaaataattgtaatttaaaatgtactaagattataacctatcaaaaaaaatggagattgttgttactgattaacaccagttgttggtggcacagtgaaatggccagtttcttgtattgctagtgggagtgtaaattggaaaaatctttctagagagcaattcagcaatatgaattgaatctcaaaagcatttatacctcttaatgctattatgctctcaggaatttatagcattgacatgatcagaggtgcatatgaaaatgtagatgcaagaaggtttatcaaagctttgt

SEQ ID NO: 380096 - DNA, 485 bp, Homo Sapiens
ggcaattgagtgacaaccaataaataagttggaagatattttgaaaagtgaaatttggttttaactaaaaagataatttctctctttcttggtgggaattaaaagcccatacatgtacagataaatacaattttacaaatcacctgatctgacttgcttttaaaccatttcaatgtggctgtttagcagaaggagcccaatggatccatgctgcccaccatagtcatcagcccaaaaccagtatcctcaagaacaacccaaagtatatttggccacatagatgctgtctgctttgaaaacaaaggttgtggaggacatctttttgttgggaaaagattgttgtataattagtagtgacaagaacccctgtggtaatggactaatttctcttcttaaaaattgagaagaaatggtgcttgtatactatatagggaaatgagatattggccaagagaagaatttttgtgatggtaataatgattcag

SEQ ID NO: 380097 - DNA, 705 bp, Homo Sapiens
  misc_feature (692)..(692): n is a, c, g, or t
cagttttactaattattattcagtcttaactgttgtttcaaggtgtgtaagtgatatcaggtaactattggattctgaaaggccccctggaaataaattatattcataaactctatagaaaccacacataaagggagcaactcgaagagggtagaagagggcttttatattaatcaggaaggaatgttgatatgtaatggtccagaaataactgaatggagcacctttatcctgacctagattgtagatttgagaacatttagtttacagatcatatgctggtgagcaataataaaatttgttaactatgtagataagaataaatttccaaacaattttgacattttgggaaaatagtctatggaaaaaaacaagataaagaccatgggaatgagacagataaaagataggaaaaaagactggcctggctctatgcattgggaacagactccaaaatatcagtgagccacacttgatatctgtgagcagggttatgtgatattattaatgaactaaccagagtgtgccatgaaagcttaacatactttaaagtatttgtagagagaaaataataaacactattagcacatagttccaagcacccttaaggaaggtactatttactcacattgataaagtcttatttaagctatttgactagaaaaggtatgtggtagaggagggaaaagtgnttttattataact

SEQ ID NO: 380098 - DNA, 210 bp, Homo Sapiens
ggcacgaatcatcactgtgctctgaactgaggtggaggaagggtccattctactggtgacccagcaactgagcctgagccagtgacacggcagcacccatgtgaggaacagcgagctggggtcatttcacctcctcctaggggaaccccagcaagagattgattgatgaacataagaattaggggctgggaggccgggcgtggtgctcag

SEQ ID NO: 380099 - DNA, 728 bp, Homo Sapiens
  misc_feature (74)..(86): n is a, c, g, or t
  misc_feature (140)..(239): n is a, c, g, or t
  misc_feature (411)..(411): n is a, c, g, or t
aatcgtactttttaatggaaacatccaaaaatttgtcacagaattttgagacccattaaaaaagtttaatgagnnnnnnnnnnnnngcaaacctgcctctaatttgtctgctccaccttggaaagtgatatcttaaattnnnnnnnnnnnnnnnnnnnnnnnnnnnnnnnnnnnnnnnnnnnnnnnnnnnnnnnnnnnnnnnnnnnnnnnnnnnnnnnnnnnnnnnnnnnnnnnnnnnngggaaattaacagaatttatcaaaatattaattggacgtaatcttcaatttagcagtttcactaataaatattgtagagaaatccttatatgccacaaaaaagtatgtacaataatactacagcattgtttgtcaatagtgaaaaaaatggaaacaaaatgaccatctatcnaatgggaaatggttaatggtatatctattactatgagatgttttgaactaaagggttagccattgaaagagatccaagattttttaaagccaactgcaaaaaacatacagcattatcaacttttgtcgaaacaccccaaaattatatatgcatgcatgtaaatgcattgagaaggctttcaaaggatataaggctaagtgggggaaagaaacttattttctcctccatatatttctctgttggttaagatttatatagctattattgtcactgaatacatgttaaaagaaaaataaagacagaaaagtggtttatta

SEQ ID NO: 380100 - DNA, 434 bp, Homo Sapiens
cattgttcatttgggattcaaatttaactggatgtcctatattttatctggcaacactaactagttaacagtcaaggatcctattactaatcgagggtgaaggggcacagggaggaagggtgaccactgaaggacaatcagaagtctctgccacaaagtgagacccctcaaagtgggtggcaataaatgttggtcctctcttccctttccctgtaaggcaaggcaaaaccagagggtggctgcagggataactgctggtagagccaacatctgtttttgaaatagaaccaatgttctattttaatggctagtttaatcacatgagatgcatgtacttggttaagacctcagagatctctgctgtatgcatgaaagagacaactgtggcctgaaaagcaacattaataaaagcactgcttctttttaatcacaaa

SEQ ID NO: 380101 - DNA, 808 bp, Homo Sapiens
  misc_feature (140)..(164): n is a, c, g, or t
  misc_feature (186)..(212): n is a, c, g, or t
  misc_feature (223)..(244): n is a, c, g, or t
tggaaccagatgcagaagaggaaatgatggaaggacttatggtatcagataccaatatttaaaagtttgtataataataaagagtatgattgtggttcaaggataaaaacagactagagaaacttattcttagccatccnnnnnnnnnnnnnnnnnnnnnnnnngatggagtcttgctctgttgcnnnnnnnnnnnnnnnnnnnnnnnnnnnctcttgtctcnnnnnnnnnnnnnnnnnnnnnngaaaatagattttaaggcaaagagctgttatttaatataagatacaatttcaaggcaaaaatcattactagtgataaacacattcagttctaattatattcagttcattggtaaaatttttcaaatttgtacgtacctaatctcaaatattatcaatattagaaatgaataggattcaaaagactaaggatattagaagtaactttatacatgcgaaattttggtaaaattgacaaatccatagaaaaattcgacttgcaataataaaaaacaaacccctgaagtgtcttaaaactgttaaaaaggaattgaacctccaaattaaaatattttcattatgtaatctccaggcccagatagcttcactactaaattctaccagtcaatcacttaataaatggacgagtgtcacgattccagagaatacaggagaaagcttactcagcttattttgtgacaccagcagtagtcttgatactaaaattcaacaaggacattagaaaaatgaaaattatataatgattcttgtgttacctttcaaaaataaaggaaaaatcagctggg

SEQ ID NO: 380102 - DNA, 842 bp, Homo Sapiens
  misc_feature (138)..(138): n is a, c, g, or t
  misc_feature (253)..(253): n is a, c, g, or t
  misc_feature (477)..(487): n is a, c, g, or t
ccgtatcaggagactgaaagttcatactaatttacaaactttgtaaagactggtgctgttcattcatattgggaagaaccctttcttttgtgaccataggaccatttttcaaaatgcgctttcttcgtagaagaaatngttcagtttaattagctttggattttaacatgtttttctgaatgaccagatgtaggcttagccagtttattttctctaatttaatggataataaatattaagctcttggggaaantgtttttcagccattgaaaatgttatgaaaaagccttgaatatgcatgctgctttcatttttataaactttttattttttaactatagctttattagtaattccaaaatgctgcaatgtagctgatttcctcactcagacagctggctttgtgggtggcttttttcatactactgttaacttttttaaaaaagaagcaatgtaaagaccgtaatgcactaagcnnnnnnnnnnncttttacacgtttaaaaacttcttaaagcactctgtaatataatgattaaattgctcccttttataaacattgctaatgtggtctgagttttgtttgacaataattttaatgttctcaaaatttgaaatgtcaagtattagaaatgaagcctttgaatatagttgtttcccttgcaatatgttaactctgtgtagctgtatataactattaatttccctcatctcttttataggcctgataaaactcttctctgacgtttgctagcttttaaatatatttatttgacagagcaaaagaaccctcttctggttgattgtgaccttgaatacaaaataaaagtagtgattagtagtt

SEQ ID NO: 380103 - DNA, 232 bp, Homo Sapiens
  misc_feature (215)..(215): n is a, c, g, or t
ataactgctaccaaatggctgcagtttttaattctttactttccattttatggcctacagcttcatacaaaagtgtgagtgccctctccagatggactgtgcaactcatttgggaagaagggcagccgattttcatcatctgggcctttaagaactctctaggtagccctaaaatacataaaagtacaaatggcctcgtgccgaaatactgggcntcgtagggccaaaaaag

SEQ ID NO: 380104 - DNA, 359 bp, Homo Sapiens
  misc_feature (12)..(12): n is a, c, g, or t
caggcttaagtngttgtggggaccaactctcagagactatttcctaaatgttgactctgcctcatgcagtggatgttttgagaatgcttctggcttcctcaatctctgtagctgatacatttgcttgtagccacattgaggccctggcacaggaaagctactcagttcttctcaatctggcccagtcatcttatttctgccattgccctatacatttgaaatcttaaatgttctaaatatcttaaagcaatgaaatagattcaagtgtttctaacttagaaaaagtaaaagagagagcaaaataatacagcttttaaatcacctgtattctatacgaattattttaaaaagaaaatact

SEQ ID NO: 380105 - DNA, 296 bp, Homo Sapiens
agtaggtttcagagtgattcattcaataaacacttactgaatagctaatattgaatgtacaaagcactgcattagatacctacagtttcatgggggagacaagtccataaacagagcccaatctgaaggtcattccccaaaaataaggcagttcattcaagatctctgaaatggttctcttcaaattccagctgtgacctgacaaacatttctgacattattcactttacctagatccttgacttcattaaaggcatacaacggagaatattagatgaggaaaaaagaaattgtcc

SEQ ID NO: 380106 - DNA, 769 bp, Homo Sapiens
  misc_feature (16)..(16): n is a, c, g, or t
ccaagaaacattaatncctttatgagtcaatctgtaaaatttcctattgctacttttgtgaggagaaataatagagaaacaccaaaaggccaaagtctagctccaccccgctctttgtattctcctcactgcccacctcccagcccccaccagtaattataaggcattgtgtattaagaggtatgatgtggcttccttcatccatgattaacacttacaccaatgcatattcattcatctcttagccctaccaaaccctgctaaaatgaggacttgccaataaggaagtcacacccattagaaagttaaccacagaaaatgagagaaaaaatgaagggatagagcaaattaaggatgccgagtccctccaatggttattggccttaatggtgttataaaaatgatgtcggcttttaccaggaataatttatattctgaattaaataaggatatgtatctataaatccattctataaaacttaattttccatctagataggctgattactttgggctcggcatacctttaccggttgttaattactgcgggatggtttaacactattttccaaatcagcatgcatgcataaaatgactgcaatccaatttgacacattattagtgatgattattgtcatagataaattagattgaacagaaaataaccttcatccttagcatgttttagctctcagaattaatgtgatttggtgaacacatataaataaaaatctgacgagtccctgctgactacagggcctgttggtgc

SEQ ID NO: 380107 - DNA, 586 bp, Homo Sapiens
  misc_feature (18)..(18): n is a, c, g, or t
  misc_feature (527)..(527): n is a, c, g, or t
agcctccctggcacaggnctggcaagtacagcctccgcgttgcccaggtgctagctgcagcagccttcaagcaccggctgacttggctatgatggctccactgagactcgtcccgaggagacgtctacaccacggggaggccccagcgcgggaaggggctgcttccaactgtccccacctttccatctgcctgaggcccacctgccaggcttcctgccaggcttctttacacccccacgaggtacaaagtgctccacacggtcagcatccaggaaccgctcactgcactcatgagcgaaggaaacctgctgttttgtcagaatggccatgacgtgaaataggaatcgctgcgacgtgattgatgatgccctgggaactggaagttgaaaggactgcaggcttctgacgtgccacgcagacgactttatggaggcgaagcacgtgtcttctgctcagccactaactttggccagggctccagaggtatgtgtgctgctcatacattttagggatgtgctaaaaccagngaaacctacagattttctctcctagacagcacgagtctcatcccacacgaggcccggga

SEQ ID NO: 380108 - DNA, 691 bp, Homo Sapiens
  misc_feature (591)..(599): n is a, c, g, or t
taaatttggaaaaaagttacatatacattaacattaacaaaattgtgtgggcaaggatatggaaagcaggactcttgtggattctgaggggggttataaactggtagtctctttagaggacaggtaagccatgtctcaacattttaaatgtgtataatctctgacccagcaggttacacatctaagaagagaaatgaacaagtatacaatgatataagcagaaggctgatcaatacatcaacaagggaaaactagaacaatctaaaaggtcatcaaaggcataaagtatggtgcctctaaaagatggaacattaggcagccagtaaaatgatcatgtaggattacgcgtatctttccaattcccgcagagatgtacaaaacatatttttccattaaaaaagactactatatacaggcaaaccaatttatttaaaattttgtatataaattcttctatatccatagatagatttctaaaagtatgttcaccaaaatattaatagcagtcatttcttggtggtagaagttggatgctaagttctatcattatgttgttttatacggatagaaatttttttcattattatagtnnnnnnnnncccaaaattttaagtgttcgtatctcaccaaaagtagcttaaaattctttcaactccctattttaagaaaaaagtattcactgaatgttgct

SEQ ID NO: 380109 - DNA, 818 bp, Homo Sapiens
  misc_feature (29)..(29): n is a, c, g, or t
  misc_feature (410)..(436): n is a, c, g, or t
  misc_feature (669)..(678): n is a, c, g, or t
  misc_feature (758)..(758): n is a, c, g, or t
tgacttgtaataaataccgtctacctggnaagtcagtgtgttacaattagaatgtgaggattagaagaaactaatataggtaggactaggaaaaaataataggttagagtgataaagtaaaaattttaagaatacatgcaatagtataaaaatcaaaagatataaaaagattatgtatcaaatataaagctcttatcctctagccatctgattcccttccttgagagtaactagaatagtttcttatgtcttatttatcttttaggagtagcctatgcatttacaagtgtatacatacttttttgtctttccttgaataaaccaataaaatacttatatccttttgaaaatatacaaaaggtagcagcatacaatacacaccatttaccattttacatcttgcttcccgnnnnnnnnnnnnnnnnnnnnnnnnnnngccttaatctttcttgtagctgctttgttgtttttaaagtctatataatatttcattgtatggatgtaccataatttatgtaaccagttttttattgttggttatttaaattgttttcaatattttgcccttacaatcaatactgtaatgaatatctttgggtatatctgttgaacacctatgtgaattatgtggaataaattctcataagtagaatttcttgttcaaaaggnnnnnnnnnnaattgtataaatattgccaaatgcaatagaggtttttaccagttaacacttccaactaataatgggtgaataaacctttntcttaaataaaactgattctacaaaccgagtcttaggagaaaataaaatttataaataat

SEQ ID NO: 380110 - DNA, 503 bp, Homo Sapiens
gctctggtatttggtggggccttgtgactggtgctggccaatgagttgtgaacagaggtaatgtatatcactcattacccaggctgagccaatgtgcattcccccagaatgcactgtgcccctctgccatgctccctggcaatattccagaaagttcccgcctgagtcccagaatatggatgacaatgacaagcgggctatcacctcagcttctggtgatagatacagagtgtaagaaatacactttcattatcttaatccattaagatatggggtcattgccataagagtgaggaagacagctagttttgaaggaagagaaaggacaaagcttatgaagggatttctggggtgactacctatgctctatttcccaaccccagtgctggttacagggacattagctttctaataatatgataaatatttgttttgtgtgggtttctgtatctttttatttgacatgaaaaagttacaaaatgtttaagggttattaccacacc

SEQ ID NO: 380111 - DNA, 535 bp, Homo Sapiens
ttcgttatttattgctgtgtaacaaaataccccaaaatgtagtgacctaataaaacaaatatttattatctcatatgggtaaggaatttaggaagagcttaggtgggtagttctgatttagaatctctagtagccagaaatctgagatggcctccatgactcctgactcctagtattcaaacctttacgtaaacctcttttaatcaatagaatatggcaaaagtgaaaggattttccagatatgattaaatctctaatctattgtctttaagttaatcaaatggagattatcctgcataggtctaacctatttggatgaatgaccttgaagaagcaagcaaccatgaattctacagttgcaaggaaataaattctgtcagaagcatcttggaagaatacctgagctccttaaatcagcgaagcttagccttaatttagccctgtgtaaccctcaacagagaatcctcttaagctgtgtctgaaatcttgattcatgaaaaacataagataataaatatatgctgttttatgccca

SEQ ID NO: 380112 - DNA, 597 bp, Homo Sapiens
ccaagaaaaaatactttttactacaccgcctctcctccagagggtgtttttgtgatgtggcttatgaaggcagcattcttgcctcctgaggatgcaggtggtgctagcggcagttgatgacagaactgattctcctccttgggttgttccgtggagcacatcaggatgggaactgaggggacccaggagtgtgatttctttatagctaataagccctggctttggagccagacagcgctggatttgaatcctggctctggtacatattagcttaggtgatgaagggtaagttacttcaactttccttgcctctgttattcacattttcaagtctgctatataagattaagatgagaaataaagcatataaaatgcctgactcattgaaagtgttctacaagtggtagttacgaccatgatgtaactcattttacttagcctttctttaattgtatgtacttccctgaaaggccatgaataaagttcagatttggatattgaatcatattttccacagacttcaattcaggtttcagaacatattcccaaagtaaacgaaaatgctgccactaagactagataaaacccacttcagat

SEQ ID NO: 380113 - DNA, 972 bp, Homo Sapiens
  misc_feature (100)..(115): n is a, c, g, or t
  misc_feature (754)..(754): n is a, c, g, or t
  misc_feature (757)..(757): n is a, c, g, or t
atttcggcacagcggttctctgagttcggtggcacttgggatattccacttcagtgccatgggaagaaaatggtaagcaaaaagcaaaaggaataatgcnnnnnnnnnnnnnnnnttataatgttgtggtatccaattgctcctgcttcagccttttatccaaagccttgagatggatctgcctcatccaggaagttttcctgcttcgttagagtatcttcgttttctttatcagacgctggctggcactccacgccggtgcacggctccatggaatgcctgctgttggacacttgcagagctctgccaccaagcaacctcctgcattggaaatcgggggactactccaggatcttatgcgtgcttgctgtttgaagctgcagaaaagtgaataatcaattaagtattgatttcttgtaagatttggtaaatttcaaaggcaagacaaagaggatgggcttaaggaaacactgcagggacttggcgtaaattagacaactaaccggaagcgcagaataaaataacacctcaactgaagaattccctggaagaattagcactagctattggaagacaatggtggatttaatcaaaacagcaggcatgcaagaattttacccgtgaaccagaaaaaggagctaattataaccacctttttaatggagctaatttgactgaatggatgcaaatgtgctttatttatggatgaagaagcaagccttactgcatgatcttgggatcatcggatctgctnaantttgcagctcctgttaccttcagtacattttttatttccggagaaggtatttgtatgtaaacaacaactaaccatgcaaaagattcatcggaacaatatactgtggtatatgagatataatcataattttgcagcctctcaggatttcctctaacttggaggttttgcaacctttgtgtgcaatgggttatggtaaacaataaatgaatgatgct

SEQ ID NO: 380114 - DNA, 747 bp, Homo Sapiens
ctctgtagccaagtcattctattttggtttgcatggtcttttctaagatagatagtccactttcagcacaagagaaagaattggggaacgctgttgaaggattcactttaccaaaccttactgtgtgacaagcatatcatgagattttataaacatatttctcatgtatattcacaatttctgagatgtaaatggcattaactttattttgtaagtaaagaagctgtggctccagacaaataaatggctcaaggtcacacagcttgctattataataagcatatattcaaaggggagcaaagaagaatggagaggaaagtaatgtgttttctttccttccaggtttcagcattactttggtgttactagcctatctaactttcttttgccccccagatgtttcagcactgctatactgtagttagaaatagtagaaaagtgcaatcatttataaccaagtcagagataagatttaaaacaaacaacaaagagtttgtatatggctttatgtaactaagaggtaatgaaattcacatctttcaagatttaatgtgaggagcagagcctgagctgactcaagccactgatttaccagcccctcacttctccaaagcgtggaccagcccagcacccaaccccccgaggagcagagcccaagtaggtggaatagccatacaaatctctacagcctaagccattgaggcacacacaggcattgctgatgttgactatagctgaagaaactgt

SEQ ID NO: 380115 - DNA, 295 bp, Homo Sapiens
aataacccacctacagaaagacattcatgttcatggattgggacaatgtttagatgacaattccacccaaagtgatcaacagatgcaatgcgccccttaccaaagtcccaatcacattttttacagaaacagaaaaacccatctgaaaattcatatggaatattaaaggaccccaaatagccaaagcagtctttgaaaagatgcacaaagctggaggattcatactttctgatttcaaaacttcctacaaaactacatagtcaaaacagtgtagttctggcataagaacagatgc

SEQ ID NO: 380116 - DNA, 770 bp, Homo Sapiens
tataatccagttttagcaaatgtttgacaatttaaaatacttttgaaaactggagatttaaaaaatgtaaacaattgtaggcacagcaaaatcgtagttttcccttctgatattatacatttggcatctctctacagttatattaacataaataaggcagctaaaacgttcaaaaatagttttacaacattcaattttaaaatttcattcaagctgtaatcttttgtttcctgctgccacctaacatttgaagttttgattcagggtaatgtccaaggtttcttaaacataccataataagtattactattccttaacatttatcccaggggaagagataagggaaaggggtagctgggcatgatatttacagtgtacaaataatgatccattgccagaaatgaaaactcacctttccaccagcatttgctcagcctcaatagtgcaatgcaacttggtgctgataaaaataaaccattaaaaccaaaccctatcatgcaaggagtgagtttgaagatatgtacacaaactcaaaaatctgtaaactttaggacatttttatttttaactgtattttctacttttcatccaaacatttgtcatcatggactcagaagaatccaagattttgatctagatttaaaataactcaaacattacccagggatttttgtttaaaaatgcttttatggggatttttattttggtatattctggcacttcctggaatggcaggtctagaagaataaagtccaaagcacagggttatg

SEQ ID NO: 380117 - DNA, 1006 bp, Homo Sapiens
  misc_feature (450)..(450): n is a, c, g, or t
  misc_feature (556)..(556): n is a, c, g, or t
cttggtgattaattattgttctttcatggtttttctcttaaaatcatccagttgatctataaaaatgtattcaacttattgtgtggaaacaccctgagaagaacaaagagaagtttaaataatgaggaccaggatatctgcaaccaaaaagcaatttgtgcttcattaattgttcacagaaataaagtatgtggggagggggacaatatttgaagatttaaatggtcactgctactgctgcatttcttgttcattcaaagtaaaactagataatatttgtgtaagcagcaccttgttggttggataactgagaaattaccataatttaagttttggtttgcttgaagtttcaataagcttagggtcattctgaagcattaccttgtcatgaattttaaagataaaattcatattgatgatgatgataataacatccacatgtattagttntaattaagcaaatagaatgtgcaagtactatattaaatacttattcacagattacctccttcaccttcaaaacaatcctatacaaagtaaatgctattatcttggntttgtagatactgatagcctgtatttgttgagttctaattatgtgttcaattatcaacatcacaatgagatagttaccattttctagaaaagaaaatccaaacttagagtaagaaagtgatttacctacatttccatatgtagtgatattggagccatgactctgactcatttgtaatttaaaacctcatgttcttaaccacagtgctgtggttatcatatatattaatcagtgtaagtaaatgtaaatgctttaacagagaaactttgaatttcatcagattgacaaaataaagtttacattgtttactcatgttatgatccaagattcaatgcagttgaaatgttgaaatgttgtctatcagtaatggaatctgaggaacagacttaatcggagtgcccaaagacaaaaatgtaatagatttgatataaataaaacattttatctgcc

SEQ ID NO: 380118 - DNA, 404 bp, Homo Sapiens
gggtttcacttacaattctcctttcatatgacaatatcatatggattcagttattggtggccttataatatggtcaggagagcttttccgcttcccaagcccctgcccactgttctttttactgcctttgttggctatcctcagcatttgaagtttgtaataatttaatccaattaggagttaaaattacattaaatttacatattaatttggggaagtttgacccacaatactgtcttcccatctgagaacatcatatcattttctgtttggatcttatttatatctttagtaagatttgagagtttaagttctttgcctttaaaaaatttttaatatgttcttattttggtcactattgtgaccattttcatttataagagcttattacaaataaagagagg

SEQ ID NO: 380119 - DNA, 671 bp, Homo Sapiens
gctttctgacacttccagatttatgtgatatacattgtccatctgagtattttactctgcacccttagatttcaatctgatctcgaagtggttaaagagatgaattctctgtcccctacctcagctctcctccccagtcttcaagaaacttgttgtaagtacacatgagtatgagcaatgatggagtgggaaatgaatacttatgaactgagttaagagcacacttaagtggatgattttattttccttcagtgtctctgtgaactgaaagaaggtaagagcatgaaaggcaggaaaaagagaatagccattctttctaacattagtgccatgacacaccaactgcaagccagacatctagaacatgatacaacctgcgattaactcataacaatacgtaatactaacactactggagcccttatatgccaagtagtgttctttacataagtaatttatttcatcctcacaccaattcagtgatgtggatagtgttcttcattttgcagatgagaaaactgagacacagagaggtcaaagtattttgcacaacatcacatagctaggaagtgtctgaaataggatttgaatgcagataggcagatccagagttcatgcttttaattaccacttccccaccccgcctcccaaaaaaactgaatgaataagag

SEQ ID NO: 380120 - DNA, 605 bp, Homo Sapiens
cctataacgttatgaacatttatcctcactcactccacagctcttgctctcagattccagcacatcactcagtcattaaggggcagatgtggtatgccagttgcttccatgtcctcatgtgtcagattcctattcattcatagcatggtgtttaagagtatgggctcagggatccagactaccttgctttgcaacttggctcctcctcttgatggctttctaactttgggagagttaccttagcctctctgtgtctcggttttaccactttcaaaatacacgcatttcctacctggtgagttgttgcatggaaagatagaaggatgacccctgacacactattggtgctcaagaaaatttagccattgttaaaatataccacagcctgggctattgtattctagctggggagagactttacacaagtaacgctatacataaatatgtatttcaactttggagagggctataaaagacaagaatagggtgttacgggaaagaattcagggggaatctaattcagactagggcgttagcaaagacctctctaaagagggaagacctgtctaaaaattcaggttgagacttcaaggatgagaaggagc

SEQ ID NO: 380121 - DNA, 513 bp, Homo Sapiens
taaaaaaactaattatacaaacttgaaagggttcaccttgccctagcaaaactaggattgggacacctttttttccccctgaggatcactgacaaaaaacactgcaccagtaaggaagcaactaaattttgttttgttctttgaaaaaggctaacctgagctaggtaaaggttatatcattcacttttgaaataaaccatcgagaacacaaaatgacaagtgagttaggttgggctgatgggatagaaggtgggaggggaatgctatacagctgggaacagcagactttctctgaagggccagatggtaactacattagggtttgcgggtctgatggtcgccatcataactgcatactcaactctgccgttgtagggtaagagcagcactcgatgacacagaaatgaatgcgcatgactgtgttccagtaaaattttattttaattaaaatcaattcatgtttgaaaaaggatttaaagtagcttctaataaaggacatgtgtaatgaaactt

SEQ ID NO: 380122 - DNA, 615 bp, Homo Sapiens
  misc_feature (204)..(245): n is a, c, g, or t
aaaccctagcccaattcttccccatctcaacccctacataatccctgcactcttatcactgaaggaaaaagcagaggcaaaggtaaatatagaatcataaaatctcaagattagaaagggctttaaaagacatgattgctgaatattgatttactcactgcaattaactgaacccccagagagagcacgctcccttcaacttcnnnnnnnnnnnnnnnnnnnnnnnnnnnnnnnnnnnnnnnnnngcaactataataacaagcctccccattttaaagacaaagtttactactgtatttggttaaatgaatgatgggaatttttcttctttgttaaaaatgttttggcttataaatgtagtacttcacagagttgtagttctgcaagagaacttttaaaaagtgggcaaagacctttcagtacattaagtacaaatgtttgttagttcttgattgtaactactctggcataatcaaataacccacatttttaaatggaaaaactgtagtatgtttatttaatgccaataagcaaaagtgacagccttacatttgcttatcaagataaatttcttcaagtaaaattttttataataaaggtatctcctcagataaa

SEQ ID NO: 380123 - DNA, 429 bp, Homo Sapiens
gcagagagtaccttggtgagagtgaagtcctgcttcctggtgcacaggctcttgttcctaaagaggaagaaagatcacacccgagaatgtgtggaagcagcagtgcagtgtgcaaagcaggggaccctcagcctgtctcctgggctccatccaagttgcttgtcttgtctgtccctcagtttcctcatctgttcagagggtactacaataatacctacctctgtaaattgctgcaatgaattacatgaggtatttcctgtcaatctccttgaacgattaattggcacagtgtaaacactatctattagttcttcattctgatgtttctaaattaacacaaactaatcttatgctgtttctaaattaacacaactaatctaaatcttgatgctgcctgtcatactaataaagtatttgggcatatttcaa

SEQ ID NO: 380124 - DNA, 695 bp, Homo Sapiens
  misc_feature (47)..(47): n is a, c, g, or t
  misc_feature (672)..(672): n is a, c, g, or t
  misc_feature (681)..(681): n is a, c, g, or t
cacttcaggagccaaaacaatttgacaactgttagtctagatgatgntgcactttcatcccagctctgaaggtctacggaaaccccactctcccttctccacatatactcataattcctgtagtctggagccttcatttggcacctacaccccataaatcctgctttgatttgcctggcactgatgtggtcctgtatctggtttatctcccccactaagctgtgagttccttgaaggcaggtcttcattcattttataaacacagcacacatttattgagctccttctgccaccatgctggatgatggggacactgtggtgaatgagactgacacagcccctccctcatggagcaaaaacttcgtggatgagaaagattgagtgaagcaattacaaagttatatgtgctgtaacagggaagcatagggtgctatgggggcacaagggacggcacccaggaagatagagggggcaggaagcttcccagggacagggaaggaggccagccttggctgagggagctgcatctgcagagacctggagggtgagggaggggccaaggccatagacagggagcaggcctttgagccctgcctggtaaggagccagcattttatcctgggcccctgatgacgtaaccgtggggtgacctgaacagtttttcctgcctgnggaatcctnctctttgcctaccc

SEQ ID NO: 380125 - DNA, 606 bp, Homo Sapiens
gccgcctgccttcccctggggaattatcaatatatcaactctcaatttttgctcttccacaagctctacttgcagtgcttgagcatgtcacataataaactaccttgaattaattgaagatactttccattaatctttaataggctgttatgataatgtggtaaatcataatttggagatctgtctcagaaaaaatattatttgaatctttactcaccttacacacaaaaaaacagtatatagttgcataccaaacccaatttgtttatctgataaagcatttcttaaatagtggtttgtaaaccagatgaacttcagggacattcatagtcatcaaactgttacatgcccactgaaaatggaaaagaatggactcttgtattacagcttaagtaatggatgccttctttttgtttcctattctgtgttcagtgctttaattgttcttgaaatgttttccacttgtctattttaattcttgtgagtactagaatagctttggccttttaaaacatttgtttattttttttctgagaatggctaacacactttattgaggttcgaaattaataaagaaaataaaagaaatgtatcttcattcattct

SEQ ID NO: 380126 - DNA, 433 bp, Homo Sapiens
  misc_feature (422)..(422): n is a, c, g, or t
agaaggcagtctagtcataaggatgctataaagattatgtgaggagagcatatgtaaaacacttagcacagtgcctgacacatacagctcaacagatgctacggagtggttttaatggaagtattagtactacaagaactcctaaaggatttcaggcaagaacactttaaaagaaattgatatgattcaaattcatatatatatggatgtctttaatgtcaggattttagaaacatatctgttacaagcggaattcattagggtattttcttaataatgataacacggaagctctcacttaccgtgtcatttactacactcttcccatcccaagcccatcctcttttggtgaagtaattaacagttgcaaattcaattagggcagagaacacaaatgcataacaaacagcaataaaccagtnccaggcagttg

SEQ ID NO: 380127 - DNA, 422 bp, Homo Sapiens
cctgtccagcaaagaagcaatcagccaaaatgatacctggaggcttatctgaggccaaacccgccactccagaaatccaggagattgttgataaggttaaaccacagcttgaagaaaaaacaaatgagacttatggaaaattggaagctgtgcagtataaaactcaagttgttgctggaacaaattactacattaaggtacgagcaggtgataataaatatatgcacttgaaagtattcaaaagtcttcccggacaaaatgaggacttggtacttactggataccaggttgacaaaaacaaggatgacgagctgacgggcttttagcagcatgtacccaaagtgttctgattccttcaactggctactgagtcatgatccttgctgataaatataaccatcaataaagaagcattcttttcc

SEQ ID NO: 380128 - DNA, 643 bp, Homo Sapiens
ccagaggcagttatctggctaggtacttcatacatgtttttgaatgaataaatggattggtaattaattgaaagtatacatgacatacttactaaacgtacttcatctatgtgagggagaaattctcaactgtatacagagaaggacttaatcctctgaaacagaccaactcaactgagtcagcctggacttggaggctactgtcagttgtgttaggctcaaggccacaagctcaggtgttctgaaaactaatatttgccatgttactctggagcaaggttccaacctcaatatgtcacattaacatttaataaccagtgtgttcaaggcctcctagtttatccatcaatgaaggctctcaaagctttaaagagacaatcttctaaaccacaaaacacagctatccttctctcctccatggccatcatatgcccattcctttttaatcctctaagcaatgtacaaggtctagaatttctatttctctagtctaaaacgtatacccatgtctggatttgagatgtttgcacatttgtttcttaggaatacaggatgtactcagactactgtagccttcttgtttctcatctttaatatgtctgaaatgtcttctataatatatgcaaataaacactgtaaaatg

SEQ ID NO: 380129 - DNA, 548 bp, Homo Sapiens
  misc_feature (40)..(40): n is a, c, g, or t
  misc_feature (79)..(129): n is a, c, g, or t
aattcggcacgaggaaaaaaggaaaaaatgcatacatagnatatacatacatataatatacatcctataaaagccattnnnnnnnnnnnnnnnnnnnnnnnnnnnnnnnnnnnnnnnnnnnnnnnnnnnttgggcaagcatgtgccatagaagaagcaagagactgataaaatatttaacaatcagtttggcatggaaacgaactaagccaagtgaatgctagctattaataaccagtaagcaatgcttttatataaaaaagagattggaaaggtgattttaaaagacaccagggcttgctttttgtccttacccttctaccccaggctcttctgccttccctcttctctttccctttttaccctccctcctttatgtgtctactctttcctctctccttggcccatttttcccttctcttttccctctactcctatgccattgtgttgggggaagtcctcaagaccatccccaggttttatgattttctagaagggctgagaactcagcatttaattatgactcaattactcatgactgtgatttat

SEQ ID NO: 380130 - DNA, 971 bp, Homo Sapiens
  misc_feature (673)..(673): n is a, c, g, or t
cggcagcctgctcgtgggagtagaggacagcggcctggtgcagggcatccgctgcagccaccgtgacgaggaccgcgcacgcctgctggtggactccatcctgcagggcttcaagcctcagatctttcccgatgcctacactctcaccttcatccctgtgatcagtacctcggagaccagcgtccccctcaaggtgatccgcctgaccgtgcacacccccaaggcccagagccagccgcaactctaccagacagaccagggggaggtgtttctgcggcgcgacgggagcatccagggcccgctgtctgccagcgccatccaggagtggtgcaggcagaggtggctggtggagctgggcaagctggaagagaagatgaaggcgctgatgatggagaaggagcagctccagcagcagctgcagcagcacgggcctgtgtcctgcacctgctgtgtcctgtgagggccctggggagcaggcaggacggcacggcactctccacctgagacccagggatttcctgtttgagtgtaaggccaaccagtaaagcccatgcgggctgctgataggcggacagggactccttcaacatggcacatgagcaggcacccatgtggcttcaaccctgacagacccatctgtgtagccaagaaactgctctcagccctgtccccnaaatgaccttactttcagaaagaatgtgtaaaaccctgcccagagctcccctagggctaagctataagggattgtccttctcccgtaaaatgctcatttggcccaggctgaggtctgtgactccagttggctacacagtgccagaaaggaatctgtcatctcaggaaagcccctcaaagatggcgaggcatatttgatgactgtggttacagggcaagaggccaccctgcagcccccacccctgacttgctggaacttgtgactgtcaaagctccattaataaattacatgcacctgg

SEQ ID NO: 380131 - DNA, 651 bp, Homo Sapiens
agatagagtctggctaggagggaaacatctatccatctctctaatctttgcccatcacctcctgttgcaatgagttcccgcaggtgacatacggactggcctctctactgtactgggtgccatctcccaccatactctggcatttttatataaaggataatttcttgtacctgagtctaaaattacaacgttatcaaaattcacttcgtttttcctgcattttaaaagtaataaaatattatttgagattattttgaaattaaatatccttaaccaatgattaaattcataatcatttcatcttctttcataatcatttcatcttctaatctgaatttgttttgaacacagccttgcagaaaagcaaaaaatatttccccgctcaaattttgccgacattttataccagtatccccttcattacagtaaactaaatcataacttacatcatccattactagctgatcataaattgttagtattttaaggtatgcaactatgtgattgacatctgtaaggctagtttaatagacgtgctaaatatcactgttctgaatatctgtgccatagttctgatacccttattggaatcaaggcagtgctgtttctgtttacaagttatcaagataagagcagtggcatcacatttgg

SEQ ID NO: 380132 - DNA, 583 bp, Homo Sapiens
  misc_feature (42)..(42): n is a, c, g, or t
ccgagtctggtatcaacagataacacgccagtctccccaggnataccactataatttaatacatgcaaagtatccatctaatttacctgttactgatgaggaaattccaaaagtaagcttctcatcatagcaaatcctgaagaactagcatttaagctatttcattatggggtgaaaaaaatcatcatttagaaataaaagtaccaattagtaaccaaattatgtacaagtcactctagcacagtgtatttcaatcacttcagtaatttttagcctcccaaaaaaaagtgtcagaaatgaggcatgaaaagctattaaatgaatcattcacacgttgaatagatgttgtcgtcagtttgttctctcaatggaaataatgaacaactgatttatttataactggtcattatgataatacaccttcgatgttccacccttttcaatatattatggatatgttataactgtcttattttatagctgatctaaaatcatatgcttccattaaaatttcttcttttccaggctttcccttaattttaatgttcctttggcttggggtgtaattaaaatgtttttactg

SEQ ID NO: 380133 - DNA, 569 bp, Homo Sapiens
tgatagaaagggaagttttaagatatcccagaccctatagccactggtgaaaaacaatcctggatggatggtaaatatgaccaggggaagagttaggtttgaccaaggtttggattaaacaactatatttttgagagatggcttttcaggaagatcagggaatcctgagactggatagttagtggagggtgggactcattccacagaaatcgaaagttgtgatcatggagtttgcaattgggaagtaagagaccccagatttggagctgtgtcctcctgggatgatgttagatgttggctctctatgctgaatagtgaagctgtggataggcggttgctgggttgagggactgttgatttcatgttcgaaaatatcttcaggtggtccatgtaggcctggtgtctgctgcctccatctttgaaggaacatggaggagccctttctctgtaggagccctaagtctgggttttatcttaaaagaacacaccagtcattctgggtctccccttattgccattgccaggggagggtcgtctagtccttaagcataaacactggctgtcttcct

SEQ ID NO: 380134 - DNA, 595 bp, Homo Sapiens
tctggcacagtaatggctacacatttccttttaatgtcagtgtccctctctattacccttatatatatataatcctccatctttgctatgtctgtggattcagaccttcctttaattactaattcaatttatattcttcccttgtgcctttacagatataaaattcaggccctttggtcttctgaaaagtagaacatttacatctaagtttttcttatcactgagactgggattcagataatttacataaatgttctctgggtttctaattattttacataataaataatttgcatcaaattacttgtaaaaagcatcataaattattcctactacccctcccctaccccaatcaaaagtgtagaaagtgaggttcaaataaatttaagcaggctggccagtgagaagggtgagccaatggacttgaatcttttaagacttgctcttcctgcttccccatttagtgtcggaatccttagagctcaattttgtggttaagactgcaggaaaaaaagccaaatggccaatctgattccccacagcccacacatctcagagacccaaaactccttttaattgtctttaaaatggcgcc

SEQ ID NO: 380135 - DNA, 685 bp, Homo Sapiens
  misc_feature (489)..(489): n is a, c, g, or t
ctgggatagatacaaagtattgaaaattgaaatgtggaaaacatgccatgtcatctcaatcatgattttctagtgctttatgcatttatgttagaggaaatcttttttatgaggaaaaatacaaagtactaaaaaagaatgtgctttcaatgaaagaattttcatgactcaattagaaaattcacagaataatacaagtagaatgtccacttagtatggctgaaaatagagaactgtcttttctgacaccttcacagtgaaatgtctggaaattttctcctcagttgtatatttcttcccaagtttttgcctttccttcctgttctgccttaaatattagttgaatgcccactgcatgcaggtgctaggcagaggaggcagtggtgaaaagtcaaagccctgcccttaaggccttccctgccctttaggaatgcatggccctttgctttccatgttgtaaatccaactctcatgttcatccttgcttcntagagtatctgttcctgtcttctgcaaagcagggctataaatgggaagctgggaaaagagaagggggcagaaaaagggaggaaacgaaatagctcactagctcttttccgtgtgatgaagactagcaattctatttattttctcaccgtttgtcaggggtagagttcgtggtagaagaagattttaaaactccgcc

SEQ ID NO: 380136 - DNA, 668 bp, Homo Sapiens
gtgtgagccaccatgcctggactcgttgttgttgttgtttttaattagtgaggagctacaagaacacatttataaaaattaagaggaaacagccccactgcatttgagaaggttaccatttccttcgaagttcctgctgttgccccttcctggtgggggagacactgtcctgtttcagtcattccgttgctttgctttatagttttattaatgtgtttgtgttggctttgcatgttttcaaatatatgaatgaaatcatgcagagtttattcttttacagtttgccttttcacttgattatgttcctgagatgtatccggattattgtgtgtagctgtatggcattccttttccctgctgcctagtgatccattgaaaatacaataattgatttttctatgtggctccactggtcatttttctgcccctgtgccctttgggaatcatctcctaaactctagtctcggcccttgctcttccatgtaaccttgagaatcagcttgtcaaattccccccaaaaaccccttgagatgtagaatggaacccagctgaatctatagatcagtctggataaaatcagcacctgtgtaaaattgaattttcccattcatgagcagggtttatttctgcactcaatgttttcaataaagttgtgtaccttttcccat

SEQ ID NO: 380137 - DNA, 773 bp, Homo Sapiens
  misc_feature (33)..(33): n is a, c, g, or t
  misc_feature (763)..(763): n is a, c, g, or t
acacaagtggatgttttccttgcttgttgatgnagtaggatatggttgggagcaggctgtttcagggtttcagtggttgcttcaactttgcagtatgactttgcttgataaactgtcttttgatggttggtcagtgatcaaataaagagtttataatcagagtgaattaagacaaaatataaaatccccttttaaggatttttttaagtttaaatatttattagtctgaaatagaggcagaaattattttgctcaactctatgactgtaggattttataatataacaagaatgaaataatgaaagtctttaaaaattgctttataacttgtctgttacatatgtgagctaattgttatctcggtcaactttattaagactaggataatgttgagtatttcaaagaaaattattgtttacatttaataaaaatgcctttcagaagaatgtttttttcttaaagaaaggtttcttttaaaatggaagtaagccagtgattttcttcattgttttataatagatttcaatttagacataaagcatatttgtgtaggcaaaatgtaaaatgcctatttaattaatgtcaattttccccataaaaacttttctgtatatgtcaaatatctgaatatctgtacacgccacacatattcacagagaataatacttagaggtaattactccattaatgtttctctttcactctctttttgaaaatagggcccaactgttctgatttgaagcagcctatgtacttgggattnaaaaagatgt

SEQ ID NO: 380138 - DNA, 796 bp, Homo Sapiens
  misc_feature (478)..(508): n is a, c, g, or t
  misc_feature (740)..(740): n is a, c, g, or t
caatggtaacagacatcaagaacaagatgtacaatccctggaaagcagatgaaggttaagttgctgtcctgttcacctgcccagtctctgtttcctgaatttccttccatttacagcaagaagcccattcatttatcctgaagctctcagtacttaggtgcttgtccttcttggtataagtcaacttggtgtacgtttcatttgagtgacagctagaaaagctccactcaatagtcaccttgattggaggcagaggccaagtcacttgccacacccaagtcaggttggtaaagatgcccattcccctccttcaaacctttttcttcagagtatttgatatgtgaatagcctaatgaggactctcttatccctttctctttacctcacaaatctccctccgacttctggacactcacctcaaggaggctgcgtgtgtacatgcatgcagaggaaagcccaggtgtagaggggctgacannnnnnnnnnnnnnnnnnnnnnnnnnnnnnnaactcctagcgattgaaagaaagataaatgggagctactggtgtgagtgggacaacacaacggaaccgtgggatgtctgaagacactgtgctcactcaaggaagcgtgaaagagaggaagaaaattggagacccatagaaaattaacattagataaggattctagatggtttttttggttataaatacttagagctacttggttttagcctgatatctacaagttaatctgntgagttccagataaaaagaatactggtaatggatttagaagagaaatgaataaaag

SEQ ID NO: 380139 - DNA, 596 bp, Homo Sapiens
  misc_feature (181)..(233): n is a, c, g, or t
tgagccaccgcgcctggccgacaacatgatttttaatagtgaaactattaaaacaagatagaaaattattaactactaaatttcaacagtctataaagtaccacagagatgaggaaaacgattggctttaatcactgaacaaatatattctttgattagatgaagcttgttcttatgttcnnnnnnnnnnnnnnnnnnnnnnnnnnnnnnnnnnnnnnnnnnnnnnnnnnnnngaaccgcagttcacttactatgttttccaagtgctttacccatctgggtttgtccaatacctccctcaaaggatggtgtccagacttgaaaactgaaaaagataggagctgaccctaaagaatttaaggattgttccctccattattcttgaaaaccgctgttaaaacagaatccataaccttggttcaatttctagaagtatatttgcagctctggcaagatactcttgttgccgagtatcaatgcccatccaaatttttgtatctgtctagatgcagtcccatgctgccctttgtgtgttattcctgaggactacagaattcctacagcattttgtaccatgcatggctcttacttttttt

SEQ ID NO: 380140 - DNA, 608 bp, Homo Sapiens
  misc_feature (203)..(234): n is a, c, g, or t
cctctatatcttaaattccaagtatgtttaaatttgctagttgcattatactgggtcatgaaaaattatcccttgaaatagatatgaaacatgttacttcatttctggtttaaataacttgtggaatctttcctaatgacaacctgatattaagggaaactaaagaaaatgttattgtggatcccacagtactatattacacnnnnnnnnnnnnnnnnnnnnnnnnnnnnnnnnatttaaagcaaacctcaaacattattgggtatcaattaccacctggttgtattgaaatagtaacttatcaatgccatgtaaaaattaattccattttcgaagccacctggcagacaggtttagctgtttcatcagcagcctaatatatactgttaaatttgttaaggatttcactttgaaggatacatgcaaaacatatagttactattttcatgagtcctgcttctagctccattgtggaatacagaaaattaaatatacctgttaagttcgtatctaaacctaagacattaccaaggtttgtacaaattctactacctgacatttattccaagaagatctggaaagctaaataaatttataaatttaataac

SEQ ID NO: 380141 - DNA, 478 bp, Homo Sapiens
  misc_feature (54)..(54): n is a, c, g, or t
  misc_feature (84)..(84): n is a, c, g, or t
ttaatgtcacctcctctattcatcagtcccagcttcctcaggtgggtttatgtntgccttactctgggctttgtaggacttgtntgcattatcaaagttgctacatttgcattcgtgattacgtaattgtgtctgtctcctcctctagatgcccttcaggttagagtctgcctttttcataattgtaccttcctactacccaacagaatacctgacccagggaaggcactgggtaaatacttgtcaagtgaatgaaaatctcctttttcagtggttatataaataagaaggaaagacatcataaagacaattacttgagtaattttctgcagagactaaagaaagctgcaagtaatttgtttgcgatttaaaagaagtgggtagattaaaagaaattcacagctaaataatgaaacgtgggggtcccaagacacatgtctctctttttagaaatgtctacctaaatgtacaatgaatg

SEQ ID NO: 380142 - DNA, 565 bp, Homo Sapiens
catttcgtagtgattattttattgaagcccaaatcactgttgtggttggtttgtgcagaagacagggtgtgcagcccttgcttctggcatcccagactcaggcttttctctgtgagcatccatggctgatgctttccacatctcccctctgagctggggcctctgcaccacttctcctcttgtcattgctctcactgttcaacaacgatacaggttatgggctccatggtatgtgtccagaaaagtttcacgggccttttgatcctctaaaatgcaaagatttttgctgatcacttgtcattcttggcagagtcttctctgaagagtgttgaatatgtgctgccctttacttcacatcatgggccaatcccattgcaaaccaggcactggccatagggcaaaacatgcacaaaaggtcagcagctgtcaaagtgcttacctcttatttagttcagttgggagcaggacaagaggggttaagttttcaacaggataacataccgtatatatcagcactaacaatgaggttttatttccctgagtcagctttaaaaataatgttgac

SEQ ID NO: 380143 - DNA, 121 bp, Homo Sapiens
ggcttagcattactaaagtaaatgcctattatgatattctacttaggggtaggataagtatgtataccaaatatggtttgtttcgatttgatttttgagacagggtctcactgtcactgct

SEQ ID NO: 380144 - DNA, 783 bp, Homo Sapiens
  misc_feature (268)..(268): n is a, c, g, or t
ggaaattcatacatttcccttacttatatagatcttcctactttccagacatgtgtattattgtatattacatttgtcaatagctcatggcaacagatacacatagtttgggataacccttttatacctcatatgagcagtgttcaaaggtttaaaagcacaactccaaagggcacagcttgaaatggagcgggaggatgctagcaaagccaccccaataaacacaaaatcttagtaaaagcacctatggttaccaggcaatgcaacnttcaaaacaaattccctaggcaaccccaacctcttcaagcccggctttctaaatcacaattattactcctaaagcctccttatatacaaaatcttaggctggccaagcccaaacacacagacacattaataatgagcatctctgtccttaaaaaatttcaaacataaaaaacctccaaatgatatgttcccactggaagaggccaaattcttttcttgtagattacccttttctatttttcattcctacctcccatgcagtattcctagattctcacaccatttgatcatttctctattttgatatttatctataagaattaatgatttttttcaagtcaaatctacaaaaccgtggatttgcttgcctctaagctatttatctcagtgagtcaggcccactgcttccatttttctggattagctttgaagaagaatcatcagcacttaataacctacctaaatccgactgaagatgctttcttgatcctatctctggtcctcctactttggcag

SEQ ID NO: 380145 - DNA, 507 bp, Homo Sapiens
acgaggccaagaattcggcacgaggaggaaaagcacgaagaaattggtatcaaagtcttggctttgttctgggagttgagggaaaagtagggaggtatttaagtggcttgattatgagaaaacaccagagacagtagtaaatagttatttaccgatttttacccatttctaccctggtaatcctccctgcaaatgaagaaaaccaagacttctttatttattatctttccccatctgtattgaaacagtgatcttacttatctcacccagtgactctgtaggacatttaaaaagtggtcatgggtttcattggagtgagaatggtattaacgtttcctcttgtcatctcaaagttttctctccccttaataccatctctacagcttgctgagatgctttaaggatcacagagacacaaagaaaatttgaaccctacgcttctcccatcccacttcttactccatcccgggtgagcgctcgtcctcaaataaagcatgttggaacttc

SEQ ID NO: 380146 - DNA, 649 bp, Homo Sapiens
agttttcttgtatagtttaaagtcagagtgggtgtttgtttgcttattaatatatttatagatatttctaattctttctagcaccatttattaaaaagtctctttttttacccattgaattattttgtttaaattgttatgtctaaaatcaaattaccaaatacacattgtctattttgaactatttattctgtttcattgatttttatgtgttcctttacacctatatcattgtcttaattactgtagatttgttggaaatatgggagtcaaatttaaggatttcaattttgtccttttatcaagttgttttggctgttctaggtcctttgcatttccctataacatttggaattaggttgtcaatatttccccagaataaagcctgctgggattttgagcaggattgtatggaatctataaatcaatttagtgagaattaataacatattaagtactctaattgatgaacatagtatcatcttccatttatttagtctttgacttctcggaaatgttttatagttttcagtgtgtaggtcttgaagtttgtaaaattctaagtgttttatggttttgactgtaattgtaaatacctcccattgttcattgttagtacatagaaataaaataaattttgtattaaaaa

SEQ ID NO: 380147 - DNA, 402 bp, Homo Sapiens
  misc_feature (12)..(12): n is a, c, g, or t
  misc_feature (25)..(25): n is a, c, g, or t
  misc_feature (156)..(156): n is a, c, g, or t
aataagttaacntttattgtacacncttaaatttcctgctagtctcctcaaaacattatgactgcacagtttccatagtaaccatgaacaaaacggaacagtctacacgatttggccaacacctgattcaaagataacacttaatggtgcaaagtnggcaaaaaatgttattgacagttttctgaaaatgtacaagtctgctccggagtgtccaaaaatgaggaaataatgtcaacgggtgtggcccagcaactagaaaatatttatgttgcagtataaccagaaagtatacgtaaagttgttttgttgagcaatggatatcttctcagaggcttgagactagaatatgattttcttccatcttggaaatactagctatattttattagaagtactttgtaa

SEQ ID NO: 380148 - DNA, 399 bp, Homo Sapiens
aataactgcagggtatagatgaaactgatgcatttcacattccttttttgtttatcatttggaatttactctatttaactgactggtgaacatcctattattcaaccaagctgaataggctacatttaatgctatgaaagctctgtatctatgtgctttatatcccatcttgtttctgttgataagtgtaactttattctttaagtaagaaactgctttaattcctttgtataattatattttggaataagcaagtatgtataattaaagtgaaattccttctgaagtaagttctaaaattgaattttactggaaattatactagatgttaacagtattttagaaagtctcttggcttactaacatatgcttaaaataaattttttctttcaacaatag

SEQ ID NO: 380149 - DNA, 802 bp, Homo Sapiens
gaaccctccaagataatctaaagctcagtactaaggccagataaggatagtatgagaaaggatattcttactcatgagcatagattcaaaatttcacctagattaaaaacattccttacacacaaaagtgtaaaagattagtaactcaagagcagccatatatctgataaagataatccacttgtgataaatctggcttattctaggaatccaaagatgtttctggaaaatccaaaaatgtaaattatcatactaagagattaaaagagaaaaatgtcttatgatcatcccattagatgcagaaaataaaattgatataattgaacacccatttataatgaaaacatttaacacaatataaataacagttttctcaacccagtaaaattcttcagcagtcattagtcttaccgataataaggtatttagagtgttctgtttaaaatcaatataaaggataaatgtgctttttccacattttattaaaggtccaaagtagcctagtaatgcaagaaaagtaaataataggaaaaggaaagaaacagaaagaagcaaaatttattatagtatcatatttacctagaaagaataaaatgattgacagacaaattattagaaattagaagaattcaataccatggctagatataagtttaatattaaaaaatcaattgcatttctattctttggcaacacacagaaaacatatttttttaaatatgccttatgtattagaaaaatgcataggatctgaatgaatctaacaaaatacatacagtatttgtatggggaaatttatttt

SEQ ID NO: 380150 - DNA, 219 bp, Homo Sapiens
ttagcatcttatctagttttgatgtgaataagccaatttcattctttgcagtgatttatctttttaaaccaactcgttcctttgtgcatgtgctaaccttaaaacacctcttcatataagccctgaattttaagtggtgccatttcttcctacccccagcccactcctcagaattacagaaatatgtaaaataggttgtttaatcacacatgttcatat

SEQ ID NO: 380151 - DNA, 485 bp, Homo Sapiens
aaataaaataaaattatagtctttccaaccccacttccctatccctttacctagttttattctttttcttttcccactggacatattgtctaataacatactatataatttatttatgtgttgattgtctacgtttcctcactatagtgtgagcaccacaaagggaggaaattttggggagtctattttatctactgatcattgcagtgcctagaagagtccctccacataataggtgctgataaatatttgttgaatgaataaatgagtagcatcagacatctaatactcaccttaaagtagggctgcacctaagtcatccaagacaaaaagggattttgtcatcttgttctaaaactctccaggacccggactgcacaaacatcctttgttaagccaattcctgattaccatcacatcctctccttaaatgtaatcttcagtttatttctggtaatatttaaataaagtaaatatgcccaatg

SEQ ID NO: 380152 - DNA, 746 bp, Homo Sapiens
  misc_feature (204)..(204): n is a, c, g, or t
  misc_feature (214)..(214): n is a, c, g, or t
ataagcacagaccaccacacctagctgattcttttattctgctcataataaataaaaggctgtgataagaaaagccacagggctggaaagagtccacaaatcctccgttttctgagggtgtctattttctgccattcaggaatgtggtgcctacaaaactcaggaaaggaaggtaataattaaaaaagctcaagccacaaatangtatagctangacacacatcttactagccaggagtttcaccagcaagcggtctctattctgttttaaaagaacatagcttctttctcttgctgaggtttatatgggccacagtgtaggcttcttgggagttccctgattttctggctcaggtcacatatactattaaaaatcacacattcattttcaaagtattaaaatataatcaaatagattcaacactaaaattaagctgaacataatttattctttttcttggacatgatgtgagaaataaaacatcctggcctgggagtcagaaagattaggttttcttgatctcaaggctgagtggtctcgaccaagttacttaacctttctaggcctccttttcctctgacgaaaaacaagggagttgcactggataagttttaaagtcccttttcaaatttcattgaaacactaagtcatgatcttgaacagtgcctcttgactatgaagatcaactaccattagagtgtaaaattaattctagtgtttgcaattttctgcctcgtgccgaatt

SEQ ID NO: 380153 - DNA, 579 bp, Homo Sapiens
tgcactcctaaaatatgtcatcattagtcttcatgaggatgtttaccatttctgaagttttgcgtaaattagccttgaagattacactataactgaggtcatcagcattgacttatggccagcaaaggacatgctcatggccctggagagatgaggacacaaaacaaatcaatttccccacttactgaaggactccccttaccttctgtctctcctgagaccttgactcattaattattttactctcctttttggaaatttgcaaccggtccttctcaacaatgtgctccctttagtacactgaagaaaaagagaaggggattatttgagtcctgatcacgatgcattgaaaactttcctatgtgagatgtttctgtttttatatctcttccaggtgtccctgagtatataagcatgggtctatgtctaccaagctcactgtagagtcacttttaccctttgctatggtggaatgggatctgtagggtcaggaacacagcacctaacacagtgccttatggatagtagttttataatacagatgtgttggaagaataaatgaatgggtccttttcaaac

SEQ ID NO: 380154 - DNA, 599 bp, Homo Sapiens
taataagtgttcattttttacttaacctagtagccttctgaaacttggaattgaaaagactatgtctatagccctaggatctaacagataaaaaatgtattatgtcaccagtaacgtaggtggtaaaacaaacatttgtttgaatgcagcaaattagaaggaggtgggacgcgttgccccaggccaccaatactaagagcagcgatacacaaatagcccataaaaaagaaatgtttctataaaaagcagagccaagaactccgaaaagctcatcagtctggggccatttagtttagagacctcagtgtgccttagggtgtcatttggttatggttatgtaagactgacatttgttacaatggccttgagccgcaaaaggccagtcagaagagacagtgtcatttgtttaggagaatctacaatgaaaaaatgtttaaattaaatgtttaggcatttaaagatgtaagactcgcttatctggcacatagacattgtgaaatacgtcattgtataacagaatgacagatacgtgtggcacacagtataattatatatacttccagaaacagaacttctaaataaagaacaagttgatagca

SEQ ID NO: 380155 - DNA, 763 bp, Homo Sapiens
  misc_feature (643)..(723): n is a, c, g, or t
  misc_feature (745)..(745): n is a, c, g, or t
aaggattgtggaaaggccttttgtagaggctctcaacttacacagcatcagagaattcatactggtgagaagccacatgaatgtaaagaatgtgggaagacttttaagcttcattcatatcttattcaacatcagataattcatactgatttgaagccatatgaatgtaagcaatgtgggaaagccttcagtcgtgttggagaccttaagacacatcaatcaattcatgctggggagaaaccctatgaatgtaaggaatgtggaaaaacctttagacttaattctcaactaatttatcatcagacaattcatactggtttgaaaccctatgtatgtaaagaatgtaagaaggcctttcgttctatctcaggtctttctcaacataagagaattcatactggtgaaaaaccctatgaatgtaaagaatgtgataaggcctttaatcgcagtgatcgacttactcaacatgagacaattcatactggtgtgaaaccacagaaatgcaaagaatgtggtaaggcctttagtcattgctatcaacttagtcaacatcaaagatttcaccatggtgagagactcttaatgtaatgagagggaaagcctttagccatggaacatttttactgttgtcactattatgatnnnnnnnnnnnnnnnnnnnnnnnnnnnnnnnnnnnnnnnnnnnnnnnnnnnnnnnnnnnnnnnnnnnnnnnnnnnnnnnnnacattatttttatgataattgntagaattactaaaaataa

SEQ ID NO: 380156 - DNA, 501 bp, Homo Sapiens
ctaccaatctgaagtgggagtggccgccatttttttccctcttctttgtttagggtgctattcttaatccatatactaagtaagtattttacatacatatagactgtgtttatttggtcactacattttgttaatgggtaaaagaccatatattaagctactttgttatttacatctatatctgttattaatctgatagctaggaagttgtatttagtaagaatctaattaggtttgcttttatcttataattgggattcctttatgctctatagtgttaatgtgtacagtgtttattagaggcttaaatgatacttctttaagcatccagtttttattttattaaaaaatcttagtgtttctttacaggttagttttgtattcttttttaatattttaagacattgccttcctatttaataatgtgctattcgtataataatctgtttttattacatagacatttgtgttatttaataaagtatattgtgttatatccct

SEQ ID NO: 380157 - DNA, 784 bp, Homo Sapiens
  misc_feature (191)..(205): n is a, c, g, or t
  misc_feature (518)..(625): n is a, c, g, or t
  misc_feature (628)..(640): n is a, c, g, or t
ggcgttcgatgtgttaggcttcccagcagtgcttgtatcttaccaggggccacaccttcattcagaggccacaaactggaagcccgggagccctgcactggctccctcacccccgctgatgtggctttcacggtgtcctaagcacttttgaatgggaagctgacattgcaaaactggaagatttcactttnnnnnnnnnnnnnnngattcctcttgagcaatcagaagacagagtgagatgacactgctctgccattcctgcaggtgatgagaagctaagctgaggagagcacgaagcccagcatctgaccatttagacatgctcaccaaagttcttagaagaagcagaggaaggagaaagctcacaaaagaaaacaaatgctattttatctgacttctcacttctacggatagttgttttcacttaaaaacaaatccccaaactgtttcatgatagggccaagtgacttttaaacacaatctagtttagtagatagtatactatactattttaaggnnnnnnnnnnnnnnnnnnnnnnnnnnnnnnnnnnnnnnnnnnnnnnnnnnnnnnnnnnnnnnnnnnnnnnnnnnnnnnnnnnnnnnnnnnnnnnnnnnnnnnnnnnnnttnnnnnnnnnnnnngtgtactatactattttaaatgtctacttttaaatgaattcagtgttatctgttatttttaatgttatttttcagatcaagtttgaatattaattgtacatgtaatggctaaaaaattaaatcatgatttgagatcttgattat

SEQ ID NO: 380158 - DNA, 1056 bp, Homo Sapiens
  misc_feature (774)..(787): n is a, c, g, or t
gaattcggaacgaggattggaatgaagcccatgtgaatgcatggagacaaggtgaaaaggtagatgagaaaaaagttggaaatatttgcaggtacatttgacaggaccaggagatgtcttgggcattcatgatgatggaagagtggtcaataatgactctattttctagcttgtatcatgagatgaatggagacccgtagaagaataagttttgtgagtgactgggtcatgtaatatattttggatttgttaaatgtgaactacttttaagaaactgtggggaaaaacttcgttttgtttacatccatgaatcatttgaagcacgaaaaataattctcagctgaagatacaaatatgagggccctgggtgtataactgaaggcacgagtataaatgggattatttagggagggcttaaaagtggatagagagtaaattcacagactataggtacaaaataatcaccaatgacaatatattatgcagcttaagaccaattgtatgtattttcctgacaatgtcttttagagcctgtgactagttttctcctgaagatgtggtgatcttcttatcaatttttaagagtacttaaatgttttaacaattatatttaactcaaaattagtttccaacttgttttcctttaattataatttaaagtgtatattttatgtgtacgaatattaaaaatttatgaagtcatatctattgcctttgtctcttattactttaccaatgcttacaaaaactttcctcattaatgcttatataaannnnnnnnnnnnnngcaaatttttccattcttctggtttgtaaaatgcctaaagtaaaatgtgtatatgaattaattaatcggttaaatatcttttcaattttctcaacccaatatattggacaattcacctcttactcccagagttttatctctacatattattcctatgaagcttttacacatgctgagactaaatggtctgttctatgtcattgattctatttgcctagttgtctatttaccttgtagttttgaggtaataaatggtcctttaaacaaaa

SEQ ID NO: 380159 - DNA, 475 bp, Homo Sapiens
  misc_feature (369)..(369): n is a, c, g, or t
agggaaagcccttggtcttgttgaagtagaagtgcttgtccgtgatgatcctcttgaggcccaggaagtcttgcaacgcggcccaactccccggccgggtcgctgatgagccgctcgccgctcacgaagagcatctggcggatggggaaggggcgcagccagtgctccaggtgcttggcgtagatgccgatctggatggcgctccacgacgtgtcgatgaggcccgctgtcctgtttttgaacgtcaagctctcgaaggtggggatgtcgggccgcttggacagcgtctgcgtgtagtccgagatggccctggtcaccgggtcccgcaccaccacgatgagcttggtgtccttggacatggccgagatngctgcgcgggggcctcccgcgtgacgaagtaactgggcgtcttctccatggtgatctgcccgtccagggttctgggcatcaggtccctgagaaacgcaaaaaggca

SEQ ID NO: 380160 - DNA, 601 bp, Homo Sapiens
  misc_feature (325)..(325): n is a, c, g, or t
attattttgtattagggattgataggatggggttttctaatataataaaataaagcattgtaggtgactaattttaggtcactgattttggagactaattttagtgtctgtgtgtgcataatcatttttctcaggttgatctgtccataggtggcaagaacttttctatgcacacgtgcagataaaaaaatggacaaagtgtaagaactgcttcctagtgtcagctcatatagcatgtgcacgtttctccagaatggcatttttctgttgatattttgtttgtatctgtgaacttctgataagaaagggatgattttcttaatcnttcatacatgtgccaaaacagtctcaatcttactgtataggatgttaaataatatggttattataatatttcttcaatctagaaaaatgttcattgactttatgagaagtgaagaattaagtttcttaactacttgatttcacccatacgtggaatacacttttttctcatcttcccagtgtaacttacaaatttttaaattgtatgaacattgtgcaaattattgtctgtatgtaaaattaaatctgtatgtaaaatgaaatagctgagcattga

SEQ ID NO: 380161 - DNA, 191 bp, Homo Sapiens
ggattccctattcaaaaatgtcttaggcaaatgtgtgggaatgaacatgcactttaaaattatggggacctagtagatttaatggagtgagccctggattgggagccaggggacctggctttgaatggtcccaacccaggcacttatttaccttagtttcttcacttataaaattaaacacaccatctact

SEQ ID NO: 380162 - DNA, 612 bp, Homo Sapiens
aaaatatatataaaaaaaatttctaagtgatgaatgcttagggtattgctgcttatttcttactgtactgtggtgtcaacatttctaagtgtccataggacttctttgggcctgaatatattatcagtttttataaaagcatttgtgtaatctcaaaatgtgtttttattctaccagttctatttgttaactcaatttttttcattattttattcaaatccatattttctctgactttcatttactttagagttcttaatctgggggtccatggcctgcctaggagtctttagcatgtaggggtttaggagttgcagacccctagggatcgaacaaagctgggtatgtgcttgaaggaattttgctgggacaaggatctgtagtatttactatatttttaaatgcctctgtgacaccaaagcagttcagaacactcatttacctgatctaatcatagtttgatgtttgtgtgttatatctctatgtattcctgtttcacttttaatttctgtatgtgtattgtcgctatgttgtgcagtttttctcaagtcatttttgagaaataggcagggtatgaattatcaataaataagtatcatgtttggggcatat

SEQ ID NO: 380163 - DNA, 870 bp, Homo Sapiens
  misc_feature (190)..(243): n is a, c, g, or t
tagatatgttgtatgctgtgatcttttgcagcctaatgtttgaagggagcatgatgcagagaggttttggtaaaatcattttagcccaaagctttgtgtaattttcctgcaactttgattttgatttctttctcaaatagacttttttaatgtttagaaaagttggaggtcaatttatgatgtgattcannnnnnnnnnnnnnnnnnnnnnnnnnnnnnnnnnnnnnnnnnnnnnnnnnnnnnccagcagagagagatcatcattgcctgaatttagctttgtgactgcaagagcaagaccagttcctgtctggagacgactgttacaataatatcatcctattattttatgttcactctttatcaatttgaacagatgtttacatgtactataattagcattttatctctacagttctctaagagtacatctgagtccaaagtgtatctgaatgtgtgctctgaccttaatcttaaatgttttctccccatactttatagccatttattttttaaacaccttaagaaggaacgaaaaagttctcttggatgacgtatattcaagtctgagccaaattgaggattgtgtctaggaaatctgtaaagccatactactgtgttcattagcatgagcaatttaaaatgaaaatgaattaaaaagttaaacatgagttttggttttaattttgggggggatcttaagatatatttctgggagtaggatagccactgaaaataattttgaatagatgataaagtacttttttatgtactgtaatagcttgtgcatttcttctgaatatactttctgatgttgccaaggtcatttacccaaatatttttttaaaaattcttagcccttcaaagcca

SEQ ID NO: 380164 - DNA, 987 bp, Homo Sapiens
  misc_feature (749)..(781): n is a, c, g, or t
  misc_feature (823)..(823): n is a, c, g, or t
  misc_feature (828)..(829): n is a, c, g, or t
  misc_feature (845)..(845): n is a, c, g, or t
  misc_feature (851)..(852): n is a, c, g, or t
  misc_feature (886)..(886): n is a, c, g, or t
  misc_feature (917)..(917): n is a, c, g, or t
  misc_feature (919)..(919): n is a, c, g, or t
  misc_feature (943)..(943): n is a, c, g, or t
tttgaaatatgtagtaataagacttatctctggtttgctgttcaattttcgccttgaacgacaaaagctttctaaaaatagtataatgtaccactttttgtatttgtcatgatatttttgacccattggcaataaatagactattgtcattttattagtaccaatgatgaaatttcaccaaactattaatcaaaagtcacttattgaacacattgataaagcatcatgttccctttgattatcccctgtaaccaacactcaactacaaataggctgggattcaatgtggagtggtggatttcctgaaagaaagtagtgcagatatttaaggattgcatattgttcctaatggaggatgtaataaaacaggcattagtacccctttcttttagtacctaaatatgttgtttctgagccatattcttcttcaggtttattttataaagtgaggacatatgataatgataccaaaggaaagataattatcatgaaaccaacttttggatcattccctttttatacaatggtgtatttatagggataccttcctccttctcaccatattaattgtatgtcattaaaatcagttggctatgtccagtgtgtattattcacctcttttgctagccaaggtttgagatgctatattaacatttaaatcatgaaaatgagcaagtaagatagaataatattttattaatgtatgatgtgtaatacttattgtctaaatcaagtttcctatttttggnnnnnnnnnnnnnnnnnnnnnnnnnnnnnnnnntgggcatttttgtttatagctcattacaaactagagtgatgnatatnnatatttactaaagctnattganngagtcatgcaactcagttgggaattaaccactcnattcaatagtaaaagccatgcttggatgttncntttgcatgttgcctagcattttanagatatttattatttaaaaaaataaagatatgtttttaatgaag

SEQ ID NO: 380165 - DNA, 733 bp, Homo Sapiens
caatgccacaaatgagaaggctcaagttgtttaaatacatgtttgctcctggcttacctcttcttcactatcccatgagaatcgtggatttgcctttccttgcatcctgcagttctacttgtcccagagagaactgcacaccagccctgcatccaggggatgaggtcctaaaatgagaagggagagaagcagccagaccttgagctgctctgctaggggagctgtgagttgggagaaaagtggtcactggttggcagttaaggacttgctgagagagacatttgtaggagaaagaagataagtaggttcataccagaagggccaggactcggatggagcaaatccccagttcttgtcctacaagctgattgtgcgattgagcacaggcctctggaattgtgcagagatgagaaacaggctgaatttgcaaggccacaacatcaggttgtcatgtacccatcattacagcttatgcccagaagtcctgaccctgtgacaggttattatcttaaaaactcatcttcagcccactttttcagagaactaactctttccttagatgttgggccaggatttcactatttacccagagaaactaagagaaagtggcactaggcgtcttgtcttccagatgtgagatttcgatctttctaatgaaattgggggcactttgagactgtcagggtttgttcctgtctcagaatggctcataataaactcactgaaacactca

SEQ ID NO: 380166 - DNA, 797 bp, Homo Sapiens
  misc_feature (15)..(15): n is a, c, g, or t
  misc_feature (22)..(22): n is a, c, g, or t
  misc_feature (321)..(390): n is a, c, g, or t
  misc_feature (582)..(582): n is a, c, g, or t
gtcttacaacaaagnccaaggnaatctcgctgctgaggggtgagccggggtcttaagactgggattcccgttgagggaggtgaacagctgtgggagctcaggccgagccgggactctctctgcctggccagacttccagcaaagggagagaccgcgggtcaggggatggctgtgcgactctgcgaagctcgaggctcccttccaccctggagatttcgagaactcattcaaaacttaaagagatgtcttggctatgtagggatcattcgatggttactcactcaccgctccccacaaaccaattgacgttattttccttcnnnnnnnnnnnnnnnnnnnnnnnnnnnnnnnnnnnnnnnnnnnnnnnnnnnnnnnnnnnnnnnnnnnnnnggtaatatataatttataggaaccttataaagtagatttctctcccctttctttacaggggttgaagggggagttccttaagcttttctacttttgacagctttagtgaactccaagtgattcgttatcaacttagagcactttaatgtagcccatttacagtgagacccatccatgactgcacgtcatatncagtaaccactaactgcaggtggctactgaggacttgaaatgcagctaatcctaactgagatgtgctgcaggtgtaaaacacacaacagatttctaagaattactgtccaaagaaagaatataaactctttgcaatgatattaataattaattttgttattacacgttgaaatattttggatatattgggttaaataaaatatattataaaaatt

SEQ ID NO: 380167 - DNA, 555 bp, Homo Sapiens
  misc_feature (42)..(42): n is a, c, g, or t
  misc_feature (458)..(466): n is a, c, g, or t
aaagaacaaaattattataattactaggcgaaactttagtcnctctgcatcacatcttcccctacatgtgcacccatgtgcgtgtctgtttccaagaaaaggtgactgtggaaataggaaaagacttctgctgaaatgctgaatgttatactgttttcttgggcccatcttaataatcatctacaaagctgcaattttggcaatatgagctggcggcctgacctaacatcattgtactttggatcactgaagtgtctcctcacatgccaaaacctgctgcactttcttccgacttcgttgcggccttcatcaaccttgtccacctctttcagtcacctgagtctctacgtgcactgttcagtatggcagccatgagccaatgtggccaccaagtatgaagaagggagccttctgaattgaatgtaaaatgtacactggctttccaagacttagcatgnnnnnnnnntgtggaataactcaataatctttgatattgcttgcaggttgaaatgataatattttggatatagtgatttaaataaaatatattattaa

SEQ ID NO: 380168 - DNA, 726 bp, Homo Sapiens
aatatgtttgctggatcgatcagtaaaccaagcatgtttctgatcctctgggcttagttctttaaaggaactgcaccattgagtggggggaggggcggtttccttccctatgtgcagcacttcctcagtggtttcctgagctggcaagttttgtacatcctcatgtaaaaatgataccccctttggttttggcttagcctggtcttctatgttgtatttccattttatgatgttactttcttgggcatgccctatttggtgagttttgggggaactcatgactcaagtcataataggaatttcagaccttataaagacatccacggttgaagccagaggtgttccatttcccagcaaagccccaatagccaaggtaacaattgctttcttgaaaggggtataagctttgctggcctctggcaatttctgggttcaaaacccaaagtgtaccctcttcccatcttgtttctgcctaaggctccaattagcatgttgatttaggacagttatttgcagttctactggcccatctcatatgggccataggtccagggccagttgcactgcttgtttagcttgttcaaaagccatgctctctttctctccccagtgaaagtcacagcattttctagtgactgcatgcagaggttgtaaaatgttacccaagtggtgaatataatgtctcccgaatccaaacaagccaataaatttctagtcctccttttt

SEQ ID NO: 380169 - DNA, 458 bp, Homo Sapiens
caggtattcagggaggctccaggaaccaatcccccattggaccagtgagaagcaactgtaattccgtttttctatgtagagataaaaacaaattcagtggatttaaggctgggccagtcaactgagcctgattcccccagtctgaatgatgagtgggactctgaattcctttgacagaggtggacccattcaatcatcagtgaaatggggtccccacagccaaaagtttccacaggactctttacctcctttccccaccccaagtgagttgtcagaggacctctcctgaactcacagaacaggtccaatcaagttccacctccccattcatgtcctttccagaagctgggcgctggtgtcacgccctaagttccagctacgtgggaggctgagacaggagaatcgcctgagcccaggatttcaaggccagcctgggcaacatagcaagatactgtctc

SEQ ID NO: 380170 - DNA, 503 bp, Homo Sapiens
  misc_feature (359)..(401): n is a, c, g, or t
ggagggctcagtgttcattttagcagagatgcagctgaagaaaagccatggtattttagcatttaatagtatttagtgtggatttaaaactaaatgataaacacacattgctaaaatgtttaatttcaataaagttaaaatttaatttttagatatacttcattactcagaagacaaaacattaaaaatactgggaatcattcactgaattccacttctagtggtttattctacaaaaacaatcaaaatggatatatctttgtgtttaaagatgttcaccatagcattgtgtaaaagcaaacaaaaaaccaagagaagtgtttttaaaaaattagaaactttctgaatgcacagttgannnnnnnnnnnnnnnnnnnnnnnnnnnnnnnnnnnnnnnnnnngagacagaatcttactctgtcgcccaggctgaaggtagaaagaaaaaatcaagtgcatttcattcagcttctgtctcttaggaacagcctatcttttcactt

SEQ ID NO: 380171 - DNA, 659 bp, Homo Sapiens
  misc_feature (517)..(525): n is a, c, g, or t
taaagacaagtagctatagaattctgaaaattctcaataaatagttactagtataaaaatgcttaactccatatagctcacctttaatcaaaggcagtaccagttatcgctataataaagcactcaaagaacatcgaaaataacttcatatctatagcaacgaagggaacatggaacattagccctcctaaacaattccagaagagggaagttcattatgaattaatacttggaagattctagcccagctagaatagatttttaaaaaactacaattaaagtatataaatatgaaattcagaaaagcagataaagaaaagctgtcacttaataacacaggtggcagcaagcaaaaatatcatttccaactggggggaattaatgctagattaatgtgaataaaataaaggaaaatgacataaaatgaagatacaaaataaaattgatccttgatgtgagaataactgtattccttgcatgttcagaatgtccttatgttcttctagagagacttagnnnnnnnnngccatgcaaataaaattctcattacatgccagctgagtgacttgcaaaggtttgccccagaagggctttttaaagaggctaaagacattctaattgccatccaaattgatgtttacaccaaaataagaagaaat

SEQ ID NO: 380172 - DNA, 260 bp, Homo Sapiens
  misc_feature (77)..(77): n is a, c, g, or t
  misc_feature (191)..(192): n is a, c, g, or t
  misc_feature (214)..(214): n is a, c, g, or t
gccagtccccctgcccctgtagaggaataatgagggaggacatggggaagtcactgtcaaaggctggcacagctgtngagcccaatgcctctgagcgaaaaggagagagagggagttcacgcccctgagagtagccccctgagccggctgggacctggactgcctgctttcctcctgcctcttcccctttnnctccttcacagcttatcctccntcttccctctttacatcactgcctttacctggtggggatgaggccc

SEQ ID NO: 380173 - DNA, 797 bp, Homo Sapiens
  misc_feature (705)..(745): n is a, c, g, or t
  misc_feature (780)..(780): n is a, c, g, or t
cattcatgctccctatggtatcgagatggaagctgacaggtgttccattgactcaactcaatacacctctagtgccagtgggttcccttgagctccaggacagtgagctccagcacagtacaagggcaaacaggaaccaaatctgaattattacgatgctggattctactcaatgcccagttttggaaactctagagcttgctttaaaaataatcattgtaagaaacatttacaatgtgtctaaaataaaaattactctccataacaaagttccatgtataacaacacagattctgtgaagtagcgagtgagagatttttttccctcttcctcttaagagaaattgagggtgaagtcagtgcctcaaaagctggctggagcagtgttaggtacaatgaactatttcagtgtagaatgaattacaaaacagtaatatgaaggaaggtttgattgtaagcacagcagcagcaaatcctccaacatttaccccattatcatttggtgagaggggaaccttaactctaacccttttactgttgttgctctctaccattttgctttttcataaaagttctacatcaaaactgttactccctcttccacaacagcactgaaaactgtatttccttagagctatactgtccccaaaattggaatacagacttcatgagagaatattttatctctgcctaccacagcatgtgnnnnnnnnnnnnnnnnnnnnnnnnnnnnnnnnnnnnnnnnnccaattctaccaatacctaccaacttacaaaactnctagagaactcagaaat

SEQ ID NO: 380174 - DNA, 782 bp, Homo Sapiens
  misc_feature (52)..(52): n is a, c, g, or t
  misc_feature (354)..(354): n is a, c, g, or t
aaaagtttcagtgaaacaagttcagagaatgatacagaaggtgtatctcttngctgatcgagaggccagtctggaattaattaagttggacatatcccgtacatttccatctctctacatctttcagaagggtggtccatatcatgatgtcttgcatagtattttaggggcatacacatgctacaggcctgatgttggttatgtccaagggatgtccttcattgcagcagtactcattctcaatttggaagaggcagatgcctttatcgcatttgccaatctcctgaataagccatgccagttggcctttttttcgtgtggatcacagcatgatgttgaaatattttgcaacantttgaaggaatccttgaagaaaatctttccaaattatttcttcacttcaaatcttacagtcttacaccagatatatacttgatagactggatcttcacactatatagcaaatcactaccacttgatctggcctgtcgagtctgggatgtattttgcagagatggggaagaatttttatttaggactggattaggaatcctccgattatatgaagatattctcctgcagatggactttattcatatagcacagtttctaactaaattgccagaagatatcacatcggaaaagctgttcagttgtattgcagccattcagatgcagaatagcaccaaaaaatggactcaggtctttgcatctgtaatgaaggatattaaagaaggagacaagaacagtagtcctgctttgaaaagctagtcttcaaaatt

SEQ ID NO: 380175 - DNA, 766 bp, Homo Sapiens
  misc_feature (540)..(708): n is a, c, g, or t
gcgctttgtctcaaataaataaataaataagaagtggactgctgtggtgtgagaatgcacctgacagacctccaattatggagagcttacacagccaagggccccaactgctgctctctgaaactcatcctgcttttgtgctgaggccacacttcccacaggctgctccagcaagtgaccaagcacagcatggacactaagagacaggcccattctgggagacgtgggactcctctgatggccaactttgacttggggactccctgatggccttgccaaacctttttgataaagcactttggtctaggaagcttctacccgaccttccttcctctctccttcactcagggtcagacttataatgtgatctgacagttcccccagcatttcctggctctttctcctttcctttcacaggtgtttctcctgagaaaattcttgcatgtttaaacccaatttgagggattattgggaaaattattgggaccactattggaacagttgacaaactgtcactgggggtgtgtagattaaatgtcnnnnnnnnnnnnnnnnnnnnnnnnnnnnnnnnnnnnnnnnnnnnnnnnnnnnnnnnnnnnnnnnnnnnnnnnnnnnnnnnnnnnnnnnnnnnnnnnnnnnnnnnnnnnnnnnnnnnnnnnnnnnnnnnnnnnnnnnnnnnnnnnnnnnnnnnnnnnnnnnnnnnnnnnncagacaggcaggcagagtgagaaagaaagtgagaatggtaaaacaaatatatataatg

SEQ ID NO: 380176 - DNA, 713 bp, Homo Sapiens
  misc_feature (661)..(670): n is a, c, g, or t
gaactcccttgacagccctttatactactgattaaggttgtaattatatatttatttgtttgttaagttgcttattgcctattttgaccatgtctcttttattcacctttgctaccctaatgacaaaagagtaaataattttccccagttccaacatgtaatcagtagcagagatgtaatttaatgtagatattgtgatttaaagcctagttttccatcagcacatgcctttaagagagacagaggcaaatttgagcttcttccaagaagaggagccacagtgattaagggaatgaaagctactccataagagaaagaatgcatattatagcctagcaaaggaaatggtaggaattgggataaggagctgcctgtgagaagaaggagaggtttagatttacctctgttgagttccaagttttaaattctgaaagatttaactacagaaacatgaatttcatctcaaatacaataaagcattttcaaatggtcagaatcaaaaagggagttaagtttccttggaaggtcatgagttggctatctgtaggggagaacaagcactttataggaatgtcagcatgatatgggaaggtacactagaacttgtgcatgatcccttctaccctgggaaatatgaatcttggaattacggggtaaccannnnnnnnnnctttataatgaaacatatgttcccaagctcaaattgttatatt

SEQ ID NO: 380177 - DNA, 508 bp, Homo Sapiens
  misc_feature (366)..(461): n is a, c, g, or t
aattcggaacgaggagaacacacaactggcaaatgattgatccacaattaaaatacagattgcaagtttccactgcttcactgagtcacaaatttcaatcattcagaatccatctttatggtttcactacatctggatatcactttactatcatacacttaacgtttatcttttaattgactaattctttttccttaaaattttttaaaaggaaactatcaccccctaagaggaagccaatatcatttgtcacaagtttaaagatgctgcttgcctcacatctacaaccgttccactgaccaacccacgtcaaatggccatggacaaagctaatgggatggaaaagtatactccacctatggggannnnnnnnnnnnnnnnnnnnnnnnnnnnnnnnnnnnnnnnnnnnnnnnnnnnnnnnnnnnnnnnnnnnnnnnnnnnnnnnnnnnnnnnnnnnnnnngtgtgagccactgcgcccagtcaacatgtaattttttagtgggaaaa

SEQ ID NO: 380178 - DNA, 656 bp, Homo Sapiens
aaatggaactctgtgaactcagtaagcatgctatggcatggaaagcaaaaaggaaggagcacaaggcagaggtcagaaagggaggcaggggccaacaaacacataggggcttgagggacaagggaaggaacttggatttttccctagatgttagtgggaactccctgaactccctgaactggagggacaataatctgattctgtttttatgtatctagcttaaactcagaacagcttccaaaatcttattcacagaggttttgtggtcttttgggctaagaatttaattatattgcctacaaacaaatataactgtgtatattttactaacgatttaactaaattcttatcttactgtattaacatttccatgtttaatgatagctagcatgcctgtattaatgcatgtattggaaatgattcagcatttcactatttggtgtggtatttgtattaggactgggttatttttattatgcttaagaggtttccttctattcttaaagttttaactagaaaatggtagtaaataatatctcctttagcatctacagacttaaccacactactttgttaacataatgaatgaattataagtgattaccaataatgagccattctggcattcctggaataaacccttttgttcacggtga

SEQ ID NO: 380179 - DNA, 719 bp, Homo Sapiens
  misc_feature (191)..(191): n is a, c, g, or t
  misc_feature (574)..(574): n is a, c, g, or t
  misc_feature (579)..(579): n is a, c, g, or t
  misc_feature (661)..(661): n is a, c, g, or t
caaagtgctgggattacaggcatgagccactgcacccggcctatataaccttttttaaaaaaaatgctttatatgtagtaaaatgtgtagatcttatgatacatgtatatagtcattgtaactgattgcagtcaaggtgtagaacacatccatcactccagcaattttttcgcagtattccattccaggtnaaatatcatctcccatgagaggcaccattgttataatttctgccactatatattagttatattagttttactttttttgaatattgtaagtagaattctgattccatttattaatgattcttttttgtgtatacctggcatctttcatgaaataatgttgtgaaattcatttgtattagtagttcctttttattgcagcagagtaatgcattttatgactatactacaacttgtttacaataggatttatttattatatcataaagatatatgcagccagatcatagaccccctaatatataaagagaatgcatcttcaggtatcttcagcacacatttattcatcttttacccaaatgggaataattaataatgatcaattntgagntatttggttcagatgattttgactattagtaatattaacatttcgattggccaaatatgtcagcatgtctattttaccattnctaagacacataatttttcagatttttacatcgctgttttggagatacattttacaag

SEQ ID NO: 380180 - DNA, 711 bp, Homo Sapiens
tatatttgtatattttatattaagtatagatcacatgtggctgcttgaattctgatgcaactctatgtgttttgaaatagatctgaggctccttataggaatagacaatggtctcttcagttgaatttttgctgacttttctcaatatgtgacaatctcttaattttcctgactctaccctatctaggttctcctcttgtgtcttccttcactcctttaataaatcttagttctcagtcctccactgtattttctatataatgccttagatttcatctcagtcactgtagtgctttcactatttctgcacagatgatgctataatatttacttcagccttcaaaattctaaccagctcttctctaaaaccctactagacatttcttcttgggcaacctacctatacctcaagttggatgtatttttaactgaattcatcatgtctctgaaattgtctctgtctcttaattttcttaacactattcctcccgttcattaggaagttcagtctcctttgactcctctcctttcctgactgcatattcatttggtcctatagtattgtctgtttgatcatcttgatatctgcaaagtccatttttccttctggcacttccttttccatctcttcaactggactggcactgcagttcaatacccagaaatgcacatagtaattacttgttgaatcaataaatgaataactttcct

SEQ ID NO: 380181 - DNA, 733 bp, Homo Sapiens
  misc_feature (640)..(640): n is a, c, g, or t
aaaggggaacctcaaccctgtctaccctatggaaaatccaaattgaatgttactacagccatatttatttccctctgataacagtctaaatatgcttgtataaataatggctattattagatgctaaaatgctatcatgttgtttgtccccattgtaaactaaggggattttttaaaacccttatttcttttgttttgagtctgcttgtgaatctgattgtttttgattttcttgatttaagtgttgtccttcatttcaatgacataaacatatacagtcctcagaaaaacaagcaattttcttctttccctcactcatattaaaaatttatgccaacataaatatcaaacaaaaggatcattggttaaaggtatgggcattgtgttcaaatgcagaagatcctggtatgtaattataatacaatttaatggtggcaatcaaatggacatccagatttttaggatactccaagccaatatttgcatcttaagtaaaattttctgtattgcttattcatttaaatgtcaggtctctacacactaggaccctaattcagtctgtcagctccagaaatttcactatcaagccctcctgagcaatttcattgctttaatagactttattttttgggagcagttntaggttcacagaaaaattgagtgagaagtacaaagagttttcatatacctccggcccccacaagggcacgactccctgtgatcaacccctgga

SEQ ID NO: 380182 - DNA, 529 bp, Homo Sapiens
  misc_feature (406)..(406): n is a, c, g, or t
  misc_feature (452)..(452): n is a, c, g, or t
  misc_feature (493)..(493): n is a, c, g, or t
  misc_feature (511)..(511): n is a, c, g, or t
tagcttctcctttcccttatgccaggttccagtcttgagaggaaaggaatccctacccaccactccctggatcatcagatatccctatcccaacctctcctatgggactagttcatctcagccagtctcaaagattctaggataacttcaatggcatttgaaattatctaagtgtgcttggataaccaccccctcaaactgagacctggttagggactgactcaaagaccctgagtcctcggctaagggtacaggagagggcaggggctccaggcccagcttaggtggatctccatctgtctctgaggactgaccctttccccacaaggacctgccataaaaatcgacttgcgatttttagctgagtggcttctcttttccactttggacttctcagtgtatagcnggttcaagcttgaaacaacaaaagttcagagtgtggagtttttgtngcccctctttcctccaacctccatatcctggcatgtgagcncaggggatgcaatgcatntaattatccatctaaggt

SEQ ID NO: 380183 - DNA, 1097 bp, Homo Sapiens
  misc_feature (39)..(39): n is a, c, g, or t
agctttggaccttattgattgtctgcagttaccaccagnaacaaaagaacatacatagattctgcctaggagaaaagaacaatgcttttctttatcatcagcaacgttttcaccatgacccatccccaaaaatactattgtcagaaactgtactctaaagtgattacacagttgcactgaaatagcgtttgtattataacgatcatacaaaagcaatataagaaacctgtgtaagaagcaaaattaaaatataagtgttttaaaatgcttcttttggtgcattttaaggtggctagtataagaggatatctcttcagttaatgaagagaggggattatatttataacttttcatatgcattgaaatatatacattagctacttaaataaatcctgtatgcctccatataactatggctcagactatgtcatatacagctataagcatgcttgaggcctagaaataacatgatttacaatcttctttattgaccctattagattttactaccgatttaagaagaatgctgttttatacttggtatttattgccagggcttttctgagtcttctatccaaccaaccatactttatatgtcttaacaattctaacaattattttgttacgagagtccaagagtgaaagtttcaccaataatctgggaaaatatgtctttttaaaattttttacagtttactgtgtacatatcatgggcctacgtgagataaaacagtaaacgccacctatgaagtcaaactgctttgactagcaactgcatatgaactgcatagttttagttttataagaattttagctttatcggaggtaactattccaaccataagtaatatgtcatatttgaaagtttaatagccattgccacatcagatatgtctttcttggagatagaatcagtatgctaaatctatttaaaaattttacaataatgttacaaatatcaagattcaaaatggagatgacagactttccttaatagaagcaacaaagtggcttcattcttttaactattgccttagatgggtgccataaattatgtgtcttctgcattgttaaaataaatttatgaatgtatttta

SEQ ID NO: 380184 - DNA, 737 bp, Homo Sapiens
  misc_feature (417)..(480): n is a, c, g, or t
  misc_feature (483)..(674): n is a, c, g, or t
  misc_feature (684)..(684): n is a, c, g, or t
  misc_feature (698)..(698): n is a, c, g, or t
aatgctgtaatatatgttctaggtaagaagtagtagggtcctaagttcaagggttggtatcaggaatggaaaggatcaaaaagtttccagagactgtgaaggacagaatgactcccttacttatgtcactgcctcttgggtagagagatgtttatcatgacaggcgcctacttcattagatcagatcatcatccttggcaaaatgtatatcggtggataaattagaccctatacaatactgttaggacaagtggatgcttcttttagcaagagtttggccctgggagaacgtatttctgctcagatgaaaaaccattaatttgagagacagcatacatagtgaaagacacctgggctttggacaacaaaagtccctttgataaagtccaaatacctcataatacactatattgtctnnnnnnnnnnnnnnnnnnnnnnnnnnnnnnnnnnnnnnnnnnnnnnnnnnnnnnnnnnnnnnnntgnnnnnnnnnnnnnnnnnnnnnnnnnnnnnnnnnnnnnnnnnnnnnnnnnnnnnnnnnnnnnnnnnnnnnnnnnnnnnnnnnnnnnnnnnnnnnnnnnnnnnnnnnnnnnnnnnnnnnnnnnnnnnnnnnnnnnnnnnnnnnnnnnnnnnnnnnnnnnnnnnnnnnnnnnnnnnnnnnnnnnnnnnnnnnnnntgctgacttnccctaagcaagaangaattctggcagcaaacagccattgacttgcagcctttt

SEQ ID NO: 380185 - DNA, 399 bp, Homo Sapiens
  misc_feature (56)..(56): n is a, c, g, or t
taattctcctgttaactagcaagtcaaggaatccgtaagccccatcttacatgtcntttgggtggtgaggaaaatctcggatgatgtccatcaccgacagagtaagagactaatactgttaattgaattcccctaaagagaacaaaactataccatcgtgtggggggaagggtagaagaagcaaatccatacaagtctccaatatgtttgaattggttgcattgattttcctcagctaatggcctaggatagatgctgaattgtcctcagaaaatataaagttgattagagcagcttatttccacttaagactttttaaattgcagctacaaatatttcaaaggtatatgtgtatatttagatatatatttttttaataaaacattttatttttctatt

SEQ ID NO: 380186 - DNA, 822 bp, Homo Sapiens
  misc_feature (711)..(711): n is a, c, g, or t
accaatatgagctctatctgaaagccacgccagcacttccggaaaagcctgttcacttccagactgtccttggcagcagccaaatcatccttgtgaagttcatcaattacacacggcagaggacagaatactactgcaggaccgactgtacagacttccacgcagaaaaactcattaatgcagccccaggaggccagggaggcactgaagccagtgtggaagtcttattcgagcccagccacctgggtgagaccaagggcatcctgatcctatcatcgctcgcaggtggagagtatatcatccccctctttggaatggctctgcctcccaagccccaaggtcccttctcgatccgagccgggtacagcataatcatcccccttcaagaatgtcttctatcacatggtgaccttctccatcatcgtggataacccagccttcaccattcgcgctggagagtctgtgcggccccaagaagatcaacaacatcacagtctcctttgaaggaaacccatctggcagcaaaacccccatcaccaccaagctgactgtgagctgccctcctggtgaagggagtgagactggagttaaatgggtttattatctgaaggggatcaccctttagtggtaaccagggttacctgtatcaaccaaaagctatgcattgtcttagcctgaaaaagaatagagaaaacaataagaattctaaanggaactgtttttattcttctcatacaattatagggcagttatttccctattatgtgttttccaaatatagatatgaaatatctattccatattaaacattataactacaca

SEQ ID NO: 380187 - DNA, 612 bp, Homo Sapiens
  misc_feature (50)..(65): n is a, c, g, or t
  misc_feature (365)..(365): n is a, c, g, or t
atgatgtcgggggacacaggcagctcatgcctggatcaggcagtgactgnnnnnnnnnnnnnnnntatgaagagagagggatggaaattgtgaccagagagttggagttgggacccctgtcttgatcacttgagcatcagcagctccagggaagaacacattctgaaggaggaactctccagctaggatttcatcctgtcctagaggacacgaagaggtggagaccaccccccacaacttaaacttgaggattacttaaggccaatggggactgcctaggaatatttttgagggggtaaaagcacccccataattgtgcttaagtaaccaaaagaccagaaccaagcagcctttaaaaccattcntacatgatacactggtattagaataataagatcttaaagaccatccacttgaaaactggatttgcccctggtcatatgggcagacccatggcagacaaagaactagaagttcctcctaactcccaactcaatgtcctttccttaaagaataactgttctttattataaataggccaagcttttattatttagtatagaactcaggctgatatttttattgatggattaaaatttgaattatttctgt

SEQ ID NO: 380188 - DNA, 1053 bp, Homo Sapiens
aattcggaacgaggaggttctgggaagtaggagaccccactggctttggtcccctaagaatggactctgctgcctgtgctgctgctgccacccctgttccagccctggctttggccctagctccagacctagcacaagccccactggcactccctggcctgttaagcccatcttgccttctctcctctggacaagaagtaaatgggagtgaaaggctcttctggcctaaatcccgctccttcgactatctgtacagtgctggggagattttactgcagaactttcctgtccaggcaaccatcaacctatacgaggactcagacagcgaagaagaagaggaagatgaagagcaggaggatgaagaagagaagtaggaggccaatgaaaaggggccagaagggtgtgtgagggtaccagggtccataccctacagcgccacagctcatcccccttcctcacccctaacctatccaaatggaggcagccagagtctgattggggttcagtttgtctggcaagttttcacagacatcagttagcccggaagtattagtccagcagatagagctttctggactgaaaattgggtcatctagctgcccagctcaccctggcttacctgaatggcctgtgagctcaggcctcttgcatctcattgtctgggctgctgttgtgttgaccatgggagggttctaggagctctagaaggaaggcttgctgaagcccccaggaagcagagcagggcagggaatgcccttgtggaagggaagtagtcattcctcaggccctttgactccctagccttcccaggtggccatgtagtcccgtctctctgtggaaagcctgacttctggcttcaccccaaggaataccaacagcagatccatgcaaagttggggtgcctttttgatgagtcttacaggaagggaaggcagtgtgtagagaatcggcttgctctggggatgcctccccattttgcctgctgtccattgaagtctgtgtgttggcatgagatgaatcaggagaaaaataaactggatggtgttttcctta

SEQ ID NO: 380189 - DNA, 847 bp, Homo Sapiens
  misc_feature (802)..(802): n is a, c, g, or t
cagttccatacttataaaccaaatggtataaagtagtattctcattttgggaatctcagccttaaaaaaaagggttggctttacttataattttagaggtgtgtgaaacagaaaaaatcaccaataagtaatatttcagcattatagacaatactagttgaaaatatatatatttttaaaggcatgtttaccagtcttgtatttctatttctgctttttgaaaaaaaataggtacatatgtacacttgggtggataacataacacatttacactcattattctgagtttcttataattaacaggctgtttaaaatacttactttgagaaataaccagacattagctgttttgaattgcaaaactaacaaataatcaaggttttatagatctctgtaccttagaaattaaaaatttaaaaactaatggaataactatttctgaagccattaaatcatgaaacactgttgctatttatgagctgtgacaacactgcagtgatcacatgaaactcttgataatattcattttgtagaaatttctaccgtacactttggctttttcaaatgcttcaaaattattgttgctttaatttcatttgtttaaaaatctaccaccacccaaaagtccagtcaaaaagaaaaagccatctgacatacacagaatatacaatgctatgcagaataccctggtgactgactcattcagatggaagtctaaaagggaaaaagaatctccataaatgcatgttgtgtctgcttccttggtttctacctattttcccaccaatttctaacaatcagnttaggtatattaaaggagtatttgtgcaacataggagagtgagtg

SEQ ID NO: 380190 - DNA, 676 bp, Homo Sapiens
  misc_feature (76)..(172): n is a, c, g, or t
agtttatttggggaagggaatatgcaggaatggagggtgttaggatgagggatcaggaagcctatcactagggaannnnnnnnnnnnnnnnnnnnnnnnnnnnnnnnnnnnnnnnnnnnnnnnnnnnnnnnnnnnnnnnnnnnnnnnnnnnnnnnnnnnnnnnnnnnnnnnngaacctcacctctgggtttttcagcagtgctatttttatactgtatgaataggatgagaaatagtattggagagatgaaataatatatttttatagctcaattatattatcttctttttacaggtgagtaaactgaggaacagaagggtaactttctcccagacacattggtagttagtggcaaagacagtggtacttgaggcgggggtctcatgactcaaggacttagttgcacaaatgacaggatttctgctgttcagggcttccttcacagttgtgtgtgtatatgtacacgtgtgtgtatgtatgcatgcatttatcacgatatgcaccaaagagcctttacaaaacattttctaaattgatttacttcttttactcatattaacttatttttataagggatgactagtctatatagaagaaaaacttgtattgttttccataaacagaattatgtaaataatggcaaatacaatgaaaataaaataatgcattaacttc

SEQ ID NO: 380191 - DNA, 701 bp, Homo Sapiens
  misc_feature (56)..(56): n is a, c, g, or t
aattcggaacgagggaactttggtatgaatatcacagtttctccttgtttctttgnagactgcatcagatgccaactaggaactgaatgtaccaggaacacagctatccttttacccacttcacccccgcccccttagaaggaagaggaataatagtaacaatcacaattgtagcaacaaccgtgaacatttactgagaatttgttatatgccagatattctaggcgacctcacctatgactgtttctcaaattttcatagtttacaaaaagtgattacttttctgatttgcattgattatgaaattatgcacatttgccaactttttttaatgggggtcccatacatgtaaaatataggcctgttaatatctgtatcccatatttatatctttgacatttatggtcataacaagaaatatcaggacacatctctgaagattttggcaagacaatctgtggtggaggttttgaattcttgtcggcaagcacagtcttccaaagcttagcttctggacctgagggtctgtgaacctgcaacatcagtgtcatctgggagctcattataaatacagtctcagaactcacccccggggcactggaccagtatctgtatttcaataaaattaggggtgtatgtgcttattatagctcatgtctagaaggtcatcctaggcctggcacagtggcacatgcacacac

SEQ ID NO: 380192 - DNA, 620 bp, Homo Sapiens
  misc_feature (406)..(490): n is a, c, g, or t
ctttagcaactaaagttctgaaatataaaaaggacctcacagcttaacccatgttatacggtggggttttcccatgaacatcacgcgtttccagctgggcactcctgcagcatggctaagatgacaactcaagttccctgggagtgggggttcctgggatgtgaacctttcggtgcaaaaactggagaagttccagttgggaccccaggcatagatactaggataaatagggcctctctcctccaggagcatcaatttaaccccaaagattcttggagtccagtttcacataagtaatcttgttgaaaatagtaatcccgaacagatctatttttccaaatgcaccatttgcataaatctcagaaaaaagacaacttcaagaacatacctttgctgggcaccgatnnnnnnnnnnnnnnnnnnnnnnnnnnnnnnnnnnnnnnnnnnnnnnnnnnnnnnnnnnnnnnnnnnnnnnnnnnnnnnnnnnnnntgatttatggtttggatttgtgtccatgcccttcctcttctgccatgattataagtttcctgaggcctccctagccatgcttcctgtacagcctacagaactatgagtcaattaaacctcttttctttat

SEQ ID NO: 380193 - DNA, 744 bp, Homo Sapiens
  misc_feature (15)..(15): n is a, c, g, or t
  misc_feature (25)..(25): n is a, c, g, or t
  misc_feature (135)..(135): n is a, c, g, or t
  misc_feature (309)..(353): n is a, c, g, or t
  misc_feature (464)..(464): n is a, c, g, or t
  misc_feature (470)..(470): n is a, c, g, or t
tgaatgctttaaatncaatgcaaantttgagcacaaaccaatgcattatggcctcatgaagaaatttacaaaccattgtaatgaaaaattaacagcttcaagtaagtacatagtactatacaaatgcttgtccancaaatgccattttaaacagaggaagaaaacgcgaccagtctgggcaacatggtgagaccctgtctttacaaaaaatatgaaaattatccgggtatggtggcaagcacttttagtgccagctacttgtgaggctgaagtgggaaggtcacttgaacccgggtggcagaggctacnnnnnnnnnnnnnnnnnnnnnnnnnnnnnnnnnnnnnnnnnnnnngagaccctgtcaagtaatggataaccccacaagactgccttatagcctgatcacggtacctggcaatttgtagaaagcaacacttataacccattttagcattcctgattngagctngtctgaactttcacatgagttttgagcttattcatcatcttgttgatctttctttccagcctggcagatctggcaaacttgtccatcatattgaccgcggataactcttgcttcatatcctggatctctgctttggtctgcgactcctgttctgcatccttgcgctgcacccatttctcaactttcgggcaaagcttcacccaacaactgcagccatatatcctgcattagccatgtagtacagaaaacatgtgttcctgttctctcctcgtgc

SEQ ID NO: 380194 - DNA, 864 bp, Homo Sapiens
  misc_feature (120)..(134): n is a, c, g, or t
  misc_feature (174)..(273): n is a, c, g, or t
aggaaataagcgacattcacctaggctgtttattggaatctgactagcattatttgatttggcatactttacatatccagaacaaggctgttggtgcttggcaccaagaaatttatgacnnnnnnnnnnnnnnnaaataaagtcctaaaggtagcattaaaatgacttaactgnnnnnnnnnnnnnnnnnnnnnnnnnnnnnnnnnnnnnnnnnnnnnnnnnnnnnnnnnnnnnnnnnnnnnnnnnnnnnnnnnnnnnnnnnnnnnnnnnnnnttaatagaactatggactgaagttgtgatattgagtgttatatttctcaataaaggttttttcttttaatactgtattaggtcaaattcaaggtcttaattccttgaattccaatttccttgtgaaatttcatgtgattaatttaaaattccagggatcctatctaacatcacagttgatggatataacaatgtattttgagaaatcagttttggtgaacagtaacagcattactgataataggcaacaaacactactgcattttatttctgataggcattataggtggtaatccaaatgattaatgattttattgctctttacattttctagaacaggtgatttgacataattgtacttttttctgagaagttggtagtgtacttactactctattttgcagttatacaataaatcttacttagctgacaactaggagtaaaagctctgacaaaaagcctctgctgtaactaaaatactgagatcattctatcttaacaaacttaacagatggggaaggggtatattttaaagatggagaaatgatgcagtttgcaaatatagtcaataaatattctcaagtgtacgtag

SEQ ID NO: 380195 - DNA, 1000 bp, Homo Sapiens
  misc_feature (27)..(27): n is a, c, g, or t
tccaggacccactccaccaccacaagnagtgtgagaacagaaataaggaaaaagcttttaagtcaagtatgaagaccccacatgtatcccactattctccctactgcaggtctgtatgtagaatttacaaaggaagcaacaaaaagacgctacaattctcacaaaaaagacttgacttcatctactacagagaacctcaactcttgtcatcttaccctcaaagcagaacttaaataccccaggtaatcaaaggggcaataattcacttctgcaccactgaagataacccttgacttccacaccaccaattaggataaatctatttggatgaacaaagggccaagagaggagggaagaacaaggaggacaggggaggggaagctgccttctgctgctctctgctgaaagacccccttttaaatatgcccagtgaaaaggattaagataaacctccaaaaaatactgccatgaggtaacttggaactaaatatgaagggtaatactgaccagctttgcaaacatgaaggaagaagcattattacttcaaaaagattttgaggtaataggcctaaatatacaaatcctccgaaatatataaaaatgagacctactgggcagctaaaacagtacaaccctacaaagaacaagacatgattttggccataaaacctactagaaaacccaaggattttgtataatgtgaactaagcatacaaatatagaaagagatttttatttcttgccaccacatttcttattgagaagaaaataatcggtattggcaaaatggtccatgaagactcctatgaaagcacagaaagtgctagatgatgatgaaattagaataaagtgggacttggaaatgttttaaaaaggggaacacattaaccgaattatttggaatgctagaatggaagtgtcctacaaataattcaaaggtcattacatctgtctttagaatgtaccaatcctttttgcaataaaattaacaattaattcc

SEQ ID NO: 380196 - DNA, 570 bp, Homo Sapiens
  misc_feature (18)..(18): n is a, c, g, or t
  misc_feature (99)..(99): n is a, c, g, or t
  misc_feature (384)..(393): n is a, c, g, or t
ctgttcggatagattagncagacaggtagacagacaaacagatagatgcataaactcaggaccttaaaattgttattgtttgtattattattaaaaccncattttctctgtaaatcattgctccttaacttgattataagctcctagtggacttttgatttatttgtgtacttatcctatagtaatatattattatataataataatatcatagactttgtgccccccaaatatttggctaatttaatcagtgttaaataatttagccactattgtctaatggtaattctcaactcatagggaggaagaaggaagtgggacatgcttcctgggtctagggcaagtattagaatgtcagtgggggaaaagataggtataattagnnnnnnnnnncccacatatttgttttcttttgagtcatccaagagacagatgccaagatgagatgggattaaaagagatggggaagagggtaggcagccagagcaggcagggagaggctttagacttccatgcaaaacagatagcttgaaagaagagggagaagaaaggaaaatcgagcagagaatg

SEQ ID NO: 380197 - DNA, 572 bp, Homo Sapiens
  misc_feature (489)..(489): n is a, c, g, or t
  misc_feature (562)..(562): n is a, c, g, or t
cataaacaacaaagcataaaaaaatcttaacctagtggactaaaagatctcttgcttttttcatttctgctaatggcctctctcccttggcactgccagaactggtccattaaaggtgaatcgagcctcagtttgcaggcaggacgtggtccaaaagatcatttgtaagttggttgtttggaccaaagaatgtgtttccccctagaaaccatttttctcagggtgactgggttctcagttttgcttgtacagtgccgttcaacttccactgaagctgagctctgggtctttgagggcaggttctctgcagtgcaggagggagaaaacaggtcacctgctgcttctttgcatagagccctggctctgagcacaatttaagcataaattgttttcttttctactttcccaactcccttttggcatccaggtccagggccctagtccctggattgcagcatcctttcctaatgtgctttacccacctctggnctgcttgcctgctgaggggggtctgtgaccccaaattacccacttactcctgcttcctgaccaatcagacttncatttcctca

SEQ ID NO: 380198 - DNA, 779 bp, Homo Sapiens
  misc_feature (437)..(437): n is a, c, g, or t
  misc_feature (571)..(571): n is a, c, g, or t
  misc_feature (660)..(660): n is a, c, g, or t
  misc_feature (662)..(662): n is a, c, g, or t
tatgagctgaatgtctaatggatgctaagtccagttttcagaaccactgtacattccatggcacagttagcagtgcctgcctggaaaagttttggaggtcatcgtggaagttgctttgcctcctgtcagtgtcccctttccctgctaccaaaaaagtctttcaaggatggagctaaggtcaaaaatgagtgaaaaaacttgcagtgtttgtatccattaaacggaagccccctcactctgagaggtcactagaggacttcatagtggggttgtgctgcttatcacagatgcagacacttgcccagataggagcagagaaaagcaggggacgtttcctactcacattgtggctgtatgagaacacgatgggtacctgctttgcctgtcctctttactctgtccttggagaggtgtgaaaagctgtattgctacaggcnaatttatttaataattggaagcccatattgataatggatgtggtaatatttgtaaagtttaatctactttaagcggcagtaactaatggaatttttttccttgaccacatatgtagcacttttgctactttttnaaagatatttatatttgataaatctttttttcattttgagaactcaaaataccaaacagtgaacttgcattctaaagtcaccctgtgancnccttgtcatctagtagcaaaatgatgaactattcatgcatcaaagaaaattacatctgctggccttgtatgaaaatgatctcttggcatcccgattaaatgacacactgtcactgtg

SEQ ID NO: 380199 - DNA, 1055 bp, Homo Sapiens
  misc_feature (187)..(248): n is a, c, g, or t
  misc_feature (312)..(423): n is a, c, g, or t
acaaatatttccaaagacactttcatgatgaaatttgttataaaattagatggtgatgtgagggataaactttggcattcaaaccagctcaaatgtggtttattctacagtcttccccaattcttctctgtggaagagatgcgctttcaaattcttataagcttttctttctttttgacagggtccnnnnnnnnnnnnnnnnnnnnnnnnnnnnnnnnnnnnnnnnnnnnnnnnnnnnnnnnnnnnnntgggcttgaatgatccttctacctcagccttccacatatgtgcatgctaccatgcctggctcannnnnnnnnnnnnnnnnnnnnnnnnnnnnnnnnnnnnnnnnnnnnnnnnnnnnnnnnnnnnnnnnnnnnnnnnnnnnnnnnnnnnnnnnnnnnnnnnnnnnnnnnnnnnnnnatgagccactacgcccaggcaactttctcactttctacttgtattatagttattcatgtaagtgtcttatcttctgcattgactgtaacttcttgagggtagaatccatgtctaatttatctttgccaacatctggcatacagaattagttcaagatgagagagtatcccaaaatgaatgaagaatgcttctcagccaccaggagtgaggagaatgagcttcccatatatggccctcagaatactaagcccagtccttcttctcactcggttcagtaaactgccagaggcagcatacagggttggttaagagcacagtctgggggcccactggcttgagttcaaatccttccatgagatgttttgtgtctctggataagttactcaacctctcttacccctcaatattctcatcagtggtgtgggaataacacaggagtagcttaatatgaggagtagcacctaattcatagagttgttggggagattaaatgagttaatatgaataaagcagttgaacagtaccttgcacatagttagcagtcagtagatagtagctagtattattatttgtatgcactgcttctctgtggctctgattgccaaactttttaaatcatgaacaccatagta

SEQ ID NO: 380200 - DNA, 768 bp, Homo Sapiens
tctcagtgcccccaaaagctttacttggggcccgctggtttgagtggtgagaagtgcttggagtgagggccataagaatgtcagtgcagccgcagcactttcatgtcccatcttccatcacgccccatcttccatcacacctctcagccgagtctccaaggccccgacgtggctccacctgacctcctgcctgaggggcacgtggcaagggtgagatgaaggtcctcccgggcttcctggcgtgtgtgtaatactgggtctccaccgagttcccaaagcaggccatctatgaaagaaccttcaggcaaagccaagcttgattttccaaatcaaaaacaaagtggtcttctagagtgggcatttctgtttgagaaaatgctcttttgagggagagtagggggccctagaagggctaacaatagcagggaactctccaagtaggaggagaagaccatcatatacaactttgtggaatgtttctgtctttatgaccatgttgcaggactaagaattcatggcacacagttgcagaatcattgacaaggtaagctgaaacctcaagaaatcacctttttgtgtttctcccttcttatgcattaatagtcctagtcaaataatctgattccatgtggctgagaccaaagaggccaagaaaacaagggtgtttagatcttccctgttccccaacctccaaatctaggtgatcccatcagctgcagatgtcttgtctttgctgatcacatccaggaaagaattgctgaatatcct

SEQ ID NO: 380201 - DNA, 838 bp, Homo Sapiens
  misc_feature (31)..(31): n is a, c, g, or t
gaaatgcaaaggtctaagtctgactacaagnaaggccaaaattgcaccagcttcctaagtgaagaataatagaataaaacatatagagggcagaaataaaatgaggtgtatctggagaatttcatgatgagcatttagatttagcaatgcccaatgtcatgctgacactgtttgtcatgaccttgtcttcagctagtaatttggggttgtacttttttaaatttaattttgaatgttcttgcatgtttggtacctctctcctcactgctaaagataaattgtttatctgtataacataactacaccaatgtatttattgtatacgctagtacacaaatgtgttttttttattaagtaatgaagtatttgctgtgaaaaatgtattatttgtgccaccgtttatatctgtgtccattttctgtgtgtatatgcgtgtgtattcgaatctcaatttttcttttactctagtttagattaagacatatttagatgaaattttaaaaataacattggaaataggaggctaagttttgttgagtctcattcccttggggggaaattgcttttgccattttattttcatgtacaataacctaaaaaggatctcctactgacttccttcctaattattattgttttacacgaaagaaaggaaatacgttttcaattgagttgtttgaaatcattcactttgtgtagatttcccagactgatgtttcattgtaagaatattacattatagacaggttggccatttcacaagcaactaatccatagttttggaagcccgctttaagagacctgaatatctttgtttttaataaaatacttagagttt

SEQ ID NO: 380202 - DNA, 882 bp, Homo Sapiens
  misc_feature (270)..(288): n is a, c, g, or t
  misc_feature (731)..(815): n is a, c, g, or t
ctggaggtgccctaaggggccttctatccacttggctgcaaatattggtaggtttattacagagatgggggagtagactgattgatagcttcagttgaactgggattgagagaggtgtggttgtgagttattattgaggtcttggcctcttgtcactgttcataatccaggcttgtttttgtaaacaataggccactggcctccatgtcctgtccagatgcattgcatttgctcttggaatcccccctgcagttttaaccagatatgtcnnnnnnnnnnnnnnnnnnnaacacatcctattcttaaactgttgccatcgggagtgttaataactttgatcttcccagatttctctccagaagcacgccatttgactaaggtgcaaagtgactttaaatgtttaatttttggaaggttcaaggctgataggtgttaatagaaccatatctgcccaatttcttattggccaaaggatttctccaagagtgtctccaaaattaaacactttggatatttacaaacattgctcattgagatgatggtaatgcagtcggcttatttgggttctctcttcaaccttgccacaaacagactattttgctttgctctgatattttcccattgatactattcaggatcatagaattttataggtggctgagcatgatgtcttactccgagaaggtgcctgatgaatgcttatggaactgatttgaatagtttagtccttnnnnnnnnnnnnnnnnnnnnnnnnnnnnnnnnnnnnnnnnnnnnnnnnnnnnnnnnnnnnnnnnnnnnnnnnnnnnnnnnnnnnngcagatttaccaactctcaattctctattctgtatctttactatgaaacatcatctgaccagggtgg

SEQ ID NO: 380203 - DNA, 368 bp, Homo Sapiens
  misc_feature (108)..(108): n is a, c, g, or t
ccaatttccaccaccgggaaaccagctatgaccatggattaccgaaatttaatacgactccacctataggggaaattttgccctcgaaggcccaagaattccggcacngaggcagtcatgtgctgtggtgtgattgtttctggacattcataaaattttatagttaactgaattctcttttctgtttttttgctatttaacgtccattgaaaacatggctttcttttgcgcattctgttactttcagctgtactttctaataagaatggattgccctttttagcaatctttgattgaactggtacatttcagattacttaaatgtcatcaggccacacagcataccaggtaacagaaagccataaatt

SEQ ID NO: 380204 - DNA, 693 bp, Homo Sapiens
tggcaccttcccaggctgcccagctcagtctcttgccctgttcctgtgactcagctgcccactcccccaactttgtttccctccctcccagtctctgaaagtgtcaggtgtttctctcctcacagtctcttttgcagcaacagtaagacaaaattcaaggcagccttttaaagttacgaacagttattagcatgtatttacagacctaagcagaatgagagtttatacattgtttttagttgcctgtatttatagccaaaagtatattaccttaaaagttggagatctttctcttcttttcctaaattttggtaaagtgtgcttcatgaaacaaacatctggaaaactccaagtataagagaccctggactgatgatgcccagccaagtatatggagggacagagttctctctgtcattaatgaggacatcggttttcacaattgaacctcatgcactgtccacagcatctcacctagctcctgtatctcctgatctgcttttaaaaatagttagttaggctgcctttttacaccaccttctctctctccccttgtggtaattttccagccttccccatagatataaaactagaacacctttatgatttggggtctatgtaatgactgaccgataagaacccaggcagatgctaacatacttaacagctcgcattaaaatactttaaatcagg

SEQ ID NO: 380205 - DNA, 839 bp, Homo Sapiens
  misc_feature (220)..(240): n is a, c, g, or t
  misc_feature (260)..(306): n is a, c, g, or t
  misc_feature (308)..(308): n is a, c, g, or t
  misc_feature (393)..(460): n is a, c, g, or t
gacttaataaataaaatccactaatgcccttcaaccatggttaacacatatcaagctatataagtagtcttatggaaacccctgtcaccggaattgagtgccagcttacccaatccatttgggtggtgaaggttggtaattacagtatagcatagctctctctaaattaatcatcctcaaaaatctcttcaaccttccaaaaagccaaacatttcgagcnnnnnnnnnnnnnnnnnnnnncagagacagggtctcactcnnnnnnnnnnnnnnnnnnnnnnnnnnnnnnnnnnnnnnnnnnnnnnngnggactacaggcacacacgagcatgcccaactaactttattgttttccaaattctttttacaggcaagtctcactactgctcaatnnnnnnnnnnnnnnnnnnnnnnnnnnnnnnnnnnnnnnnnnnnnnnnnnnnnnnnnnnnnnnnnnnnnatgagccactgctcctggcctttttatgcaccttaataagggatgcagtcatctaacatatttttgactgtttcctttgaaaatttgcatctggattatcatatcctctggaatgtgccctctgttgtatcttggtgtctcaattgaaatttgtggtatttatatacattataaagtaatgctacatagagaaacatgattatttttatgtcagtttctaggaaataattatctacccacatatttaccatttgaaaagctcttcattctttcttaaatatctgaatttccatctgttaccattttccttctgcctgaagaacttccttttgtattttttgcagtgtaggtctgctagcaataaactctcttggtcttc

SEQ ID NO: 380206 - DNA, 436 bp, Homo Sapiens
aaaatcctgggataggcacaacccttttggcaacaaagttatttttctccttagtttagcttaatgtctggagaacagttttattaaaacaaaggaaaactcaattatcatgcagtgacatgcatataccagaaggagcgaggaaaaaatattaaagggtatctgattcctccttctagcttggaagtgaccaaaatttttgcttttttaataatcatcacattataaaaagtattcagcaaaatactgtctctgcaaagaaagattttacccttcagctgaaaaaatatgggccctcctggcaaacttcatcttcttctctctccttctacaaaaagtccaagtacctggaaattcacaaccccctgctcttcgatatcccccctttccactagagtccttttagtattatttatccaccaccaaaaatcaaacc

SEQ ID NO: 380207 - DNA, 417 bp, Homo Sapiens
gtgaacaaacaaataaatgtaaagcataaagctataatttttagaagataacattggaaaaaatcctcaggacctaaggttcagtgaaaggtttttaagacataaccccaaaagtaccattcataaatggaaaaattgatgttagacttcatcaaaatttaaaattcatgttctctgaaagaccttggtaagaggataaaaagacaagctacagactgggtgaaaatatttataaactacatattcagctaagggctagcatctagaatatataaagaaccctcaaaattcaacagttaaaaaaagttagaaaatgggcaaaaaacataaagagacatttcactaaagaagatagatgacagataagcacataaaaagatattcaacaatgcatctcagaatgttcctccaaatttg

SEQ ID NO: 380208 - DNA, 719 bp, Homo Sapiens
  misc_feature (32)..(32): n is a, c, g, or t
ctcagtggtatccgcacttcagcgaggctgtntaactgccccatgctgtctcactgtgggacacaccatctgcagcaagataaatttgaatgtgcagtgtagcatagtaaacgaaatttatgtacagcaaagggaaaacagttatcacttctttttaaaaactaaacatggatgaaaattgcgtgtcagcatcggagcatgtcaagattgggagcagcaagagagatttagcccagccctcatctttcatgaatgaggaaaccaaaacccctaggattttaagaccccagttgggaaaaggatgttctaaggagggttctgaaacctaaaaactcatctctgcagtgccttggtatctgttatttattttgagttagtagtaacttgaaaagtaccaagtcttaagttcctttagtgttaataacttagtagatttttaaaaattctttctcttttcttttcgggaaataccaaaatgagctccagtttacgttaaatataagtattatatggggtttcatgctctcttcatattcctaatgatgttacaatggaaatcttcaggtggaggagaatactccgactttctcaccgtgttctgagccttgtaccagagcagggagtggttgtgggaaagaagtcatggcccctcaggaggatgaaagggtggacatgcaggtgacaagagaaagcgccagagacaagaaaggggaaaacta

SEQ ID NO: 380209 - DNA, 741 bp, Homo Sapiens
  misc_feature (87)..(362): n is a, c, g, or t
ctatactttgcaaagtcccagcccaacaatcctaaccactccttcactttcagactaattctatagttctattttctccaatatggnnnnnnnnnnnnnnnnnnnnnnnnnnnnnnnnnnnnnnnnnnnnnnnnnnnnnnnnnnnnnnnnnnnnnnnnnnnnnnnnnnnnnnnnnnnnnnnnnnnnnnnnnnnnnnnnnnnnnnnnnnnnnnnnnnnnnnnnnnnnnnnnnnnnnnnnnnnnnnnnnnnnnnnnnnnnnnnnnnnnnnnnnnnnnnnnnnnnnnnnnnnnnnnnnnnnnnnnnnnnnnnnnnnnnnnnnnnnnnnnnnnnnnnnnnnnnnnnnnnnnnnnnnnnnnnnnnnntttcaaaagtacaggtacctgtcatttgacctaagattcgcttcaaagactttctttgacttccaatttataactctccccaataatccctttcctttttgcaccacacatttaataacctaggtgcagaattctagcgctatatgcagtccttaattcacatttcaaacctgaagaacatgtgcctacttctcaggcagacaacatgtaatgctaactgaaaaaatgtcactgaaatttgttatatttattgaaatcctaagtgatggatagttctgttgccttttaccatttccaaggaaaaagagaagctataataatagcaattgacaaagatactctcatttttcctttaccagtggtactagatattctcgag

SEQ ID NO: 380210 - DNA, 801 bp, Homo Sapiens
  misc_feature (75)..(86): n is a, c, g, or t
  misc_feature (243)..(514): n is a, c, g, or t
gtcagtatttaatgatattttgtgttgtgaagggaacaacatgtaattgtcaggcatacgttttttgcctgtcgnnnnnnnnnnnnaaggtatgtgacatggtacaattacattgtttttgttcagtatctactataaaacatccacttagttcattaggaagtaatttagaagaaataacttactgggtttatttactaagtatccttggatggagattaaataatagataattgaagagtnnnnnnnnnnnnnnnnnnnnnnnnnnnnnnnnnnnnnnnnnnnnnnnnnnnnnnnnnnnnnnnnnnnnnnnnnnnnnnnnnnnnnnnnnnnnnnnnnnnnnnnnnnnnnnnnnnnnnnnnnnnnnnnnnnnnnnnnnnnnnnnnnnnnnnnnnnnnnnnnnnnnnnnnnnnnnnnnnnnnnnnnnnnnnnnnnnnnnnnnnnnnnnnnnnnnnnnnnnnnnnnnnnnnnnnnnnnnnnnnnnnnnnnnnnnnnnnnnnnnnnnnnnnnnnnngggaaaaaaatggaaatgtttaactcatatagaaattactgtattagatgtgtgttttgttcagttgccctgccagaagaaaaccctcagctagggtcaggcttagagatgatgctctagtaaacatctgtagaatgaaagtatgcgtagatggaagaactcctcctaattagcagtgtttgcccattccagtgttctgcatggaatcagtatgtattctactcattgcctgtaaaaagtttgaagtttaaatttgtgtagtaaaagcatctttgatatttctgttg

SEQ ID NO: 380211 - DNA, 1010 bp, Homo Sapiens
  misc_feature (12)..(12): n is a, c, g, or t
  misc_feature (562)..(585): n is a, c, g, or t
cgctggcggagnacgccggctgctcctcccctccccgccggtattaatctctggagaagacacatccacagttagcactttcttcagatgctgacgctcggtgaacagttgcctttggtcacaagatttagaagacacagtgtccatcctcccagattggatctctttttcatatggatcttctgtttctatgtctttttaaaaaataactttttgggaaaccttttggattacaaccgttcatcctcacctatgcaaagaaagggaagctattgctgggattttgaggagcttttcctaaaaggattgtacaccttagaagtgcttaaggaagagtgatgaagctctgaatcgtgtcctgcagcagattcgagtgccacccaagatgaagagagggacaagcttgcatagtaggcggggcaagccagaggccccaaagggaagtccccaaatcaacaggaagtctggtcaggagatgacagctgttatgcagtcaggccgacccaggtcttcatccacaactgatgcacctaccggctctgctatgatggaaatagcttgnnnnnnnnnnnnnnnnnnnnnnnnatgtctaccaggagaggagggaactgcggagcgggtaagtttgtaagattttgtttttctggtaacttactggttttcatacctaggactctccagactttcctttggtaactaaaaagatatctcagcaaataccttaaagttgtggtaaaagaatttttccccttttcaaatgggtaaataataattatagctaatgaatgaatgcttagaattatattcctatttccttcctaacatagtgctatattttattttatcctttcgttaaaaccttaagtatatttcatgtattctttctgtatatttgagggtcagttttatggtagagcaataaagatgctttgtttcttattgttttgattttgcacatggagatggctttcttacattaatgaatgtagtgaataaagttctagaatctg

SEQ ID NO: 380212 - DNA, 1105 bp, Homo Sapiens
atttcggcacagggagcagattggagtgacgttactttaagggtaactttgaagccaatctaattcatactcaaaaaagtattccaaaattttggtactctattatgggttacaaaccccttgtgacaccatatttaagagccactgctattgaggcttgcactctcttgcttgaaatgaggtgctcccaaacctgggagatggctcccaaagaacaagagaatcaaccccatcgtgcatttatgtgctgccccagataatccacaggcacaaagaacttgagcttcctggtgtgttcttcagaaaaaaaggaattcaaaaagcaaatgtaaaatgcaacagaacttggcctcaaagtgatgttggaaaaatagccagtcctgatgacttggtcgaggtaacttgctttgcccactgttaactacagagccatatgataatggaacatcaaggttttccagataaacccaaagccttttgtgtctataccttgtaacctgtcatgttcatcaacgttttagactgtaccattgctctttctcccttctttattcattttatatgggggacgtttgactaggatcaccagatgtagatttgggaatttttccataccattaagatggtatgataatggattttattaatttaacacaaatgcataaaaatatgatgtaataagaaaccaatcctgaaattattaaaacatttctttgtccttacttaaacctaacctgccattttaaaagacacctaactctataaacaaatgggccattacagacggtaaaacaaatattattcagtgaaatttattcaaggacttaaaatgattgaaggcattaggaacataaaaatgcataagatcctcttttaaatcccaatattccctaaccactggtttataaaaaatactctaaggtttatagaattagtttggttccgttagttgatcaagttacttacactaagtcagcaattcaaaacaaataattccctctgtgtgtgtttgtttgcttgcaaatatgtttcattttaaagtgtctttttatatagaaagccaagttggtggaatttatcttgtcattaaaatgatgtgaaaatc

SEQ ID NO: 380213 - DNA, 522 bp, Homo Sapiens
  misc_feature (356)..(356): n is a, c, g, or t
acttgaggctctgagagctgaaaacacttgtccaaggctctcacgttaaggtcaagacactaactcaaatctttcaagccccgcctctcctcttggaggacagggcagcctgcagctgtgtccaggcccaggccccaccccataacaggtggcctcagccacacaggttctccccaaggggagcagcccagggccaagccccgctgccttccccaggccacagtgcgtccagtctcctgtcctgccacgtgtcttttgcaaagctccttggatgtggagacagatgtctttactagagctgaaaggcccccttgacacatccaggccaacctcccatggaataggtaggcaagccnaggactccgggaaggaggtgcagccaggatgctctggtggagctgccgatggggccctggtgtcagaactccccaaaggcctgtgcgtccaagtggagtcaggttttctattcctttctgtgtttgcaaattcagtgttaactaaataaaggtattttgtttttca

SEQ ID NO: 380214 - DNA, 1051 bp, Homo Sapiens
attcggaacaggcacagacaacaaaaacatttgatgtgcccatgacagctgggtttgcttcacgatttgtgtaggacacgtcttatatgtgcatgcactgttggcagcagactgcagagagtcttaagggttttccagtatgacttgggaattgcaagctgatgataccatggtaccacaacctgcagtgtggcaagcctaccagcaccaggtcaagtgtgtgtctctgtttgatttcctctattcaaggggattgaaacaatgatttgagggcaagtcatttatttggaaggtgatctcaggaaaaactgttggagagcagggaaggaagccaataaaagatttgtcatcaagctggttacctctgcaggcaagctccatggggaaactggtagaacgtacacctcagggttatcccacccaaggagagagggagctggggtatttgtacacccgatacagtcagccttgtttaaaggaagatgcagagaggaatgtctgacctcataaacagagcccaccatgttagtgagccaaggacgagagatgccgagtctctcagagcatgggaggaaaggtaagctttgggctacaaacgttgcttcactgtttggtggtgatgactatgtgagaaaaactagacacttgtcttaccatatgtgaaaagttgtaagaccaaatgtaacatcaaagggcagggtcttttcagaactaagcctagaggaaattgccatcctgggtcaggatgaaacgcccgttctaagtgagaatgtgctgctgactgtggtgcacagacagcacaaattccatgggtttgagagaaagatgtaaatgacagcaaggtagaatgcagacctgcagacgctttaaacagcctctcacgtgagagcagtatttattaaattattccacagatggctaagatctctcaagatactaggtttatcaaaagccaaataagcttggggaatgtcaggtccctggttttttttccccaccggaattaatggtaatggatcctttactttccactgtacgattaagactctct

SEQ ID NO: 380215 - DNA, 713 bp, Homo Sapiens
  misc_feature (392)..(392): n is a, c, g, or t
  misc_feature (537)..(545): n is a, c, g, or t
atgtttgctttaaatttagcaatagaataggcaatggactgctgctgcatttccttagtttttcattctgaaacagagcaaaacatcttcccaaagagatggagacaatctcttctgggtagattccaagtataacctgtcccagggtcctcttgctcagctgtgactaacaaaagtctgttcaatttaactacttagataagaagcgcaatgcttttatttaaaaatttaatattttctatggggctgtattttccaaataatagcaacaaaactgtcctaacgttttcactgttctgtaattttgttttaatatagaggatacccataatttcttaacactggaaacatccattctgaacgatgtaggaagcggtcagtaacgtgaatgnatgttattgtaccgtctccagctttttccttcttcccccagatggtcgcacctgtgcatacatccctgtgcatgtgggggcacatgagtgggaaagtgggtgtcactcctattttctgtcctagagtgtcagcgttggaagggannnnnnnnngttcctccagtccggccctctagttgatagtccagtagtctgttaacaatttgtaaggacctgggttatattttaaaggtggttgttgttgttgtttgggttcacttatgtatatgcagcttgactgttcaacccagatttttaaacaataaaaagatttaatgtata

SEQ ID NO: 380216 - DNA, 578 bp, Homo Sapiens
  misc_feature (450)..(450): n is a, c, g, or t
ctgggattacaggcataagccctgcacccagccaattggactcctttgagtccttagggagtcaatgtgtgtgttgctgcttatttaaatacagttcagttggagccccaagagtgccaatgtgctcctcacaattcccaaatgcctctcttcctgaacaccagaagtggtgggcacctgagtgggaaatttcaggcaacttaatttagttcctcagtgcctactcttgaagaactgggttttcattctagagaggaaactcagggaagggcgtgttgcctatcacaggttcgcatactaagttttaaaaacttttcttggtgtgacttatgccaaggaattatgaagactttttccttgagcattgcatgaaggctacaaagttggaacaggcatgtcctgggtgtgaaagttttaatttccctacctcatttaattatttaatttagnagatgggggtctcactatgttgcccatcccggcttccaactcctgggctcaagcaatcctcccacgtcagtctctcaaatagctgggactacaggcccacgccaccatgccctacttcctcatttatt

SEQ ID NO: 380217 - DNA, 781 bp, Homo Sapiens
taaatatcttaataatgaaaagaagatgtagataaaaattccataggaagataggaattttacattataggtttatttctagtcaagtgcagaatgttactcctttctctgaccgcaagtatatcaagttaaatatcagtatcaaaaaaaactatactcatacatttaagaaaagtttctcttttataaaattatcaaatattataagcaataatgaaatagaaatattaattttaaagtcagaaacaagaaaaacaagtccataatcaagatgtctatacaacatcaaatttatgtgtatttatatttttagttttaaaatgttatcttcttggcctttaatgtccatattctactgagcttattctaactaatgcaattctttgcccagtttttgacaccttactgatatgatgattcccctcctcataattaccttccttcttcactttctcccttccccatttataaaaactgtactacagtttacatcttgttatgcagcagtgaacaagcaaaacctttgcttttagccaacatttgaccatttctcttttaatgcattaatgtgatgactctgtgttactaggatttctaatgttaagtaatgcctccttggatatatcttttagtttatgaattaaactaaattaaaatgttaagggtttgtttaataacttgtatatttaataacaattggtattactggttgataacaaatattaaaggttagttgaatagtaacaaagggtattatgaaatatttcaaaagtaaaaaatg

SEQ ID NO: 380218 - DNA, 992 bp, Homo Sapiens
  misc_feature (21)..(21): n is a, c, g, or t
  misc_feature (187)..(196): n is a, c, g, or t
tgacgtgctctgcgtataatnctgaatacgtgccataatgatcaactggctaacgcatttttatttgtcctcaatcaaccctctgatagtcctgaaacagatgcttttaaatgggaactgcggctcagtattttttacaaatatgcacaataaaagagaaacagtttcaaattacttgtgatatttnnnnnnnnnntaagtcagcaactaacagaagaaggtttccactgacattcaagagtagcaaaccatcccaagattaacagtttgtgcaactacatttttttacactgctttttcttctttataccaaattaccttcaccaccagactcttcaatgcaagaccagccctgggctgctggttcttaatttgaaccctttatttctttacttctgtgacttcatccagtcccttggctttaaataccatttaaatgctgaaggctctacatttctacctttgtgcagcactcaactcatgcacccagctgcctcttgatagtgatgtctgatgggaatctcaaacgttaacacatcccaaactggagcccacaacttcctgccaggcctctccctcctccagtgttcctcacctctgtgctcaaggccagaacgtctccatctccctgcacccccacatccagccgagctgccagccaagccaagtgttacgtctgaattacgtctcagacttgaccacgtccatctctgctggccatttctcccttagggttctgaagtggcctcctaccttgcctgcccacttcttttcaccacacttcagcctgttctctgctgcatgcctccagaatggtgtttaaaaaccaaccatccttttggggtgacagaaatgtttgggaagtaggtagaggtaatggctgcacatcgctgtgaatgcactaaacaaccctgaattgtgcatgttaaagctattaactgtatgttatgggaatttcatcttaagttttaataaaagatttttcaaagcct

SEQ ID NO: 380219 - DNA, 1040 bp, Homo Sapiens
  misc_feature (11)..(11): n is a, c, g, or t
  misc_feature (622)..(622): n is a, c, g, or t
  misc_feature (930)..(930): n is a, c, g, or t
ttataataccntatttttactttaccttttctacgtctagacatgtctagtaccgaaatgcattgtgttacagttgcgtacaatattcagtacagtcatgtgctgtacaggtttgtagtctaggagcaataggccacaccgtatggcataggagtgtagcaggctagaccatctaggtttgtgcaagtacacgctatgatatgcacacaacaacaaaattgcttaagaacgcatttctcagaacatatccctgttgttaagtgacacatgactatacttgcagagttgtggcagggctaaggcagccacaagggatgctgaagaccttttctccccaaaaagagttggaccacagatagagccatgagacacacaaactctgacctttgatagcaaaacccagctactcacaaagccaaggtccagcaggaagaatacattccccaacatctctgcctctaatctcctgccagctcctcccaatggtcaaacccagctagaaaccagagggcaggggaccagataatgtgcccatagtcgtcagcatcctggggcctggccacagagttggtcaaggggaaagagtggatcaggaggaggcaaacggaggggaattaaccangcatagcccaattagaatcacctggagaggttgacccacatcctgattcatccctgaaaacccagcctgatctacttacgaacctagagtcactcggaataaacatgcacacacactctggccatagtgaaggccgtgctgattgtatcttcaggggagtaccttgtagagatgtgtgtcgggggtcactgatgtgacacaatgaggtgctggggcccaaatctctctggcatgaaggaagcatccatgctggacagctcagaaggatccgggagcagtctagaaggtctcagagcaccttggataantcccaggaggagctgttctcaggcactgtcagaatcagagttgcctgatctcttcatggccaatgtccatggttacactgtttctttacaaataaaaatcaaattctgca

SEQ ID NO: 380220 - DNA, 596 bp, Homo Sapiens
agaaatctttctacacaaacatacattcagtattttgcaagtaggtttctttcaaggcatttttgccctaagaatacattatctaatgataaactgtaagttgtcagtacatttctcaattagaacatagttttcaaactctcctgcagagaatttgttttctagatttgttggtagagaacaaatttttattcttcacatttttatgctgccacatatatagcaaccagaatgttttttataatcctccagtagaggatttttctaatccattgacagaaacaaggtttattcatttcatttttaatagtactcttaaagtaaccaggatctttttcttaaaccagaaaaaattagtcacttttaatctgttttcattgcatgtcagtgtattgagggggaaagtctggaaatttgctatattgggcatgaaggacatgagtttaacatacgcttctaattccagattcttttgtgatcgacatttgatttctaactatctaaaaatagtatgtcaaatatgttttactcatatagcatcattttttaaattaacttctctaaactttcaaccttgtttttaaaaattgctattt

SEQ ID NO: 380221 - DNA, 695 bp, Homo Sapiens
  misc_feature (16)..(16): n is a, c, g, or t
  misc_feature (33)..(33): n is a, c, g, or t
  misc_feature (35)..(35): n is a, c, g, or t
  misc_feature (51)..(51): n is a, c, g, or t
  misc_feature (95)..(95): n is a, c, g, or t
  misc_feature (413)..(413): n is a, c, g, or t
taactaaaatagctanccgaaaagctctctttncncttaataccaaccaancaaaatggcttatttgacccaaaataaaaatttgattaaaaaanctcatagctccattgttcttttgacttaacattcatgttgccaagtgtgaaaggttcactaaactgaacatggtttcattgtctttttcttcataagaaggttttgttaagtcgagccgtttctgctgtgccagttttatggtgaggtgtccagctttccctccaatcacacttcccattggtatgttatgaaacagtttatggccttcattaactttgatgataataattaaatgaagctgtgaattacatccagagccagctctctggggtgttcctgattcagtttccacagacgatcaagagaccggttggtcntaactaagccagagtccagaatattgtgacttaaatatctatcttctgaaaatagaagtctgtccatagagaaaaatataagaccagaaacaaatataagtcaatatggagagatccttgcgatgagcacagagactgcagtagaggaagcttcagaggggaggctgtgcttcctctgggtgtcagccaccgggcatctcctagggaggctaaagaaggagtggaaaatggcaaatgtctttgttaaagagtccctctgaagcacaggtaaaatgctttcgg

SEQ ID NO: 380222 - DNA, 704 bp, Homo Sapiens
  misc_feature (519)..(519): n is a, c, g, or t
agaaagaaggtcagaaaaacacagagatcaaaattcaagtaggttcaaattggagagatcctataacaaagtacacatcagacaaagatgttccttctgaacaaaataactacagtagagttgcgaatgacagagaccaagaaatgcatatagatttggaaaataagcatggtgatcccaaaaagaagagaggagagagaagaaattctttttctgaaaatgagaagcatacacaccgaattaaagacagtgaaaatttcagaagaaaagatagatcaaagtcaaaggaaatgaatagaaagcactcaggctcaagaagtgatgaagatagatatcaaaatggtgccgagagacgatgggaaaaatctagcagatactctgaacaatccagagaatcaaagaaaaatcaggaccgggcggaagagaaaagtctccagcaaaacaaaaataattctacaaaatgacataaactggacatgccttatattcagttgaaacaaattattttttactttgacngaactttatagagaattcttatataaagtattggtttgtatttgtaaatttaaaaaatgttttcattttaacatgttttataattgatacatctcaaggccctacccataaaattatttgaaaactttcaccagaaagggatgtaagtctcgcttatattttgtgaataaaatgatcaaaagctc

SEQ ID NO: 380223 - DNA, 761 bp, Homo Sapiens
atgtgggccattaggtgatgcataactgtaatatctaatatttaatttattagatagttatctcaaacatttagtatctagtaaataaacttattttatattactatctaggggacttatttgaaaattactgcagaaatgatgacctggtaacatttggaagattttgttatggtgtcactgtcattttgacataccctatggaatgctttgtgacaagagaggtaattgccaatgtgttttttggtgggaatccttcatcgggttttccacattggttggtaacagtgatggtcatcactgtagccacgctggtgtcattgctgattgattgcctcgggatagttctagaactcaatggtgtgctctgtgcaactcccctcatttttatcattccatcagcctgttatctgaaactgtctgaagaaccaaggacacactccgataagattatgtcttgtgtcatgcttcccattggtgctgtggtgatggtttttggattcgtcatggctattacaaatactcaagactgcacccatgggcaggaaatgttctactgctttcctgacaatttctctctcacaaatacctcagagtctcatgttcagcagacaacacaactttctactttaaatattagtatctttcaatgagttgactgctttaaaaatatgtatgttttcatagactttaaaacacataacatttacgcttgctttagtctgtatttatgttatataaaattattattttggctttta

SEQ ID NO: 380224 - DNA, 912 bp, Homo Sapiens
  misc_feature (542)..(542): n is a, c, g, or t
  misc_feature (562)..(562): n is a, c, g, or t
  misc_feature (791)..(808): n is a, c, g, or t
ttttatttgacccagttttttccaaactttttgaccacagaacccctttctctagcaaaacctaacattctatgccgatccaacttaattgccaggcaactcttctgcactttacattaaacagacaaacttatgttaacaaaaacattaggcctagagaatattttaccagaatttttatactgaaatacagttcactttttcgatgctttaaaaataactgatatttttatgatgaacatgactgtaatatgaatatagtatagtagtttgcactggttaacttacaccccagttcttttacgatgatgtaaattattgaataatgtacactcttaatgtataagtgcttttatttatacagtaaacatgtttccatgtcattttgagaatttttttaataaacattcaaatagcttgctgtaaagttttgtatcatacaaaatctgttacatatatatatattatgagatgcttcagttcaaataacagtgcagtaattcacctatatctaaaagactgccaaattattaaaaggtcanggtattgcacttctattctngagtggcagtttacacattttaaattacatcaagggtaaatcaatagtatggaaatcttaatttggtccactttaaatgtaatttcaaggatttctcatttgacctatttacacatgcatccagaaaaaagtaacaaaaaatgtagtcaagttatgtttatttccaaaaaaggcatttaccctagaagaaagtagaatctgttaatacagtttaaagtctgtggagttnnnnnnnnnnnnnnnnnntcaatttgtgattatttctttaagtaaaatataagacattaagtttgcctgtaatcttatggcattactaaactggacaaacaaaataaatactctttgtcgga

SEQ ID NO: 380225 - DNA, 773 bp, Homo Sapiens
  misc_feature (52)..(52): n is a, c, g, or t
tgttcccagatggcatcctggatattggcaatgcggttttctcctgggacanagtctctttcttcaaagcacaggttgaatctgttttggtcactgtattgagtgtccaggtgtttgagcaaagcattctgcacccatgtgaagtctttgctgctgaagcacaaataggcatcatatttgtacatatcaggttctgtgccctggggatggtccttgaacaccagtctctgggctgtcttataacagataaaacagaagccccggaactttgtgactgtgaggatggtcatgaggaacagagtcagagtgacagtgcatacaatgaaaagggagaactttagggactttaagacttcctcttcatcacaaccttccgtggaaagagagaagagggaaaccccagagaacgagtcagggtacacacaatatatgtctgcaggaggcccagctatagtgacattggtgtgattaagccaattgataaaagtgctaagttcacattcacaaatgaacttgttatgagttatatccaagacactaagtgatacaaatacatcaggattaggagctaggagctggttcctggatatgtccaggatctctaaattagcaggtaaatcattgtgagaaagaactgtcagcctgttggagttgaggcttagtccccttaatgcagtcagatggctaaatactcctggtggaagggaattaagatagttatgattcaaatacagaacttgaagatgagaaagtccctcaaaaacatcccaaca

SEQ ID NO: 380226 - DNA, 759 bp, Homo Sapiens
  misc_feature (21)..(21): n is a, c, g, or t
  misc_feature (213)..(300): n is a, c, g, or t
  misc_feature (614)..(715): n is a, c, g, or t
tgatcctctaaccctaaaatnaagccaagcagaaaggtaattcatctttccaaagatgtagtaagaactaaagcaaatctctgggctattttacaagcaagtattttttattcatgggctggttgtcacaaaactttctagtaaatcaagtatcttctttcaagaccctgattttttacctaaaaaaatccttctgctttatttgaaccaacnnnnnnnnnnnnnnnnnnnnnnnnnnnnnnnnnnnnnnnnnnnnnnnnnnnnnnnnnnnnnnnnnnnnnnnnnnnnnnnnnnnnnnnncaagtttccatagacacccaggaggttccgatgcagatggtccacgaccacgctttgggagcactgtctagggcctacatcttcaatgtaaaccctcacgatgcccttggctgagtggaactcagtgacaatcgaacattccactgagacctaatatccttcagatgagtctggcatctggaaggcagcatgctgtggaatctggcttgttggaagacagaactgtgttctgctgtggccgttgcaattactatttccagaataattgtgcaagtgcctcgcctctctcagcttcaattgcctaatctgaatgnnnnnnnnnnnnnnnnnnnnnnnnnnnnnnnnnnnnnnnnnnnnnnnnnnnnnnnnnnnnnnnnnnnnnnnnnnnnnnnnnnnnnnnnnnnnnnnnnnnnnnaggtacttcaagtgatcagtaaataatggatcctcggtaagtgg

SEQ ID NO: 380227 - DNA, 872 bp, Homo Sapiens
  misc_feature (88)..(107): n is a, c, g, or t
  misc_feature (646)..(659): n is a, c, g, or t
  misc_feature (714)..(758): n is a, c, g, or t
gaaggacaaggaatcctttagcacagtggtggtaggtcgtggatagtgggtcatctaagcatgacattgcagagatcagagcaggttnnnnnnnnnnnnnnnnnnnnccccctctccattcctgattatgttgtttgagtcacttgaagccagctaacagattccatttgcttaaaccagtttccattcattcatttctttgaccaatatatactgatcacttactatgtggacaatttctaggaaccatttgagctaggttttccatgagcataattctaaatctaatcttaacctaacccttagtcataaactagaactctgacccttttctagtgaagagcttttagtggcaagaaacaaagtcctggaccactcacactgacccagtccaaggggcattggtgtaagaatatgcatgaatcactaagtgaaattccaggaatattacaaagattttaccagcaatgggcctcatgagggacctaactgatgaggaattcaatccctccctactacctgtgtcttcaaagattctgaatgtcaaaaaccccaactaataaagagatccttaaatgattcattccctggacaaactccgtgaccacctatatagatctttaataggaatctcccctggacaaannnnnnnnnnnnnngactgagtcttatactctgcactccagcctggtgacaaagctagactccaactcnnnnnnnnnnnnnnnnnnnnnnnnnnnnnnnnnnnnnnnnnnnnngagtatcttagccaccacacccagcctaagaatggtgtctttcaaagagcaaaagtttttcattctgataaagtcaaaatgaaatcttaacctaaataaacacaatcttaacac

SEQ ID NO: 380228 - DNA, 510 bp, Homo Sapiens
  misc_feature (41)..(41): n is a, c, g, or t
  misc_feature (49)..(49): n is a, c, g, or t
  misc_feature (73)..(73): n is a, c, g, or t
  misc_feature (86)..(86): n is a, c, g, or t
  misc_feature (416)..(416): n is a, c, g, or t
  misc_feature (418)..(418): n is a, c, g, or t
cagtagtaggaggattgatcctcatcagtaggccctcatgngcccattntgtaaaatctttgaatattcctgnatttcacttagtnttcatgcatattcttacaccaatgccccttggactgggtcagtgtgagtggtccaggactttgtttcttgccactaaaagctcttcactagaaaagggtcagagttctagtttatgactaagggttaggttaagattagatttagaattatgctcatggaaaacctagctcaaatggttcctagaaattgtccacatagtaagtgatcagtatatattggtcaaagaaatgaatgaatggaaactggtttaagcaaatggaatctgttagctggcttcaagtgactcaaacaacataatcaggaatggagagggggtctctctctctctntntctcaacctgctctgatctctgcaatgtcatgcttagatgacccactatccacgacctaccaccactgtgctaaaggattccttgtccttcc

SEQ ID NO: 380229 - DNA, 462 bp, Homo Sapiens
agtaagttaagtagtatagacctagagatcactgctttaccattttactcctcaaatgaatgagagcgactgctagtggcagaacgcagaaaaggggaaaaacaagccatgaaatgaagttgctttcctgacctgggtttaggtcatcattttaaaatcaaagatgtgtaggagatgaatcaacttatagacccatattttccttctaaaagtttcccaaagaaatgttatagattttgaataacatgccagtgacccagcaggtccaagatggctaaccaagatggctaatttagccacattgaataacttacttttaccctcacatggaaagttggtatctattgctaaatgatttcaaggtcactctgacagtctttgacactgttttttttagggttttattgttttctggtctcctggtgtctgtcctcagaattaaagcatgtcctgcatccctaa

SEQ ID NO: 380230 - DNA, 614 bp, Homo Sapiens
acaaataacgtataatagtctgtgcctgtgcctcaattttctcatctgtcaaataggggtgatcctgttcctatatctcaactccttctgacagttgttagagcaggagttgctcaggaagaaacgtaaattgttatctatattttttccagatctattttctccttgaatgctcctaatctagtaaaaggggaaagccacatgaaacaacagttacagtaaaaagtgacaccagggatgtatgttggcaatggtccaggtatgttctgagaattatgagacgtctacgtgatgaggtttgaggagattcagcagaagtggtgaattaagtcaaaatcaattaagtctaggaggatttattaagtacccacagtgtacacagcttggaagtgaaaatttcgatcaaacagacctctgttttcgtccttgtgccacgtaagttgttcagcagttatttactaagtgactaagctgactgggtgtatcagatgttcccagcctcagtttccccatagtttcaaaagctctcaaggtctttgaaagtggggaagcaataaaggctgtggttagagtgggtgagccgattcttattagtccatttatacaggtctcag

SEQ ID NO: 380231 - DNA, 676 bp, Homo Sapiens
  misc_feature (116)..(174): n is a, c, g, or t
  misc_feature (613)..(613): n is a, c, g, or t
  misc_feature (616)..(616): n is a, c, g, or t
aatttaacacagcctttggtaactcttcctggtagtatgacctcataatcgcatgtgttggatgtctcaaaatatgctttttaaagattgctttaaaaagcaatacagtagtactnnnnnnnnnnnnnnnnnnnnnnnnnnnnnnnnnnnnnnnnnnnnnnnnnnnnnnnnnnnacctgagggatgttccactctgacagttcattgagctgaatatttatgatggcttgtggccttttcccatatagatgttatatttcagtaaaaaaagttaacagaaatataatttttaaaaagtattacattaagtgatgttttgaagtcatgaatatactcaggcagggtgcatgcaaaaaaccaactgttctagtgtgatgcaaaggaaacttgtgacttaggataaagtttccaaggactgcatcatctgtgaattcaaactgtgctgtgtcctctcccaagcccttcgcttaaactgaagagaaggacatctgttctgggaaaacatgtaagatggctgaaaaagtgatccttaatgatgagaaagacactgcttgtgttgagtatgcataaaattgcttcataatttatgagaatggaaaagacaatatttatnagntatatatttttatatgatatatgaatttaaatatatgtccaataaagtccattaactcat

SEQ ID NO: 380232 - DNA, 545 bp, Homo Sapiens
tcattaagcagcaccataactatcatctagtgattagaattttatttttcctaaaaatatgaggcactgtttttgttttggacaaaactacacatttttctttaaagatttacaaactcctatgtaatttgaaagttgctatactgggagtaatctgaaaagcttagaaagttcatttccttttatatttccatcttaaatgtgctgctttttctattcggaagtttacaaagaaacaagtaaatgggatgtccgtgcatgtatgcacatgctcacacgtgtataaatcagtgtccatttaaaaaatattaacatttaggtaaatagagtattacatattatactctttagatgatcaagactctaatctgtgttgacacttcagaatttattaaaagatcttcccttacttttcagtaatttaattagtttctttaagcctgacataacgaggaggagcccaaacaacataatcaagttttaccttgggaggaaaaaaagttttacctgctagaaagaattaataaaatattgctatacattca

SEQ ID NO: 380233 - DNA, 696 bp, Homo Sapiens
tctctccttttttaagtggctataaaggatatgacaagttatacttcaaacaaaaggataagcaaaaccaatgattcaataataagagcctttttacatcatttcagtacaaattgtatgttctaattatttaaattaaaaaggaagaatgcttttcttatcattgaacctcccttccccttccttcaaaataacaaacaattaaattattactacaattaaacaattaaaatgacaaccagtagtcagggaaattaatgaacatgaagtaactgaactgccatggaaagtaactgccaaaaatacgcactcttcaaaaatcacctctggaggacatgagttactggaacagtaagtaacatctttggaatcctcttttaaaactgcttcttaatctacttttggaatccttcttttaagaagtgccaacataatttaataggggaagaataatcttttcaacaaatggtgcttggacaactgaatatctacatacagaaaaatgaagttggacttctactttacaccatatactaaatgtacaaaaattaactcaaaatggttcatggacataaaagtaagagctaaaactataacacttttgggagaaaaccacaggaatgaatattcataatcttgaattaggtgatggtttcttagatatgacaccaaaagcgtaaacaaaagaaaaaaact

SEQ ID NO: 380234 - DNA, 767 bp, Homo Sapiens
  misc_feature (474)..(497): n is a, c, g, or t
  misc_feature (754)..(754): n is a, c, g, or t
gtgaaaaatgaaaatagctatcagcctggccctccagatttgaaaattagttttgggagcacagcaatttctcagggattcaaattacaaatgttaacaacagcagtcttcctgatgtgtgaaaatttacgcattcagaaactgggaaattatataatttaaaaattttcagtttattaagaataaactacgtttctaaacataaaatccctatactacctttcagaaaacatttgttttaagtggcagggtacacctatttttgaattccctacgtatggaatttttttccaaaccacaaagtctatcttaaaactgctcaaaggtggtaaagattaatcagagtaatttattcattcagaaattggctgttaaatatttataccaaaggaaaattaggttcctaaaaatgtattattgaagataatgtgttaaaatttattagcacaaaaattcataaatagctaatgttannnnnnnnnnnnnnnnnnnnnnnnagaagtcgaactgaaccagcgatggcaactacaaaagcagtatgtaaaaacacaatctcacactttttctacacattgcttttacctttataatgtagcagtgaagtaaatcattttagaacttaatatccaactgatcatagtacatattgtaaataaaatgtattttgatgacagctcagttgaatatggataatatgtggcatcacttgcacacttattttgtagaaatgggtaatttgtgcccgtaacactgnttcatattaaata

SEQ ID NO: 380235 - DNA, 534 bp, Homo Sapiens
tggaaagaggagaagtgggacacgcccacattaatgggacttggccactaacggggtttgaaggacaaaggagagggaagagtcagataggattagcacagcacatgactgcctaagagatgctcacaaaaataaatggctgaatggagtgaatgaaccccagcggttttaaatctggaggcttaagacagtttttggtagctgagggagaacagaaatagctatgttcactgttaatatagaatatgtgttattctttgcgttcacctttcccacctatattgtagacgtcactgatagcttgtaatacttttctacctgaggtttaagtatgtaaatatgaggaattaataacaagttaaactcttgttttgaaaatctaatttgccaaatataattgaggaaatactataagaactaaatctctactgatcctctcttaggagcaatttgagataatttttctaagtttaaagacagactttaaagcaactttccagtcacaacttcaaaataaagtacaagttaattgca

SEQ ID NO: 380236 - DNA, 772 bp, Homo Sapiens
tgttcaacttcattaccgattaaagaaatccaaataaccaaaccatgaggcatttttatcgctcatcagattagcataaattctaccaataatattaatagcattagcaagtgtgtgaggtgaaactggtgatggctatggatgggaagagttttcatgtaaaaccttttagaagttaatttggaaatgtgtatcaagaaccctgtaaatggttataccaaccgaatgaatcattccatatatggacagttattccaaagcaataataagtgttaaccacaaagatttaggctcatacatatatcaggtctatgtgaatgcaagttacgggaagagaaggcataaaatgttgatctaattcaatcgcattaagaaaatgaatacagaaatgaaaatacaaagaaagaaaaccctccagttcacccagaactgagacaaaacaaatgagtcaagagtgaagaataaggttaagtattcaattttttggcaaaaacagctctctaatacctatttttagctggaagtcccgtctcttaaatgtagcctcaatttatttcagattgaatttgctgtgttggaattcctcaggtgagaggacattttgtgaatgatgattttagcacaagaaactcaattttcaaagagtataaaaactcaaatccccaaacgctttaatttcttaagcaagaaagaatgtatcactttacagattcatgttcatgtttagagaaggtgaatgcaaattaaaatttcccaagattttaatgaagct

SEQ ID NO: 380237 - DNA, 978 bp, Homo Sapiens
  misc_feature (736)..(783): n is a, c, g, or t
tcctgttaattaactctgcctgtgagtcttcagctggaaacattgcaattacatatgatctctccctttcccttcacatttaatccacacttttaccaactcctgccaactcttctactacaccatttcccttccctttatctgtctaatcccaccaccatttttttagtcagtctctcattggtcattattgaggtctttttaacggactttccatcacgagtatcttccctctgctttaacagcctgtctccctgatataatggctctttggttctaagaaagaagctattatatcttgtcattcagaatacccatggggaaagactcatcttcttccaatctaatttctaactaaacttcatactttttccaaatgaatttgttctgggcatattctcagtctcccacttttatgatttagtttacactcttctcttgatttatcaagtcttcacacatgtccaatcttttgttcctctataatgcacaactcagtagtgctatatcctccatgatagattttgtatctcttgaggtggaaattatttcttatgtctaaacaatacaaacttcagtcatgaattcatgcaagggggatttagccgtttgtcaaagattggcacatgaatgtgcagtcacatgtttttaaattaaaataaaatgcttatattttatcactttgtgattccccattttccttggtcttttaatcatttaagagggtgttttcttnnnnnnnnnnnnnnnnnnnnnnnnnnnnnnnnnnnnnnnnnnnnnnnnacatcaaatctgacttcatggtgtttcccgaactcttttttatctctttaataatatatcttcaccccatatttaatgttattttaaattaaaacaaaattaaatattattgcttaaaaagtggtagaatgaagttctgtatctttttctccatctttcttttagaatctaataaatttagtttccatcctggtt

SEQ ID NO: 380238 - DNA, 794 bp, Homo Sapiens
  misc_feature (477)..(503): n is a, c, g, or t
aaggttcaaagagatcttaaggtagctctactctctctcctatgcagcttcttaactcaagcgagggaagagcccgaggtcccttaataaccatccccagcgcccactgagtgtggactgacatagaggctggatgggaattgaggcagagtcttgtccagacctgggagaaaattcacactttggcagtgtgaactggggacttagtttagaggccaacgtagaggatattctcttgttagatggagcagaagaggaagagattggcagccaccaaatggaagctgaaaaggctgtgccatgaacacatgtgactgagatatcgaaaggaatttgagggagattatggctattgcagagcaagtgaaaacagaaacaaatactattttgttactcattgtgacctaattttttcctcccaattacccttcctgatatggcctcagtgttttcaaaaacaaatattttacatcttannnnnnnnnnnnnnnnnnnnnnnnnnnaaatgtggaactttgtagaacttcatgattaggcatgagaacagaaaaataatataaataaaaatctgaaatcatgtctattttaatcaatttctgcttatctgagaaaggctgttctttgattcatgacagcttaaaaacaaatcgcaatatctatttatctgtaaaatatattatttatagatttaaaataataattcaggcctacaaattctttttccctttgaaaatgtatcttcacaattatttatcaacctttgtattttacaataaaagttattataccaaaag

SEQ ID NO: 380239 - DNA, 661 bp, Homo Sapiens
  misc_feature (12)..(12): n is a, c, g, or t
  misc_feature (545)..(545): n is a, c, g, or t
  misc_feature (551)..(551): n is a, c, g, or t
  misc_feature (573)..(573): n is a, c, g, or t
  misc_feature (612)..(612): n is a, c, g, or t
  misc_feature (617)..(617): n is a, c, g, or t
  misc_feature (625)..(625): n is a, c, g, or t
  misc_feature (646)..(646): n is a, c, g, or t
agaaaggccagnaggacaggctccaaggcatgcttggcaggttcaaggaacagcagggaggctcatgtggctggaatggagtgagctagcaggagagaagatgaagttagagggagagagaaagtggggagccagatcatagagggctttgcaggtcacttgtaaggactttagctttctaacttttgtaaggacttcaacttctactcacagtgaaattgtgaaattccagaaccaaaaagaagatcctggtaaaagagaaactttcagcaaaatatatttaacattttatttgagtgaagaacaattcatccatcaggcagcactgagaaccagaagacattcagagagctctgctttgcgaggtatgcagtgaacattcatagacagaaaacaaaaattaagtacagaaatagcttgattggttacagataggcatttgccttatttggacatggtctgctccaagtaaggcaagttggcagcatgcgattggctgtgacctatctgttacaaaaatatatctatataatcctaaattaggnttcagnttatttaagtactaaattaggntgcaatttattacatgggaactcaaagtctggagacagnctcangccaaggncctcttgcttatttaatttancaatcctaaaatttt

SEQ ID NO: 380240 - DNA, 524 bp, Homo Sapiens
  misc_feature (514)..(514): n is a, c, g, or t
aggaattactattcaataagtgttattaggctagatgcctatccatttggaaaaaatgatgtcagagacctaccacacaccaaacacaaacatgaaatctccaaatggaccagaggcctaaacataaaccaatccttggagggaggggataatttgtgcctcccagtcacacattttcccttctctgccttcagtgtatggatatcactggcaatgctgctcatcaacccagcctagcaggtgaagggcaagaggaacaggctagacagggttgccaacaagtggtccatacaattcagaccataccactggggtaggtatctggtaggtaaatataacataatgcaaaggtctttctaatatgactataactgctaatgcaaatggttttgtaatattaagaatagctaatatttactgctcattcaccatgtgctagtcactgtgttaaataccttatatgcattagctcaatgaatttgttaaacatctttgagatataacccacatacantaaaatttac

SEQ ID NO: 380241 - DNA, 663 bp, Homo Sapiens
cttttcttctctttgcttatgccaacctgggttcacactcacctctttgtcctgatttttctcagaccgccacaagcatatgtgaaaagcaaacgtcactgaagtttgcttgggtttggtgggcgggggaaggctcttaaatttgcagaaatacaaacagattagaactgaatgttggacattcattctaataacctcttagatcaaagcatcccctgaggatttctcactggtcacatttctctgcagattccagtctcccaccatgctgctggtcctcagactctcttcacatctccctgctcctctgtttttccagcatcctccatcttggtccacaaagtcactcatgttctctgacaatcagacagtcacctaatctgggccccatccaggagtcccatggaagaactggcggaggtttttaatttcagtctttcctctctcatcttcacttgctcctgtgggtggaagtaagcagcacaggaacttattcctcactggtagaaaacatccccttagaagacagaagaaactagcaacggtcaattttgatttatataacaattttgacatcctcatattatttgtgagtgataatatcgaaacaaataactgaccataaatcatgaaacatttaataaaatgggaactaagcagtta

SEQ ID NO: 380242 - DNA, 494 bp, Homo Sapiens
  misc_feature (155)..(155): n is a, c, g, or t
gccacttttatttttcaatgtgtggaatgtcatttttatatagatttggcccactatcatatctccattagggctcaaaagacttcatgtctgtgctgggagcaaagtaacctatagataccactcgatcatttttctgaccatgagacttacangagtatcatctctagggtggattttttgaaaaaccaccataaatgcagaatcttggtgtttaaaaggaaaattagaactcattagttcaacttcctttaagtaaggctgttttgatccaattataatcaattttcactcactaaggccccccctgcttaatagcctattttactgcccgtgtgaaattgggtatgttacataactgccttaaaccacagcttcttcatctctgcagggtttttgtaagaacaagagaaaaaaaatgtatctgaaatcagaaagcaattaaatattgtgctaattaaaaaacagacattgctagtgactgttctaaaaac

SEQ ID NO: 380243 - DNA, 711 bp, Homo Sapiens
  misc_feature (475)..(475): n is a, c, g, or t
gagcagggagactttgctcattatcctgcattagtcagactagatttacagctcaaaagaacagtcacggtaactgaagtgcagaccaggaacttgaactgatgaaaatcacttctatttaaatgaacactaagaagcttactgcatatagttgttataatagccttaagaagatcactttgccaaatgtttccatccaaaaagaaataagccagactagaaacaatctggaaaactctactttttctgtatttccttttcccatgaggatgggagagctcaggatgtggagaggagctgacagaactcatctgtgtctgaatctagagaattgcaaagaggtggaagaggcaggtattgctaacaaggcagagggcatgaaaaatttcaaggcaatttttaaattgtatgggcgcttggattatttgagcatgcctagcaggttatgttaatgccttaaacaatgtttgtcagnaggaaccaccatagcagttaagttaccagcatggacctgagaaccagacagacttgtgaatgagtctctcttttggctccatgagtaaagaagttaattttcctacatttcatcacgtctaagtcggtgcttataagagtacctattacatagacttgttaaaaggcttcaatcagataacacatgcaaaatgaatggcaaataataagtgttcaataaaacttagcaattaacta

SEQ ID NO: 380244 - DNA, 810 bp, Homo Sapiens
  misc_feature (800)..(800): n is a, c, g, or t
ggttatatcagacttatttagtttattgaacacttctatagcattttctatgccaggcactgttctaaacacttccaaatattcatctaccaaactcttagacagctttacaaggtgaatgttattaatctctccatttcacagatggaaaactcgagggagaggttaatgaaattgctcaaggtcacacattgagtgagcagcagaagtgagatttaaaccaaggccatgtagtgcctgaatctgtgtgcctgccccccaggccacacccagacccggggcctgctctctgtgctgtggacaatctcctcgggctcaggccctcaggagagtcatgtctcactctcattctgcgggacattgcatgtgtcaggatgcacaccacatccggtgctgcctgccatgcagaagttttccttctgggaatccatttcctccacctggaaagatgaattgaacggcagagtcaattccgtgtaagtgcagtgtctgatttgtcctcgaatgaacttgtaacaaaaccagcatcacgccagtccacttggctgccacgcgttgtttccagttctggtcaaagaccttcattgattgtccttttcatcctgtcctcgagccacctcaaggcagttcatgcttctgggaatccagacaggcgctctcatcagtccgtctactcccctgacatccgatgacattcctggcccccttatttacgcaccctgaattccttgtgttatactagtccccacagttgatgtccttatttcacaatttggcggtgccaagggaccatgtaattnaaaagggaag

SEQ ID NO: 380245 - DNA, 621 bp, Homo Sapiens
  misc_feature (21)..(21): n is a, c, g, or t
  misc_feature (24)..(24): n is a, c, g, or t
  misc_feature (78)..(78): n is a, c, g, or t
attggccctcgagccagcacnagnctcatatccaggtaactccgacttctacgctggcagtgagaatttcaagccagntggttcttggtttgctgggctttgtgggagtgggacctgctgagtgagaccacttggctccctaacttcattcaggcccctttccaggggagtggacggttctcctgtcccattggggttccaggtgccactgggatatgaaaaatctcctgcagctagctcagtgcctgcctaaacagccacccagttttgtgcttgaaactcagggttctggtggtgtaggctcacaaaggaaatctattgatctgtggattgcgaagatctgtgggaaaagcatagtacccggggccggtaacactgtccctcatggcttcccttggctgggggaggcaggtcccctgccaccttgcacttcccaggtaaagccatgccccgccctgcttctgcttgctctctgtgggttgcatccactgcctaaccagttccgtgagatgaactggtacctcatttggaaatacagaaatcacctgccttctgcattggtctcgctgggagctgcagaccagagctgttcccattcggctatcttggcccttacccaaa

SEQ ID NO: 380246 - DNA, 586 bp, Homo Sapiens
cttacaaagaaaaatttaatattcgatgagaggttgaaccaggcttaaagcagacatactaggaaatggtgcagcctgtaagaatgccagtttgtaagtactgactttggaaaagatcatcgcctctatcagacacttagggtcctggtctggcaattttggcctgatgtgatgccacaagacccaacagagagagacacagagtccaggataatgttgacagtggtgtagccctttaggagaaatggcgctccctgcggctggtattaggttaccattggcaccgaaggaaccaggaggataagaatatccataatttcagagctgccctggcacagtacctgccccgtcggaggctctcactggcaaatgacagctctgtgcaaggagcactcccaagtataaaaattattacacagttttattctgaagaacattttgcattttaataaaaaaggatttatgtcaggaaagagtcatttacaaaccttgaagtgtttttgcctggatcagagtaagaatgtcttaagaagaggtttgtaaggtcttcataacaaagtggtgtttgttatttacaaaagaaaaa

SEQ ID NO: 380247 - DNA, 538 bp, Homo Sapiens
  misc_feature (139)..(139): n is a, c, g, or t
ggaaataatgctgaaaacgaaattttaggtaatttgcagataattttaaagatggaaatgtaattttcccacataagccttcttccataaatgttttttattgtgtagagtttcctggatttactaattttcttattgngagcactatatttaccatctttgtaaatgatgatttcttttctgataggctgtggaacctaacatttacatctgattatctgccttccctattgactcagactgtgtattttttgtcttgatttttatattgtaaatatgtatattgcaggaaaagattgtatagccaaactttgaagtgtccaattactaaaagttgaggttttagtgggagaaatattgtaaaagattctggtattcctgtttgcaaatatagctttggtgaacagttttctcatgtgaaggaaaaattgcagaccacaaatttggggcttctgtttccttatttctcaataacaagcttttacatctgccccctcccttaaaatgacatgaaattaaataaaactaccatttatga

SEQ ID NO: 380248 - DNA, 838 bp, Homo Sapiens
  misc_feature (638)..(705): n is a, c, g, or t
tatggagcatcacaccagctatctcctgctccctgtcctgcactgcaaaggaggccttttcatcctctctactgcctccaatttttctcacgaggaatgtgagaggaaaaccttttgtcagtttcaaatactcatgtatctgattgtcaatgctggagagctggggccagggcagtagttgatgaatatcacctgactgtctcctgcagaaaaagcattcccagaagcacggagaagtgaggagaaaaggcaatgcacctggagctggagaccaaggccctgttcttactgatggcccttggagcagatatttgaattggagagataaaaccgtggtttttggggtgttaattttggtggctgatgcattctgtgattgatttggctattacaactggtattgattttaaacacattaattgcaaaatctcaattgtgatttgatttctgtatttacaatactaaaaacgaggctttcgccaggagaagacaattggcagtactcagttggaagtgcttaattgttaatatatatcagccgtggttcttcagcgtcgtcagtgttgctcagtcttgctctttgtggcgactactgaatgcttgaaaaattctctcctatactcccactctgcactgtnnnnnnnnnnnnnnnnnnnnnnnnnnnnnnnnnnnnnnnnnnnnnnnnnnnnnnnnnnnnnnnnnnnncatgggcatggatgatacataaggtagttgtaaactgtgatcagctttgataataactagataaattcttttaatacaaaaatatataaggcattttgcctttttttcaaatttcaaataaatggatttgtat

SEQ ID NO: 380249 - DNA, 435 bp, Homo Sapiens
  misc_feature (174)..(174): n is a, c, g, or t
aaatatctttctaataccaacaacccttataatttgatttttaaaaccctataggcaaattatatgtgtatcatttgtatataattgtacacaaatatgtatatatctgagctccaaaatgaagccatttgaaattttatataaaatttaggaacaaattaagtaaatgtatgngaaataattaccattattatgaatttaaaaatgcaaattaaaatgaggtggcattttttttgtacacatcattagcactggaaaaattagtgatggtgccaattgtgtcaagatgaaatctcttagacatcatttgtgtttatgtaaattattataatcatctggaaaagcataatttatcaaggattgtgaaatgcttacaacctatgatagagtaaatgtatttgctagagtttttctaggaaattaattcaaaatatg

SEQ ID NO: 380250 - DNA, 735 bp, Homo Sapiens
  misc_feature (12)..(12): n is a, c, g, or t
attctgctgatnagtgcctgaagtgtttatcaccttgaggaaagcaactaaatcttgtgctccaatcaaaaatcaattgacccacattctgtaacctctgaaagtcagagatgctgtttctcttcttttggacctcctaagagtattgtcagtcccaaagtattcaaaataatatgaaattctaagaagattataaaataaatatatctctaatcccagaaaagtttaaagaaatgcagaactggtgaagaaataaattaacccctgtggatattcctagaaaagccatgataatgcgttttgaaaataattttatttatgtctctctctcatgtttaagatattgaaatactcaaaataaccagcagtcttattgcagtgtatattgtttaaattatcttaattagtcaactttagaaataattttcaaatgctgaaggaaaatttttctttgaaattttgtgaataaaatgtagtatacatagctgtgacattcgaaaggaaagtgtaactgtccacagcagttgggctttaggacagtttgatggggcatatgagagacggaagagagagagttttgaggagcagctgcttttatgcctagaagacatttagaatcaaaaatggggagaaacgggaggtaaattgttaactgtttaactgtacatttaacatttactcttccttttgaagtttctcaagttgtgaataaagatttgaaattatatcaagtat

SEQ ID NO: 380251 - DNA, 835 bp, Homo Sapiens
  misc_feature (694)..(694): n is a, c, g, or t
acttccctctgctaaatgagagtgaatccgctggcaaaggtctgactctgcggattccctcccactccactctgggcgatggtcactgttgttcttgcctctcctctgagttccggtctcatttatccaacagaaatcacctcctcctcaatctccttccctggcttaatccatttcaaattccttcccaaacctgctcctcctgctgtgtttgcctttggagtgactgccacttctatccattataagtcagaaatcacacacaatagaggaatcccaggagcgagggacaggcggtatttatacaccaactcctatgagttattacttgggggttgttggaggtgagtgttaatcccctggcacctcccacctgccacaggtgtgggtagagtggactgctgaggtcatggacaaaagcctgcaggcaaaaagaagaagatattggcagttagaagtggctctgagcctgctggagggttccagggctatgtggagggcacggaacagcatctgctcccctggggatgatgacaggtgacactgggtgactcagatcttcttgccataacatggagacacatggttagaaagccagtccattgtctcaaggagaagagtcccagtttggtgctaataatcttaacacctttccaacactgttcatctccatctggaaccaagaaagagccanccttgggcctagtgtctttggtaggccgtcgtatgtacctacctgcaattgatgatgttgctttggtttctacttaatgttttccaataaacttaagcatataaagtttgctgttgaaataaatttatatagttaaaaaat

SEQ ID NO: 380252 - DNA, 622 bp, Homo Sapiens
ttgtatatcctgtgaatatacaaaaagattgtaaatatacaatatacaacaatatcaaatttgatattatgtgggaaaaggggctttctgaacttggtggcagactggggctcaagacctatgatgtccagaagagtagcttctacccacatgcagctgtttaaaatcaaatacaattaaaaatttagttcctcagtcatactagccgcatttcaaatgcttagtagctatatgtgtctatttaaatttaaataaaattaaaaatttattcagctgtactagccacatttcaagggctcagcaatcacaataaacatatagaacatttccaccattgcagaaagttcttttggaaagtgctgctctagacaaactcatggatcatgcttagccttgctataagcctcattatcaaagccaaatacattgtgaagatttgactagctatcctgaggttctgtgattctatgtctatttagagttttaatcattgagcttttcttctccacactcttagatgggcaaatactgttttaaagcattcatatttcatatattaaaacatttattttctgctcaaaacattcttatctaaatgggtggtttatatatcttgaaaatg

SEQ ID NO: 380253 - DNA, 161 bp, Homo Sapiens
tattaaaaataattcactgtgatttttatggtactgatgccattcttaatcaagttctgataagtggatggtctctgcctatctccacctttctgaatcctatgtgtatcgctgtggattaattctagatatcttctccaccctccttgcaccagactaaa

SEQ ID NO: 380254 - DNA, 447 bp, Homo Sapiens
  misc_feature (27)..(27): n is a, c, g, or t
  misc_feature (47)..(47): n is a, c, g, or t
  misc_feature (171)..(185): n is a, c, g, or t
gatcaaggcaaactgggtatctcaggnaagagatttgtgggattgtnagtagtcaggtggaggagagtagttgaggaagaagttctaaggagtgtgaactaggagtgatagtggttagaaaggaaagggtgtggacatcaactaggaagtgtagaggtgacaaatatggtnnnnnnnnnnnnnnnagacaaataaatatagtcagactggtttttgcaaacaaaaggtaagactaatttaaaaacaattccatttcacaatgcctgccaatgcttcaacaatttaaaatacttgtatgttgtattaaaagacagttcgggaagtgtattccatctcatgacaaattggtaagtcaacattgatagagcataaagcttattttggcctaaatttcagctccaaagtcttactattctactaatacataaatccaaaggtacataccta

SEQ ID NO: 380255 - DNA, 658 bp, Homo Sapiens
  misc_feature (79)..(98): n is a, c, g, or t
aatttttgaatataaagttcttaaaattagtgtacttaacaaacaataaaactgattgaaagagactaaaacaaccagnnnnnnnnnnnnnnnnnnnntggagaaagcagagcagtgcaggatgtgaagtcaaagtcttcaaaacaatatccttaaaatgaatattcagggaacaagaatgagcttttggaaggcaaatagcagaaatagaattaacataaagactgaaagataaatttgagaaaaatctcaaagtttgaccaaaatgctgtgatggcaagtagaaaatacaacaggaaaagaattactctgtggaatttcaacatgtaaccaacaagagttccagaaagagaaaatggagagtaaacattattgaaaggcaaagtgaacaccagtgaagagtagacttagcttggggaaggatgaagcaagaaacttttctgatttcttataagtgtgtttatattcctgtaaaaactatgtacatgtattattttgataaaaaagaaattataaagttaaaatagtataaagataattaagcaaggtcaggcagagtagctttaaagtaaataaattacaaaaataatgctgctacaaatattggaacaactgcttgaaaagtgggtggtgaataaacaaatgctacttttggtgg

SEQ ID NO: 380256 - DNA, 588 bp, Homo Sapiens
  misc_feature (103)..(103): n is a, c, g, or t
  misc_feature (131)..(191): n is a, c, g, or t
agttttagcaatttattagataaacaacgaacacactcgtatatgaacaaccaaaatatctttactctggtgaaatagctttgcaatgttacaagtatattcncaatgtttttcaggctcttgcattttcnnnnnnnnnnnnnnnnnnnnnnnnnnnnnnnnnnnnnnnnnnnnnnnnnnnnnnnnnnnnncgtttttgtccccatttaaaaatttgaaaataagcagttttgtaaagccaaagtgtattcctttctgggccaaatttctatttgacagctgaaatatgcgattaatgggctgcctcaaaccataattacacagccaaaacaaaaattaccctccctaagattgtacatggagaacactggctatctgcttcacattaagtagctggtttaatatgatccctcttacttaagaaacatatactgtactgagcccaaaaggacacgttttcttctacagcaagaatgtatcattaataaacaatttaattacaataaattatgtaacactgggtaaggcttgtagcagggggcaagggacactatattcttagaaaaaaacatagggttgccgggtgca

SEQ ID NO: 380257 - DNA, 449 bp, Homo Sapiens
  misc_feature (326)..(326): n is a, c, g, or t
  misc_feature (410)..(410): n is a, c, g, or t
aattcggaacgaggaagaagatgaaatccctgttcttaaagatgaattgatccatgagttaaagcagacactaaatgctatcaaattagaagaaaaaggagtctatgtccaggcatctacactgggttctttggaagctctactggaatttctgaaaacatcagaagtgccctatgcaggaattaacattggcccagtgcataaaaaagatgttatgaaggcttcagtgatgttggaacatgaccctcagtatgcagtaatttttggccttcgatgtgagaattgaacgagatgcaccaagaaatggctggatagtttaggagttnagaatttttagtgcagaaattatttatcatttatttgatgcctttacaaaatatagacaagactacaagaaacagaaacaagangaatttaagcacatagcagcatttccctgcaagataaaa

SEQ ID NO: 380258 - DNA, 780 bp, Homo Sapiens
  misc_feature (231)..(231): n is a, c, g, or t
  misc_feature (234)..(234): n is a, c, g, or t
cagacttagtgaaagaacttctgtttgatgccattggcagatattacagtagtagggaacctctgttaaatcacttatctgacgttcataatggaattgcagaactcttagtgaatgggaagacggaaatagctttagaagctacccagctccttctaaagcttttagatttccaaaatagagaagaatttagaagactactgtatttcatggctgttgcagcaaatcctnctnctgagtttaaattacagaaagaaagtgacaaccgaatggttgtgaaaaggatattctcaaaagctattgttgacaataaaaatttatccaaaggcaaaacagatcttctggtactctttttaaatggatcatcagaaagatgtttttaagattcctggaactctacataaaattgtaagtgttaagcttatggccatacagaacggaagagatccaaatagagatgcaggatatatttattgccagagaattgatcaacgtgactattccaacaatacagagaagacaaccaaagatgagctgttgaatttactaaaaactcttgatgaggattcaaaactttctgccaaagagaagaaaaaattgctaggtcaattctataagtgtcacccagacatctttattgagcattttggagactgagtttttaatatctgtatataagttgtgtattttaagaataaattatgtatcctaaatatccaatcacatttgtaagcgtggaagctctaaatttgaaactgtacttaataaaaatttttttgt

SEQ ID NO: 380259 - DNA, 548 bp, Homo Sapiens
gagagcaaggactaaatcttacttatctttattaagaactaacagtggaacacacagaaaatccatggatatactgtcagactgtcaccaaatatacattcaacatttttcttacttgtgagactgattttgagaaaatttgctatcacagaatcactaaactttagagcaggtaaagactcctgcaatgattttatttacttgctatattttaccaataagaaaaccgaggcatagagaagttgagactttctacacaccagtgcctagtcttcatgatgcttatgcccaaccctgagtcctttcctctatataatcctgcctcattacatttctgaaagacggagaagttttataacaacaagatgaaagactttggaagtttacagaggctatcaggctatcttctcatagacccatcatttgtccagcagaaagagactaaaaaggcttataagaatatcaagaccccaatgttgtacttatggtttgactttatatctctgactaattacagaatttgattattaaaaaaggttttttatatc

SEQ ID NO: 380260 - DNA, 532 bp, Homo Sapiens
  misc_feature (379)..(397): n is a, c, g, or t
aaccgtcctgggcatgtggtactgagcatggaacattgggagagttggcccagccagaggaagctttcttgagaaagtaatacggagtgctggatgaggaaagtgagtgaagattgacctttatcctgtctcagaatgggaaagttctttctaaaacatgaaagaaaaagattaaggtgtattatactataccaagttttttgaaccacctgattttattaaaatgtaactgaccaacagaaggatgttttaaacaaatatggcagacaaaaggtggatgtatttaatatataaagagctttaatgaatcaataaaaaaatcacttaatacctaaatagaaaaattaataaaaggcatgaccagactgtttctacaggnnnnnnnnnnnnnnnnnnntcagtgtatatttaataccttctgtcttatttttacaaaatgttctgaggctcatcaaactgcacccttgaaatgagtgcatttcattgtatgtaaattagacctcaataaagttgatgcacaatcttctgatga

SEQ ID NO: 380261 - DNA, 781 bp, Homo Sapiens
gtcatgtcagtaatttatttcagggtctaacaaatattaccacagcagtttagtctcaaagtgatacaaaactgaactcagggtggttactgggtagtccctagtccaaaagattaagacacacctctaatacacacacaggctgtgttcaaggccttttccttcccatcttctggttctgtctccaccctttccaactgatagcacttcattggtgtgtgtgatatatgtgattatcttaagctagaaagtacaacagaaggagaggatggttgtcacttggggattagacagttgagaggataggaaaggagttatatccaccaatacaagccccttcttcccctcctacttagaaagaggtggaaccattgcattccttttctaagaagcccctcagcaaggagtctgttccaagagaatataacctgaaacttagaaactgcggttgttttctggccctctgactatacgtgctcctctcttattgtagattagttgggaccaagagacattccttatacggtattgtggcatctttaaaggagagaataaactcttgaacaagacccttgaaacctgattctaatcagaggagaatgctgatgtgactgatacagactccagggaggtggtgcctgacattcagctcactggatctctgctcagaacttgcccagagggttacttaaagctgagttttatcagtcaacctcaattctgagttaaaggtgtgcttcaaacaaactctacaaaacccagaaatgattcaaggataagg

SEQ ID NO: 380262 - DNA, 322 bp, Homo Sapiens
aactagttgccacagaatttgcaatatacatttacaaccaattcaagtccactttcaaataacactatccaactatcccacaaataagactacctgcttaacaaacaaaacacctaattcctcagtaacatttacaaccaattcaagtccactttcaaataacactatcccactatcccacaaataagactacctgcttaacaaagaacacacctaattcctcaatatacatttacaaccaattcaagtccactttcagataacactatcccacttcacgggtgactacctgcttaacaaagaaaacacctgattcctccca

SEQ ID NO: 380263 - DNA, 458 bp, Homo Sapiens
tgctaggctctgtagatggatgtattaaaatccataaaacaatgtatttaaacctaagaattctgctgctttcgaattctttcctctgctccttttcttcacctcctgcttctccagcccttctctccgtccttttcatccttcaggccctcctgtccccttagtccccaccacactgtcacttgtgagttgtgacactagcactgtcccatgacctgttacgtgactgttcttttcacagtggtcctgctcctgggagtcggagtgtgtcatctctccacttaaaacactccagtgtctccacctcggtcttgagaaacttctggagtgtcaggcacgtgagcatatgaggggatatctggtttatcgtagggactaaattaatttttgtcgactgaatgaatgaaatatgagtgtattaaattgcattacagataattataaagtgcaaaacacgg

SEQ ID NO: 380264 - DNA, 685 bp, Homo Sapiens
  misc_feature (568)..(568): n is a, c, g, or t
  misc_feature (647)..(647): n is a, c, g, or t
  misc_feature (665)..(665): n is a, c, g, or t
catttgtgggaagttgtattcatcaataatgaaatgctgactaaggaacaaggcccctgaggtgttcatgcactgatcctggaccttggattaaacccctgcagtgctggaagaagaggactctgcactgcctgccacaccaggactggaagatccatggccttcccttcttccaaactaccttcccacaagatggggatggtggtcacatctccaacactagcatgctgtggaagagacatcagcattcttgcaacaaatctggaaacagcctaaagagacatttctacttcaaagagttgcactgaggaagtgcactggcactgctggggactcacctggggcccagggctgaggcttctcgtgtccttggagctgctgtcctcccgaggagtgtccacactgcagccagctcagcctcaggtgtcttctctggttttgaaaccaaatctaagtgggaaaagaagattcaagttttatccgatttagtctacataattttaagtatctattttgagctcaataccaagaatcacttccttctctctcccatctgtgatctccagangaaaaggtcccgggctaggagacactggctggcatctaaagccagagcttggccaaagggtgtgtgtcaatcttccttnacatctttcccaccccanacttggtttggctcaagctc

SEQ ID NO: 380265 - DNA, 947 bp, Homo Sapiens
  misc_feature (561)..(561): n is a, c, g, or t
aattcggcactaggggacagtgagactggggtgcagagtaaggaaaaggagagggtgtcgagggagttgcaagggcacggggacctctcagggagggcttggcagtccttgttagggagtttgttcttgttttcctaaaagattagtgccaaccatttagttgtattatatttaacccactttgcattcgttttacttaattacaaaagaagtacatgctcattgttaccaaaaaaagtcaaatgctgacaaatgtaaatttaaaaagtgcatgtgccccctcacactgcccttctcccactccccatgggaaacagcatggccaatgcctccttacatggcaatgttcagatgccaccaacaaatgccctcctcctctccctgagaagttctgacttttactgtcaaggaaacgcttagctctttttaaggatcagagaaatcaaagcattgagtacataagtgaaggcaatgagcaattcagttttatcaactagaatatttatgtatttattcaaagccacagatgttagatgttaggtagaaagtagggatcaacangtttaacaacttatgtttagatgtaactattcaaatgtataagaacaagtgtctcccctctaaaaatatttttaaaatctcacacaagactctaaaccaaaaaccattgtaaaaaatcctttggaaatggatcattgtagccattgagatgacaggtcaagggtgagcattctgaacatataacaaaatataagataggtgataaatattcaaagcatgaaggaggtataatatgaagagtaaagtcctcccctcatctccccaagcctcagtgctaagaacttatcatgtgtaatttctggttttgattcttctgacaattatctcacaaactctggaccagtgctgtaaaatagaactttctatgatgatagaaacatctaaat

SEQ ID NO: 380266 - DNA, 335 bp, Homo Sapiens
atttagaccttagacgtgaccatcagaccttagagttgaacctaaattcctggtccccagtcctataactcagaatgattatgcataaccttggacttagaacttagatctggatcttagagctgatacttgacctggtactggatatttaaccttggacttcagacatggatttaatctgggccttgggatgatttaagatctagaagtggacctagaattagaccttggacttatgtgcctgagcctggactttggaagtggactttgggccttgtaactcaaccttgaatatgagcctcaaatgtagactgtgggccaggcacagtggctca

SEQ ID NO: 380267 - DNA, 379 bp, Homo Sapiens
gtaacaaaaccaatttccagaggacataggcttactctgctacatttcctgtcttcctcgaatatggcatcaagtttgaaagtggccctacaacttcgatgagttgacttttatgacatttaaataaatatgcattaagccaaattgtccccaggattttccacaaaaatctcataattatagagcctgtggtgtctgagttcacttcattattttccaggaaaattttgaactagaaaaaagaaaataaaatgctccaaaagtcacagcgtaagaacatgtcctaattccctgtagattgcgtgttcaatggaaggaaatgctccttgctggggcgaagatgcttcctagggcaatcagaaatctgccaaaagttttg

SEQ ID NO: 380268 - DNA, 824 bp, Homo Sapiens
  misc_feature (45)..(56): n is a, c, g, or t
  misc_feature (89)..(250): n is a, c, g, or t
tcctgccctgcctccagtctgggtgatagagtgaggctcggtctnnnnnnnnnnnncaaggtgcagcctgtgtgtgattcttaggttgnnnnnnnnnnnnnnnnnnnnnnnnnnnnnnnnnnnnnnnnnnnnnnnnnnnnnnnnnnnnnnnnnnnnnnnnnnnnnnnnnnnnnnnnnnnnnnnnnnnnnnnnnnnnnnnnnnnnnnnnnnnnnnnnnnnnnnnnnnnnnnnnnnnnnnnnnnnnnnnnnnatttccaatttttctctcagcatgtgtttcacaatcctttgttcatggcaaggtatgttgtccactttcaccctacaccttctaccgagcaacttaggtttatccagtatcctcattagtaactttaatccttaaatgtcactcacctttgaaatgtgcttcattggacgggtgcccaccaccagagcaagctcgcaataaaatgttgctgaatagaaactttactgactgcccactgacttaacttcgtttggatgttgtttatagtctctttatgcctctgccaccccagcagagtcataaagaaccagacagaagcaggacccaagaacatgaggcccaaaggagagctgtgggaagtgaaatactatattcagggagaccctcagctccttcccatctcagttccccgaaatgagagcaagcaggctgatacttctcaggtggggtatggagatatcccacctgatccctcttgtcagttgataagctggactccacatagcttatagtcagctttttggtgcttcactcttaaatatgaatgactagacaaagatcaattgtcatttgt

SEQ ID NO: 380269 - DNA, 690 bp, Homo Sapiens
  misc_feature (26)..(26): n is a, c, g, or t
  misc_feature (53)..(53): n is a, c, g, or t
  misc_feature (76)..(76): n is a, c, g, or t
ctggcaagtcctcctcagcccccttntcaaacagtcgtggctcctgggttccnccaggccagggcctcctagatgnctatgcaagtggggcactgtcccatctttggggtcccctgtcacagaggacagcatgcaaactgcagtgtgcatggcgccctctatgggtggacaggacccatgctgccccctccccacacctggggatggagtgggggtgaaaattccttccaggccatgggcaccccaacttctaatgaggacagtgttcccaaaaacgtgacataatcccatgggtgcagccatgcatggattttaggtagtacataggcacactattgagtaaagcattcacttggggagaacgccatgtccttttcaattctctttcagtccctctaaccgcatcacagagaaagacttcatttggtgctggtctgtgcctttcttactgcctgccgtcctcccaccaaacaggagacagcacgcccaggtgcagcaacttctgcagcggactcagctacctagaacttccacactgatttcttttcatgctacatatttttgtggttaggatctatttattataagtaacataggttctctagttaggtaagtaatataggttctctaactagagatactaattattatctatttactatacctattttgtatatttaaatagtaaat

SEQ ID NO: 380270 - DNA, 768 bp, Homo Sapiens
  misc_feature (98)..(98): n is a, c, g, or t
  misc_feature (226)..(268): n is a, c, g, or t
agcacttactatatttaatatacatttgacatttatttttacattcaaatcaaaattttaagtactatctaaatatcttacatacagtgctataagcncaacagggaatggaaaacatattagtgatagctcctatccttaagaagtttatagtctagtggctgtactttggaacagtcagtttttatattattacaaaagtaatacatgtctgatgaagaaaacnnnnnnnnnnnnnnnnnnnnnnnnnnnnnnnnnnnnnnnnnnntcacttcaagaagcatttattgagaatctaagacaaacaccctatattcaaagagcttacagtttatggaaaggccagccaatcaatatgcaatatttaagtcttttcattgaggcaagtgttgattttgagagcagagagatgatgatgttttgagctgagttaccaaggttggagcttactaaactcacaagggcagtttcaggaaaggaaaataccatctgcaaaggtatatggctcattcaggggctctctgaattgtggctggagcaaaaggtttgaaatcttttttcttcccaagaagatgaaagagctcctggaggacagaaactgctttttattccctttgtatctctcacagcacctgatacttaagactaaactattctttcactcatatgcccattatcaatgtcagcattgtaaggccctgatggcaggatccatattttagggagctttgtgttacacatagtgaataaattatatggtcatgtatc

SEQ ID NO: 380271 - DNA, 515 bp, Homo Sapiens
gtgttctggtggttgttgcctgttaagtaaactttagtgtgtaagttgagtttgtcattaaaatcataaaccagctgcggtaacagacaagcctttggcgggggagttttaagcctcggtaactgctataaaactagccatccagttaggatagaatgtgtttctttctggttaaaaaaaggaaaaaccatctaagaaaatatatatgtatgtatgtgtgtatacagtggaattcaaaggaccaaagcaaaatttgaacaggaatctattaatttagaattttataagatatttattaataaatgttatttttaaacattccatttgaacagtattctgtaggatctacttgtttttaaagtgttagtccataataaactactatagttatgtgtattttcatttttcagggtttcaaatggctattctccatcatttggtggaaatgtttgcttagatctctgtgcatagacatttcaaggatttttattgctctgtgagttattttttaaaaa

SEQ ID NO: 380272 - DNA, 681 bp, Homo Sapiens
  misc_feature (12)..(12): n is a, c, g, or t
aagtacaatctnccccccaaccagtggtgtccattaaattgatttatcttcacagtgacgagaaaaggctgtcttaggaaaaacagatgccaacccagtctagctaaaaatgactcatgtgggggagactttattgctggaccatttttcttcccaggaatgttccttacgcacaacaaaaggactgaaggctcacaacaaccaaagaattggaaagattctgcctgcagaggggtctgggggaagaagaccctaagtgctcatgtgtgggaaggataatttcccagaggccagggatcgctttggggctacactctaagggtacaatgtggagaaatggccttgcccagaaaaagtgtcagaagtgagggtacaaactgatggcttacctggtagggacaattattgatccctccctggcctacctccatatagaggtctttaaaattgggtcagcttccggaaactcaaaatagtttcactttatagttttgccagatcagggagtggagtacctaggccaggccatgcatgcaggacattttgctgagtggtgtcgtgcatattaaaatgaaggagagagaaaataaaggtgctgtctgggctgaaggagtagcagttgaggtttctgaatttattttaggacaatgaggcttagacaggggttagcaaacttctcgc

SEQ ID NO: 380273 - DNA, 913 bp, Homo Sapiens
  misc_feature (714)..(714): n is a, c, g, or t
tgttgctgctggtctaagtgtgaggataattctattgcctcttgtgaatactaaacatattctgatagtgctattttttttcacagcattctattcatctaaaagcaccggtaattaacgatgctaataaatgtataatccctttgtaaacatctcttcacaaggtcataaagaaggaagactgaatgaaggacgccaggctttcattttagaattaattttgtcattgaatgcactcactgcattatttgatagagtacttttgcatttgaagtagtacatttgccttctaccatctcattaacattgctttcaacagaatcagaaataacacaaaccactgcagggtaattttgaatgctcatttgactatgcagtgacatcaagtggcgagttgaggaatgatcacatgctgtgtgagaactccgtgtcaaaaattccatggagccaggctagacaccacatttggcactttcagctgtttagatttcagagaattaaaaggaaatggtcaccgacctgcctttgatagtaccccgtataccccctttcccaccataagaaaccagcgttccttagagaaatggctaattctagctctagggcaagaaatgctaagatgtgctcaaaacatctcattataccagcaagccagggagccatcaacgactactggagctgtgtcaaaaggaccaacaaaccaacttgaagagntcccgctggccaacagtggggcaattagagcatcaataagaataatatctgtaacaaactgaaacgtatcaaatatgtttaaattcatatgtttataattacactcaaaaaacgaagatgcagaccactttaccttgaggatgttacagaatgaaattatcattctgaaaactggtaaataaagagaaggtatcaagta

SEQ ID NO: 380274 - DNA, 720 bp, Homo Sapiens
  misc_feature (24)..(24): n is a, c, g, or t
cgatataaatgttggccttcaagnatagccatgatttttttaaattatcacaatggatcaaattcattgtcattaatatctgagctctgtcagccccttgccttccagctcaatgatgatgtctcaacatttacatctccatctgcaacatcttggctaatctccagatatattaattcaaattcctgcttgaaatctctacttagatttcatataatcccacctgagcattgacagagccaaaagcaaaccttttattctctaccacatccttccaaatctgtttgttctctggcctccctatgtcattaagtaatgccaccatattgaaattgttcaactgaaaacttggaaaacaatctcaatccatgactccttcagcaccttcctaaagctaaatgtagtataattgtctccaactggccttcttttcactcttctcccaactccaagcctatattttctccctacagcagccagagtcgttttttcatattatcattaggtagcattatttcccttttgaaatatcatcaaaatattttcataatacattttataacataccaatgacacctaccatatcgtacacattcttacttggcatgacccctgctcatttttccaactcttttatcattcttttccttggttattcttcaaagcacaatgacattcctattaattctgggaaaaataaaagtgaattcttatctcgga

SEQ ID NO: 380275 - DNA, 556 bp, Homo Sapiens
gggaagcctcactggcttcatggacaggatggccgccatgttttacatcggagcacaccgagggctgatgcctcctttaccagaccacttctcagaaaatgcagcagactttgtgcgcatgtgcctgaccagggaccagcatgagcgaccttctgctctccagctcctgaagcactccttcttggagagaagtcactgaatatacatcaagactttcttcccagttccactgcagatgctcccttgcttaattgtggggaatgatggctaagggatctttgtttccccactgaaaattcagtctaacccagtttaagcagatcctatggagtcattaactgaaagttgcagttacatattagcctcctcaagtgtcagacattattactcatagtatcagaaaacatgttcttaataacaacaaaaaactatttcagtgtttacagttttgattgtccaggaactacattctctagtgttttatatgacatttctttttatttttggcctgtcctgtcaattttaatgttgttagtttaaaataaattgtaaaaac

SEQ ID NO: 380276 - DNA, 757 bp, Homo Sapiens
aaaattcaagacatctttttattatatgaaagtacaatgattcaccattttctaccctatgtgaaagaaaatataaaaggaatagttgagaccagctgcatttttgcaattgagaataatcctggatttggatattttatttaaaggcagaaactgacatccagctaagttttagtaatgaaaaaataaaaattgtcagctaagttttagtaatgatgaaataaaaattgttcaatctcaaagggaaaacaaaaatcctatgctgattctctagacatatgtgtaatcatttaaaatggtatgtctgcagtagtccagccaattaaaaatggctcaaaatagccactcattaaatactttgttgactataccataggcattgattttaaaaggaaaaaaagagcagttttcctatacgtttcaatgaaatacacagtatatttgttatcacatatcagaaaatataactgattttaaaagcatacaaaagttaaatctacttagttcacagtcatataatagaaataaagaggcttaaaaagtaaaggcggctcagagtagtgtgggattagtccaggattcttgaaaaatgtgtatttgtatcaatctcaatatattgctttggaaacattatgtggttggttgcatatgtgtgtgcatttcctaaatttaaaacagtagctgatacctatgtcctgaagagatggccacatagaaatcttgatggaataggaaaattcattctcattgttagatg

SEQ ID NO: 380277 - DNA, 939 bp, Homo Sapiens
gccaacaaatcctcccaacttattgttcttttagagtatcttggtctattctcagccccttgtattttcagttctcatatttctaattgaaagcatgtaaatttgtcactcctgcagtttctaattgtcttgctgaaattttcaatttcttatctgcttcaaaatgaaaagcataattattttctagtctgtctaataattccagaatcaaaacccgcctgtgggtctgtttttattttgtttgttctagtcttcattcttactgtcttgtctccttgtgtgcctggttacctttaattatttaccaatattgtttgaaaaaactagaaataacttgatgctcagaatgatatttttatcctccacagagttttttgcttctggcaggtacctgcattagtaatttaggattattttgatccagtttcagatactgaaattttccaggtcacctaggtgactgaaagctgagccacagactgtggtaatgctcttctgttcatccttatttctagggttcaaccattcagggtttcaaagcatggtttggagttaccaggcccttacctcttcactgaccctggactctttttgaatctttagccccttagctctacctactcaacttcccaggtggccttttgcaatctataaatactcctaacacagtggtcccaaatgaatggttcatttttctgaatttctatcttttctcagatattattggcatggtaattattcaccaacttatcagctccctgctgccttcctacatctttgaaaagtatattttatccagcttttctaaatgttttcaagtgagaatgttaatccaaattacttagcccacattatttcctgttgattatgtgtaaaatacagttggtttatttgtattgtttttgtacctggaaacaataaactctgtagtgattctct

SEQ ID NO: 380278 - DNA, 662 bp, Homo Sapiens
  misc_feature (29)..(29): n is a, c, g, or t
  misc_feature (208)..(233): n is a, c, g, or t
ggatgaggtaacacattcagtaaaaatanctgaggttagtggccacagactgggaggaacagcaaggtctacagggatggagtcagcaggcacaagagcagccacagaaactgagaaggggccccaaagactgatgatgcaacacggacagtcagcataagttagaccttgattcattctggtctatactatgtgggaaagatgaagnnnnnnnnnnnnnnnnnnnnnnnnnngagtgctggcaagattcacaggaaatgactaaaaggtttagagccgggggggcgtgctgcagggttgtaggaatcggaaccatttagccaggatgtgatcatttaccccactgctacccctttgatgcttatacaaagggttctgtagtcagtgatgtcatccttcttcaactcagtacagccccagagtcaagaaacacttactcggtgcttactgcaggatgcaatgagaaacaagacatcaaccctccccttagggaaaatgtatagctactgaggtatgtgtcaaataggtaatttaaatacagtcttctaaatgctatgatgaggaaaagcagaggatgctattacaggatgatggggaggataaggcacaagaatcacacatacttgagggaaaagtgatgtctaaatggaggccgaaggagg

SEQ ID NO: 380279 - DNA, 471 bp, Homo Sapiens
ctagagtataggcttcttagctttctagatgtttcacccagttatagctgttctttgatagtgatacagtgatagaggcaggaggcagagaaattctaggcagatgggaagatccctggcaaagcaccaccctaaagctgaaaagcttgaaaccactgcctaaagtgagaacttatattcccgttttcctgcttgaatgttgtcttttcctaaactacccatagcctgccccaccctatcttgtgcctataaagaccccagactcagccagcagaggggagaaacagctggacatcagagagaagcagccggacttcagagggacagcttgatgacataactttggagaagaatgcagccagagatgggtggactccagggaaagattacctgccgccccaccctctttttagctccccttcctgctgagagccactttcatcggcaataaaattcactgcatttgctatc

SEQ ID NO: 380280 - DNA, 1017 bp, Homo Sapiens
  misc_feature (672)..(672): n is a, c, g, or t
ggaatggaattgtagaagtctcatcagctctcaaagccccttagatttcagccagctagcaaagtcatctgattagtatacataagcatttctaacagtgcttttagccccagtgtaatgatttttatatccctgtaatagcatcgtatgttgttttaactaagtaataactaccaagtcagtctaaattttgtaatggttctatggatttaaaacatactaaaaggcattcagtaacttctaccagcacagctgtaatttacaccatttcaagaagctggaacttgctcttaaactatggttaagatttccaggaaaagagagtctacaaactccctgagattccagtcatacaatcctatagacaggaagattttgtatgtgtccaaagtttataaatattggatccttggtattatgaatctaatacccatctctgcaccttgttacaaacctgtttgttttagtaaacaattagttggttataaaaagtcactagggcctgatatacttgtaaagaaattttattatataaggtctgaaaatgactaaataggaatccaatacccatactgtccagtttaaagagaggttttttcctcccttcatttaaggaaagtaagattactgccaagatgtttctagatttccttagtttgaatctaacagtcnaaaacacattttagaaaatcctacgatagtacttttctggaatctaatccataccacgtatgttgttgctattaccatgcggttttaaaaaaataacttaagctcttctattgtaactaaactatacagccttgaacaaatcacttaaccttaccacatggttagttttctcatctttctcgatctttgacttttttaaatgactataaatgatgagactatctaactttaaaacactacaatgcaaaaattttttgtaaagtgctatacaaacaacttatagcatgtacttacaaattaaaagccagatacattttccgattaaaagatagttttaaaaacagt

SEQ ID NO: 380281 - DNA, 811 bp, Homo Sapiens
tagggacacatcactaatatgaaagaaggacaaagaaacataaaataaggatcaaacacaaatattaggtataaaatcacaatatctgaagtaaaagacatcttgaacaggctatacaacaaaatggatacagttaagaaacaaattaataaattgaaagatcagatttggggaatttccttgaaggagggaacaaaagaaagaaaaatatgtattttttaaatttagcagtacttatatctgggtagtagaaatctcagaaagagggagaaataaaaatggggagggggtaatacttgaaggcataatggagaaaatttcctggaataaaaaaataagatgcagaccctcagattgaagagatcatttaaagacgaagatgataaaggaaaagccacacttagacaaattacagtacaattttaggacctcaaagacaaacaaaaaatcctaaaagttgatagagaaaaggcggattgcataaaaaagaaagaagcagcaaatttctatcagaattcaaaaaaataaacaactggaagcaagaagactatcgtgtcttttcaaagaattaaaggaaaagaaatctgaacttagaatgatatgtccaaactgtcatccaaagatcagagcataataaaaaatattctcagaaatacaaagcgatcagcagctgagaccttcactgaaaatagtttttgatgaagtactaaaataagagattattaaaatccgggagaatgagaagacagaataatacctaatgtattttacctgataaagtttgttatctataaaataaatatctaagacc

SEQ ID NO: 380282 - DNA, 591 bp, Homo Sapiens
ccatgatggctccgtctcattctgtcacagatcgtctttataagccagacatgtcagtgctataaactgatgagacacccacagaatttaacagaaatcgaaggtgtggaaaggatctcagacaagcgaatccatcactgttactgtacagataagaaatggaggccaaataggattagcaacttgctcaggactccacagaaagagcagcaactggatggcacagaatgagttctgacgtttacatcagaagatggccctgaaccggagccaaaagctggccgaggagctgggggagattctgagactcacactttcatttgtgaagtgagatgctgactctattgttggttttgtttgggggtttgatgctgaaataaagcaatacacacgaggaaatttactggcattgtattaaaaaacaaagttaatgtatgatgatgccgtagagtgattcatgaatggcattatgaatattttaaaaacacaaaaggaattaaaagagtatacttggatgttaatgaaaataaaatttcattgagaacaagaatcttggtaaacatcagttgatattaaaaatttattgctttt

SEQ ID NO: 380283 - DNA, 595 bp, Homo Sapiens
ataatgaaagaacacaaggatacaggatattgagaatcttaaaatgttatgaagtatgcatttttgttttgaaaacctgtccctgtctgtttaatggtttggtttttaggaactattttccttcctgaagtgggcagatttacaaactagaattcatactggactatggatcctttaatcattaatagagccttattaaacttttcattgtattttttatgtcctgctcagatttgatctgagttgggaactaaaaggaatttactatttcagaatctaatatgtcctcttcattttctggatttgatacgtaatttttaatattatgcagaacaaacggatcttaagagaatctcatgcgtatgactctggagagcgtatattaactacttttttacatgtcagtgacttgtcacttttggagaggctacaaaaataattgtacaaaactatcttattaaggaacttaaagtaacttaagtgccttaataagatgtttataaattttcagtactagctggagaaagcaaaactataagttcaattactgtatatctgtgaccttgccttgacctcagactttacataaagagca

SEQ ID NO: 380284 - DNA, 790 bp, Homo Sapiens
  misc_feature (15)..(15): n is a, c, g, or t
  misc_feature (210)..(246): n is a, c, g, or t
gacataacccaaagnaaatttgaaagattcaaaaagagttttccaaatgtattctcatttctttctcatatttgttcaaggtcttagtttccaagcattcaaaattaaatcttgtttgcctaactcttctaacatctattaccaacctaacatattacaattctgtttaaaatgtgcagttctaaatgttcttgcgtgcctcactgtggnnnnnnnnnnnnnnnnnnnnnnnnnnnnnnnnnnnnncagaagtataattacaagaagtgcagagtccttggccttaccctgtacctacagaagtccgcttttgggcaagatccccagatgattcatatgtgtattaatattgaaaaaattggaactagtaagtcctagaggaggtaaattttaagggctttttaagggaacttccaagtgtgaagacatttctggagatgacaagtcaacatagcatgggatcttggctagacaaggaaagcgagagaacattaaataaacacaagcaacgacaaaccacctatgttataattttatcctggaccatccaaagtttactcttggtcacgctgtctaacccagcctgcctcctggcacttgctagttagaaccagggaagagaaaactaatatgtgttaggtattataatttccttatgtcacataaattttggtgccatagctagcaatgtttcttaatatcacatcagtacaatgtgtccattgccttctgtaacatttttaatgctatcaataatacattgacattataaaaataaatgaatgtggtc

SEQ ID NO: 380285 - DNA, 463 bp, Homo Sapiens
  misc_feature (32)..(32): n is a, c, g, or t
  misc_feature (58)..(58): n is a, c, g, or t
  misc_feature (67)..(67): n is a, c, g, or t
tttagattgtccatcctggttgtccaacctcngaatgtactggaaacccatggaagtntacattttnaaatgggtgtgcctaaatggtatatgaattatttctccaataagtgtgtttttttaaaaaagctattgattatttcccatcagtctcattcctcttgacaaaaatctgagttgatggtgagcatgtacttcattcctgactccaaagggtacaatatttacaatatttgaatttgggagtgactttactattacaacccttccccttgaagacctggaagacccagcaacataaggacaaacagtagtctcagccttgtactaagacttcagcaaaaataagagagatgggagggactactattgggaaggaggggcaatatttctaggcaaatattgtggtagaatggataagagcttcggctcattgggcaaataaaccaagttttaaatcctg

SEQ ID NO: 380286 - DNA, 704 bp, Homo Sapiens
  misc_feature (41)..(41): n is a, c, g, or t
tttcagagtactactttttagcctcaaagacattcttccanctatccactattgatacatttaaataatttattaaaaaatttacaaacacttcaaataaaattatgaagttcttcagaagatattcctaaaatataggcatgttttcctttaaatatctgggattctatctacagtgcctctgttatattcattcaaattattcttataatctaaaacaatgaagcttctcaactggtggaatgctgccagaggatttcaacagagtttgaaggcaacataaccaaaaggcatagtttaaattggcttaggaaatgaatgggctccttatcagagcagctgaaggctgtatacaattaacagcatctgtcaactttcatagggccccatatagaacaagcaggccctacagcctggcggcaaccttcagcttctggcaccttcggatccacatgacctgaaaacagaaagacggcttcaagccatcactagaaggcctctgaatcattttagtgatattgctaattaatgttaattatttgaacaattctgttaaccttagcatcaggctttaaattaaccagctaccattcaaaatataaaatcatttgtagagataagtttatatttataataactgattttacagtctcttacatgttatttttatttttaaagactatgaaaattatctacctacctgc

SEQ ID NO: 380287 - DNA, 325 bp, Homo Sapiens
  misc_feature (266)..(266): n is a, c, g, or t
ccaaatgggtcgtgtctacagtactatgtaggaaagtgctgcaagagagagcccattttgcctaaacaagaaccacgattatgtaaagttctttctgtgcacctctctgaagacctgggtcatatctgcagcctgcaactctatccctgaactcatctttgaaactacccagagatagactgtcaagagcttcagagctttacaacaggatcttccaagtgccctgagaggtcatgatggagccaatagaaataaatcatacaaancaaagccagaacctggtgggagggatgcttacaaaacaacataaacgagaagttgtctg

SEQ ID NO: 380288 - DNA, 709 bp, Homo Sapiens
  misc_feature (51)..(51): n is a, c, g, or t
  misc_feature (127)..(127): n is a, c, g, or t
  misc_feature (678)..(678): n is a, c, g, or t
ctctgaagatgaggtaaaatccaatacagctgctgctgctgatgagctgtntgagtttctgcagacaatctgcaaaaaaatggaagttctcaaggcccagttgctggtgtctcttttgaggccccanaacttggttgatttatcttattggcactctgcatgaatcaagagtaggctcaaaggcaagccttatctcctgcgaacacaattccatacaggtctcaactcaatatttaaatttgtttggaactggctacaaatttggaacttcctcaaatgatattaaaagctctacacaaaaggtatgcagaagcagttactggtttttcaagaacaaagacaactgcaaaaaagcaacagttctgtaaatggagctgtagtaaatgttgagacagcaataacaaggtaacaaatagagcagaggatgacctttttgtaaaaaattgctgcctcaatatttcactatttaaaaaaaagattcccacaacatgatcttctgagagaaagaatccactgctgtgtttgaaagaggagttggttctggtggtgaaaggactgggaatgtcgattaagatatgcaagactatctaacacaaagtccaacatttgcttcagcaacacccagtcagctcctggagggtgaagtcctgctctctagctgtatccagggctcttttncttgtggcattttaaaaaatgtagcagtagt

SEQ ID NO: 380289 - DNA, 342 bp, Homo Sapiens
gagatggagtcttgtgctataatctgtagagctacagagcacacttcagtgggaaaagaggaagaagaaagaggaataatggttaagcacaaagagagagattgattctaaaaaccagagtaaaattgggaacagagtgaggggtaagatgtatttaagaaattctgctgtataaatcctggtataacctgacaatttggagttgtcacatataatcaagtctctattggctctgagaccagataactaacttgcagtaaaatatccatctttctttaatatcatccttcaaatctcagtgtccttatctgtaaaataggaattttaatatctttcattcag

SEQ ID NO: 380290 - DNA, 739 bp, Homo Sapiens
tatatttaaataagtttaatgttacagtattggtatttggtaggttttcttataaggttcccttatccattttgctgtaattaacaatcggataatgtattagccagccaaaaattatgtatgctgtcaggataaatcaagtcaaaatgtttttcaatgtcactacagaaattgtttttggttcaactatatgactatcaaaggttatgtacaacgcacaactctacccagatactcatccttgcactgttctaaataaaggaaacaagactcttcagtactctgtttttcaaactgtaggtcaagatctgttagtgagttgtaaaatcaatttagtcaccattggcaataaaatagaatagagaggcaagtatcaacatgcatcaaaccaaaaggattgtactgtgaaacgcctgcttcatggatctatatgcatacatgcacacataagaaaatggatttcttactaagagatactgttaaaagagtctgaaaacacagccttagtggaatagctgtctctaatcttggggctgaggcatgcacgcatgaagacttgagggatattctcaaatagtccagtgacttgtggagggagaagttgatggtataatgacaatttgtgggataaagtgatgtaaaggtttaagaaatgagttaacagattcaaaacactaagtaaataaacatccccacttcttccccacccagacttaacaaacatagctcagatactctg

SEQ ID NO: 380291 - DNA, 645 bp, Homo Sapiens
  misc_feature (19)..(19): n is a, c, g, or t
  misc_feature (43)..(43): n is a, c, g, or t
  misc_feature (74)..(74): n is a, c, g, or t
ctgattacgatttaatcgnctcactttgggaattggccctcgngccaggaattcggcacgagggtgtgtactgngcacattataactcaaaagcaaagatggctagaaaatgatggttattatgtattggctgacttatttgacactcttaattatttgtcctgtggggtcatggttaagggtgaggtgctcagtcttactgtctgagtttcaatccacggctcagcctctccccagatctgaggtccagagcgagtcacagaaccctgtaaacttcaggctccttatttgaaaaatggccgtgacaaaagtagttcccatgtaggatgttaaacgtgttgcttggcacatggttagttattggtaaaggctataaattagtttaaattaaaaaatttattataagtcaatgtatttaaattaatttacagctatttaacaatagctaattagcacagcattataattgcagtaccagagaaaaacaacatgaaggaatacaagtatttattccctacattgctaaaataccaacactgattatcaatattttctatggaaaggtattcagaatgcctaacattttaaaattcagctaaaatattagacatttcaaataaaaagtaaatattagaagcattaagt

SEQ ID NO: 380292 - DNA, 727 bp, Homo Sapiens
  misc_feature (371)..(401): n is a, c, g, or t
  misc_feature (481)..(589): n is a, c, g, or t
  misc_feature (682)..(682): n is a, c, g, or t
  misc_feature (715)..(715): n is a, c, g, or t
ccaggaatccgcccatcccagggacacattgtaggactgaagtctttactgtagtgtccgcagatttgttttatggcaaccccaacttccagacaaaaagcatttccagtaaccctctaacagttccacagatgggacataatactttgcctaatactttaagagtaggtaattttggtctttttacctggaactaggctggaaataatagatttggcttggtaaatgaggggttaaattaaggatcactgagttaatcaccttcttccacaagttctggtctaaatgtccaaatctatttacaacttgtgactagtatagtaggtcatttgtttataacatgtgacttgtttctattttggtccagatgnnnnnnnnnnnnnnnnnnnnnnnnnnnnnnncacttttaaatgcagggaatgaaagtgaattattatggggaccctatacaggtttttactgtaaaaatcatatatgtttnnnnnnnnnnnnnnnnnnnnnnnnnnnnnnnnnnnnnnnnnnnnnnnnnnnnnnnnnnnnnnnnnnnnnnnnnnnnnnnnnnnnnnnnnnnnnnnnnnnnnnnnnnnnncacaatttctacattagactatagtactataatttttttaaaatatcaggaatttctagaaatgaattaataccctgctattttctgggattntcattattctctatttcaatcattacaaaagantaaatggtaaaa

SEQ ID NO: 380293 - DNA, 648 bp, Homo Sapiens
  misc_feature (621)..(621): n is a, c, g, or t
  misc_feature (638)..(638): n is a, c, g, or t
atctcaggccatctgcagagaagaaaggtggtacataactttttcttgttagcatttggtaggggtgttttattgaccaaatatgttcccacaacctagttttttgtaactgactaaatatagtagatttttaaattttatcatcaaaatctatagacaatttttgattaaaatagactccacatctatgtcctgcttttcttcttattattaattacattgttgtataaaagaacaagacttcagaatcaagaatatcttgtctcttggcattgaatttatacaaggtgctctttctttaatgctgtctcaaaggacatattttttactcattaaaaaggaagatcagaatctagttgtatgcattgctccaacatattagtaattaaaattaggaggtaaatgtggtcaaagcgatagaaagacttgagatgtcatttatattgattatagcactctacaaacagaaattgttaaataatagtttatataaatattttgtatcatttcaaatatttgagtgcctgaagtttctcctcttgtatagttcagattatcaatttgaagacttactccgttagttaaaatgtttctagtctcgtttattatataaaagcaatntttcagttaaatgtggntccgcttaca

SEQ ID NO: 380294 - DNA, 237 bp, Homo Sapiens
  misc_feature (41)..(41): n is a, c, g, or t
aaactgctacttatttttctttcttccttctttaaaaaaanataggggcaacaaaaggagtcccacaagtggaacttgtagaaaatataatcctgaaatgaacagctaacacaaattgttatagattaaaagataaatcaatttataaaactgctattctgaaattgcaacaatcttgtacagtcaggactgataaaatggggtaatcagacattttatatgtccataaatgtaaaa

SEQ ID NO: 380295 - DNA, 472 bp, Homo Sapiens
  misc_feature (159)..(159): n is a, c, g, or t
  misc_feature (378)..(407): n is a, c, g, or t
tttaaggtttggtctaatactggtatatttttataagattgaaattgtgtccccatctttaacttaaacattttcattatcagggtcaatgtgctagaactgaattgtaacatttttaggcacagatggaaaaaaatgttattggctccttgaaaatgntgtgtgtgtggcgaggggaatagatccacaaaagcatgtatgtacttacaaaccaagctgtagagatcaagaaaagaacttaagtgttgatctcaagatttctaaattgtcaagatttacatggcattgtggtggaactagttaacacttagagcttttggtatgtaataactatttgctatggactgattaaatgtttcaaaagattgtgttcttcannnnnnnnnnnnnnnnnnnnnnnnnnnnnnaactgcctctcagattatatttacttagtttaaatttctttgctttattcattaaagtataaaaa

SEQ ID NO: 380296 - DNA, 892 bp, Homo Sapiens
  misc_feature (680)..(725): n is a, c, g, or t
aattcggaacgaggtttaaaggttcagtaattttatttcataaaggtatctaaaaagactaaaccagtcatcttaaatatattaccactaaagcccaatatccacctactgtctgaatttggagagagtatggctaatgttagatactaaacatggtgagaatcctctcagatactggtttcagagagctgtcacccatagaaccaagggctaaaaagttactcatctttatggtataattttacttcaatctaacaaaaatttactgagcatctacagtgttctgggcctcgagccaggtgctgggacacagaggtgagccactcatgagtcctccccatgagtctctttagctggagaaccactttgtctagagtgtgtgattttgcacttaacctctctagagtctatggtgtgtgagatgaacagtgtaatattgttttgcatagagaggatactgtagacagaacccagtgatggagccttaagtaaagagtataaattttggtgtgtggttggtagaatcactataaatgtaatgtgacttaaaccttagacatcaatcattattttggtactttaaatataactgatgttttattccttgtgactacactatttagatatttacattaaatatcgaaaaactgatcacaaagatactataatacttttatacnnnnnnnnnnnnnnnnnnnnnnnnnnnnnnnnnnnnnnnnnnnnnntttactattggcaattagtaattattttccctttatgcaatttcttttagagggcttctgtcttctcctcctacccaatagtaccatgaaattgtattattaactgagctatagcaagtcataatgatcatttgaaatcatttattaaataaatgaggtaaagatgt

SEQ ID NO: 380297 - DNA, 708 bp, Homo Sapiens
  misc_feature (21)..(21): n is a, c, g, or t
  misc_feature (144)..(144): n is a, c, g, or t
tttaagctggtaattgaaganccctagttttatgttgccattcatccagaggctgtagtacaggcttcacacatctaaagttggaaaatagcagcaaaaagtctacctgtgaaatgccaatgaacttagggcatagaatttaanccttgtaactaatgagatgaaaggaaacatcaaaaagaactcctattaagaaactctgccaatatatcccgttttttatataattagatattccctatttaaccaaaaactataacccaaagtataaatgttgaataattttataaaatgctcagaatattttcataatgtaaaaccttacctcccaaaatattttaaaggtattaagattacttacgaacatttatttaacttctataaatcactgcagtgctgtgtgtgacataatttacctaatgcctgcactcagacaaaagaaaagatgttttaagagtatgatcctaccatatttttaccaagtgttgcatgctaaagcatgctcttagaataattacaagtatttctcatcagaacccatgaacgtatctcagtgaaggaaggggccaataaacattggtgacttcactgggaactgtataactaccaaaatcgaatgaacatatctagttgtaacagaggtgtggggatgtcttagttacgtctgcacatttgctgtgaatactagtatcttttaaaaaaataatt

SEQ ID NO: 380298 - DNA, 849 bp, Homo Sapiens
tttatggcaaaagatactttggtttatctttctgcttaacacacattttaagtagtgtatgctctgttcaatcgttttgctgaatatttattagcattccatcactttgtgtttaattaatagaagttgagttcaaacaatgtttttaaaattcacacaaagctcgttagattcttttaactctgcctggcaacgcatttgtgtcttctggcatagttttggataacactcatgaactcaactccatctctttcattagaaaagagtattgctaagtgcatgtacatgtcatattaagacatgatacacattgcctagaaatgctaaaacagtcttaattcttcggcttgatttgcttgtgtgtgtcactctagggaaattttctaacagtatctttttgatggtgtgttccagaaatctttttaaatagttacttttagaacaggaagttttaaaatttgtagtaccatgtttataaaataaatttttaaatagttctgtagccatttaaattaatacataaatgtaaattgtgagatgagataaacatgaaggtttaatctttcaaatagttttccaaatgtagccagaatgtgagtactttggggtatgctttatagtttctcttagaaaaaggaaaaatagcactctgtttagaaatgtaataagagtagctttcaaaagtatgatgatttatttcaaatagctaactttgagctgtcatgatgttgatgtgaatgatatatattatttttatcagtgtaggaaggtttgagctatatttttgataatttgaatatgatattgaaaggtttattttgtttcataataaaaccaccatagaagttg

SEQ ID NO: 380299 - DNA, 806 bp, Homo Sapiens
  misc_feature (791)..(791): n is a, c, g, or t
ttaattggcttgagttgtcctgaaaatcgcttctgcaaggaaagagtccaggaaaaaactggcaattctttttttcttaatctaataccaaatttacagatttctggcccttattttacttagcgtttgttcctttcagtttactctttcgtgatctgcataggataaatgaaaatgaaccatataatcaaactccatcattacttgtgtacattcaataaataaaaatttctatatgcatgcaggattgtcactggcacatgaattagaatcccacctccctttcatcctgaaccccatcccaacattaaggggcagaggaaaggaataaagatgctcaaggtcattttcatcttttaaagtcttcaaaaacccgaagtttaccaggatttaacagagaaaaactggctcccatgggtcatttttttaaaaatttaaagtaccctaccactttaagactttttcaaatttcaaattcagggtggtgaaacagtcctacccttacccaacacaggttaaagacttttacacgttgtatttcatgtcattgtaataaaaacagcgattcaaacaagtaaaatagtcaatatgacttttttctctctctcttaatgtattacagtgaaaaatgctttcttttcagatctgtgggaactgcaaaggtttaagcacaacaaatcccaagaaaaatgtaaatggaacaaatctaaaccacgtacgagtttttactcatgtggctctcccaggcttcaggcactgtaaatagatttgttgtgcttttagtgggaagnatattcagaatttaa

SEQ ID NO: 380300 - DNA, 743 bp, Homo Sapiens
  misc_feature (54)..(140): n is a, c, g, or t
  misc_feature (346)..(346): n is a, c, g, or t
caggccctgggtcctcgacgggagactgaatcctaactcgacacttcaaattgnnnnnnnnnnnnnnnnnnnnnnnnnnnnnnnnnnnnnnnnnnnnnnnnnnnnnnnnnnnnnnnnnnnnnnnnnnnnnnnnnnnnnnntggcctacaagtcaggtagcatctggcacttagtaagtgctcagtaaacactagctaggctttaaagtgaactgagaccttcttagacactcctgactaaaatgatctagttgagatcactcactcactagaacaaaaaagtgttattagaatctataacagccataatttcttgacttttaattcttcagtactgttcttaacancaaagctagtttccacaaagtttggagatttttattacatgtgaagacagggtaagactttataacttcaggactgacaaggatttggggcaagacagagtactgggaaacaagcttaaagttgagagagctcattatagaaacaatgcattagttttgaagttgagaatacagacaatcctagataattctggcttaaaaccactttacctaaagtacacaaatattagtttcaactacttggttcattacctcaaatatccactttactcaactatgtaataatcacaaatgattgacctgtaaccaataggatttctgggagaaggtaacttccattcctttgtggactccggctggaaaagtctcttgggttaataaagttagattccatact

SEQ ID NO: 380301 - DNA, 803 bp, Homo Sapiens
ggcgagtccggagatgcaagtattcatgatacagtagaaaatctgatcatcctagcaaacaacagtttgtcttctaatgggaatgtaacagaatctggatgcaaagaatgtgaggaactggaggaaaaaaatattaaagaatttttgcagagttttgtacatattgtccaaatgttcatcaacacttcttgattgcaattgattctttttaaagtgtttctgttattaacaaacatcactctgctgcttagacataacaaaacactcggcatttcaaatgtgctgtcaaaacaagtttttctgtcaagaagatgatcagaccttggatcagatgaactcttagaaatgaaggcagaaaaatgtcattgagtaatatagtgactatgaacttctctcagacttactttactcatttttttaatttattattgaaattgtacatatttgtggaataatgtaaaatgttgaataaaaatatgtacaagtgttgttttttaagttgcactgatattttacctcttattgcaaaatagcatttgtttaagggtgatagtcaaattatgtattggtgggggctgggtaccaatgctgcaggtcaacagctatgctggtaggctcctgcctgtgtggaaccactgactactggctctcattgacttccttactaagcatagcaaacagaggaagaatttgttatcagtaagaaaaagaagaactatatgtgaatcctcttctttacactgtaatttagttattgatgtataaagcaactgttatgaaataaagaaattgcaataactggc

SEQ ID NO: 380302 - DNA, 816 bp, Homo Sapiens
  misc_feature (611)..(662): n is a, c, g, or t
aggatgtctactctgcctttgtagaagtgtctcactgatttttacatatttttccagcacacaaacatacacaatttaactcaaagcatcttagcagagcttaattaaatggatagatgtctgttccctttgctggacgccaagaatacaaaaaagaacaagtgacaattttctctgtcttagggagaagagacagcagaagtgtaaatgatccctaaagagtgatagatgttatcatgaagccacaggaggggtgccaggctgcacaaaagagacactggatgcttcttggtagtagaggcagtggcttcccagccttggggctaaggcttgtagggtgaattggaacttttcagatgagcaaggcaaagaagggaccttctaacattccttggatggaacatttttgacattttctcatttacagctacttatattttctacaagtgtcactgtgaccaacttatgtacacatactttttcttgcttagttataataatctgttcttaaagaaaatgtcagtctctacattctatgctgactgttaaggaaagagcacccacatctgctcctacttagctttttttctgtggttcttacacagtattcnnnnnnnnnnnnnnnnnnnnnnnnnnnnnnnnnnnnnnnnnnnnnnnnnnnngaaagagttttaaacagataagatggcaaaagtgactgatctctactcccccagtttgaatggtaaatttggaatggtaaattcccatgaacatatatggaaatgtctttatcctactttctccaataaaggctggtcttagcttttcaaatgc

SEQ ID NO: 380303 - DNA, 646 bp, Homo Sapiens
  misc_feature (80)..(92): n is a, c, g, or t
aattcggcatgaggctttcatagcatgccatccaacttatttgttattcgatgtaagcatggagaaacctgcttaagtcnnnnnnnnnnnnnaagtggaaacaaaaaagaactgcacagggaaatggtccacagtaaggctctttgccctttaagtgaagatccttgggctctggaagacaaatgaccaggtggattaaaagatccgtcaatcttttctatgcctggggaacccctcccaacccctgtaagacttgatcttcgtatggctgagggtggggctggctgtccattaaattaccacatactgaaattgcccagagaaatgtgatgggttctgacgtttatacagcacttcatacttttagatccatgagagactagcatttttctatcaggattcatggatgtgattccacttacgataaaagctgcttagaggtggaaaccccgcagcttttcctactgactttcttttgtcgggagctctgtggccttccagagaccactgagaaggaccagctccatgcacaagaaggtgatcaattttgcaaaagacaaaaatcttaaccatttccagaaactactagttatattaggcacggttttaaaaaccttaaacaaaataaaggccatcccaaaccctg

SEQ ID NO: 380304 - DNA, 670 bp, Homo Sapiens
aaaaaagaaaagaaaagcctccgctggacagtgtccatcatggaagacattcattgtgcctggttcagtgccctgcacgtcgaattggagcctggatctgtaatgagtttagtgcgtttgtgaaactgtgtggtgtgccatcatttaggcagtagctgtgccccatttaaaagtttagaaaaatcaagctttttaaaaaccaataattttaggtaatgttagggacgaaggaagggatgttcttcttaagtggaagaccttttggaataccgtaaacctctcctaatttgttttgttattttggatttttcttgagaggctgcactgtaaactgccttttattagcaaatgtgagctgatgatagtcctggttgtttacaccatcctgccaaaaagagttgttacagaataatcgtgaggagtcttaaacactggaggaatttgagattctgtagaatattaaccgatctggactgttctttctttttttgagtggttctgatgcagatttacgtaatttctattatatagaccacctaatgattaaagagcctgtgaaaagcctcacatctgaaaggtacctgaaagtcttttctttctgtttgactatggaaagcgtactctgtatttaaccctcaaattgaaggaaataaaaatctagaggattctt

SEQ ID NO: 380305 - DNA, 455 bp, Homo Sapiens
gttgaacaagtcagtggggactgtgatgatgaagatggttgcgggggatcaggaagtggagaagtcaagaggacactgaagatcacagactggatgccagatgatatgaacttcagtgatgtaaagcaaatccatcaaacagacactggcagtactttagacacaacaggagcaggatgtgcagtggcgactgaatctatgacattcactctgataagtgtggtgatgttacttcccgggatttggtaactgaactcttctgtcctgacataccttactgaagtctcgatttcttctctctctgcatatgcctggaataagagatcctttttcaatgtaacaattatatttatgaaaagatatgttacactaacttctcagaagccaagctgaaatattcataaagtccctaaaactcaacgtttaaatgacacactttaaaaatatgtcttttt

SEQ ID NO: 380306 - DNA, 555 bp, Homo Sapiens
ttttgcctcatgatgtttaataacctgcttaagtttgtcagtattctgtacaaattgagcaaatgtatgagtaataaagaaaagaaaaaattgaaagtaggagggtatatttatgagtaatctattatataggagtcatgcctagaatgaataagaagagttaaagaacgattcctaaatagaataagaagatgtaggcttctctcacatggaagcgataaacttgaataaaatatttaaatcttcacataacagaatgagaatttaggcatctgaataattccaatatcaaagaacaaatttagtggaattaaataggttttcataacagaaaatttttagaagtattagtagaaggagatgtaggaagtacacccttacttcgatgaattaagggaaattgctgtttcaacataaaaataaagctggctctaagaatcttctttagggggctgttattgatgtccctcctaggaaaactcaagtgtcactgataccttagaaatatcattagtgaacgattttattcattttgagttaagaggttttttagcc

SEQ ID NO: 380307 - DNA, 849 bp, Homo Sapiens
  misc_feature (164)..(164): n is a, c, g, or t
caaatttaataacgtatttattttaagaataaaatgccctcttttgttggtgccagaatttgtgttcatactttgttgtcactagtggtacagattctcttctactaaaatttagttgagggtgtttgaaagacctcaaatgggcttctctgggtatcgtttcncaaggctcccacagagtgaaaaaccaaacagtcacagaataaactcttatagaggcagttattcatttcctgagctaacccacttccttcttcatacatttccttcctcttcatcaacgtggttttttgaaattagcattgaaatcatcttgcaaaatatacttttggacctagggccgggattctaggcaaattccaatggccatgtcatttttacatcatcactgtagtgatacaaaattagaacgccaaatgaagtgtcatgtcagtagtacagaaggctccctgcaatgctaattgtgtttcagcaaaagaatctgaatcattatgaactagatccatactgtgagaaaacaaatggttattaaaaaaactggaatgcaaaaaatttcatgggttcctgactactccatatggaaaagtatggcatctatcataaggaaataaatttttttaacctttcaaatcttagcgaaactgtaatgagttgttgggtttctccactctaaatacaaccttggagataaaaactggaagtctcacaattattaaatttacctattttattagacatgcaccttctcaatgattattgtcctgactttgatcaaagctaacacaagaagttgaactaaaatgtggctctcattattcttctgtgctaataaatataaaatataattta

SEQ ID NO: 380308 - DNA, 525 bp, Homo Sapiens
caaatatttttcatccatggatgcagtttcacatctatggagggctgactagcattcaagagcttttggtttaaaagatcaaaacatcccagcagtgttgatcagtgacaattctattaccatataaggtttcccaaatccttacccagcttagttctcttgggaagctcttaattgttcctattttctaggaagttatcaaagataacaatctcatatggaattaccaaccccctgtgtaagaatgagattttcattacctcactggtgaatcagaaaaagtatctcactattacattggtttccattctgagtcataggcctaaagtattaataaaaaagcctagagtttgaataaactgcactatcatgagcttaccaaaatcaatgacttaggatttcctgtcttttatttaaagctttaccaagttaaatgtggaatggaaactggtgacactttgcccaggaatgtcagggaggttaacttatgtctcaatttttttcatgcacagtcccaggagctcc

SEQ ID NO: 380309 - DNA, 487 bp, Homo Sapiens
  misc_feature (419)..(419): n is a, c, g, or t
  misc_feature (448)..(448): n is a, c, g, or t
  misc_feature (459)..(459): n is a, c, g, or t
  misc_feature (473)..(473): n is a, c, g, or t
caccattattatgtgtatgtggtgttggggattgctgctgtcttacagactctgagctgcttgttttcctgggagcatctggacacatggttaatctctggagtgacatcttcccttaggtcatctgttcttgttcagcgtttttctgatttgcatccttgcctgctcctcagctaagaacttaactttctttgtttttattggaaagatccaagtaacatcctgttatgttacaggaaacttttgaaagagataaacagaattagaaaatatataaaagatgtgattgatggaggggtgatttttggaagtgtatatctttggtgagaatatactttcttattctttttgagaggctttctggtaactacttggtgtggcagatgtcattgacatctttccagtatttccttggcttncaatactttgtgaattaaccctctgaaantaaacttgtantgaggctgcagaanccttataatccaga

SEQ ID NO: 380310 - DNA, 636 bp, Homo Sapiens
  misc_feature (27)..(27): n is a, c, g, or t
atgaagtagctctgcaaatcttggtancttgaaagggaacctgggacacaggcttagaatcatgaggcctttaccatgtgtataagcttattttgcagacaattctagttatgcttatgccttatgacttatcctgtagctttttcccattttcaaagaaaacaaataatttttgttgagtctgaggaagcagcaattgcattgccaaaggctggccctgcctaactcaatatcctttggccaattgacttgtaccagcttttaaaagctatgggttacaaaggatcttcaaggccatttcagctatagagttttaatgcttatatctatctctcatgactgaaaaccaatggtttgggggaaagagaaagatgttaaacaataccatggtgacataatcatcaaaatccagattgtggaagactaattttacctgacaacctgatctctttaacaaacaaattacaaataagaagggtgggaaaggaagacagagataaagctggtgatagagaatgtgagagctagccttcaaacttaacagattcagagactctgtcaaacaaattcaatgtatgaatatggcttgattcagaccaagactgtgaaaagagaaagaaaagaaatggggatttt

SEQ ID NO: 380311 - DNA, 432 bp, Homo Sapiens
  misc_feature (21)..(21): n is a, c, g, or t
  misc_feature (23)..(23): n is a, c, g, or t
  misc_feature (35)..(35): n is a, c, g, or t
  misc_feature (131)..(131): n is a, c, g, or t
cagttatcctgtctgtagatnantgtttcttttgngccgtgtcttcagggcaggagggatgggcaggcacacgtgcttggttgtacatcttgacttgattccttccatgaaggttggttggctgaatgagntcgctcgcggtgatagataccaagccacagctcccaaagcaaaactggctgaggccatgaagactcacaagattgtctgagtatccccactacacggttagccagtcacacagtgatctgatctggactgccgtttccggaagttgtaagacatttttcacctcctgccaaagtacctggggctctgctggtggctgtatcttgaatgcatccaagagaagatgtgatgaaaggtcatgcttgctctttcacttagagagaatcaccagaggaagcatagtggccccaccacccaggctgc

SEQ ID NO: 380312 - DNA, 425 bp, Homo Sapiens
  misc_feature (375)..(375): n is a, c, g, or t
  misc_feature (388)..(388): n is a, c, g, or t
  misc_feature (400)..(400): n is a, c, g, or t
ggggtttccgtgcaaagtgacaaacgacggtaacatgaaccttccaaagccaactgggttgtctttgtctttccgtgccaggtaagaagaagaggacaagccctgcccagtcccaagaagtgttaacaggcgctggagcgttatctgcggctgcactcgcttctccctcctgcagacattcttgctgctttccggtcccacgggacggctcccaggctcccgcctcacggcaagaaaaataaaggcctccccgcacagccagccagcttcgttcattcacgtcaccgacaaacactcctaagcaggcgttgttaaacgttcagggagcgcccgggacctagccgaggccccctcctggctgttcgcggggggatngcggcaccccttnggaaacgattgngggaaaggaaaatttttggttggcc

SEQ ID NO: 380313 - DNA, 384 bp, Homo Sapiens
aactgttaactgaagccaatttaggtttttacaattctctttaattgatccatgaagtcaacattttgtttacaaaaagaaaagcatgcattattagaaagagaagtagaatggacattcacagaggaacacaaagcacagagctttagaagctttcttatgagcccttacccagcctgtagagttaactaaaccatcattactcacatatactaatgaaattgctctatagattactgtttcatcatgttttaaaaaaaagacagtaaattttcacttaaattcatatcctaagagagttcttactgaagatgattttagccatataaaaatgatttagtatcatagatacactaatatttcagtgtcatatactcaaaaacc

SEQ ID NO: 380314 - DNA, 203 bp, Homo Sapiens
aagtgactccctccctgaatcccagagcaaacaatgacaacctcacctatactcatatgtgcaacagcagagatatacacaaaacattcattcaataataacagaatggtctagtgtattaccaatcagccaaataaacacaattattcatttttctcccattttccacaaaaataaagacaccaccttcagacacaaaaggt

SEQ ID NO: 380315 - DNA, 614 bp, Homo Sapiens
  misc_feature (42)..(42): n is a, c, g, or t
  misc_feature (335)..(335): n is a, c, g, or t
  misc_feature (400)..(408): n is a, c, g, or t
gctcgagttggaattgtgacagaccacattgttgactctagnattgaaatggaagggaagaatgtgaaatgaattaggatatcctctgttcacctctattaactttcttaaatgagtataacttagaaataataaaatgcaagtattttaacgttatagttgggagagttttgacaaatgtaaacacccacttcaccaccactaccatcctgatatagtgtgtgtccatcacccaaaaagttctctaaagcccttttgcagttggttcccctccacctgaacagccatccctagtcaactacttttctgctttctgtggctatacgttagatttngacttcagaattctagagtttgaaataaataggccatataatatgcactctttttgtgtctgacnnnnnnnnngcttaacatgatgcttttgaaacccatccatgttgagattcatccatgttatcatgtgtatcaataataagttcctttttattgctgaatagtattctagtatatagatataccacaatttgtttagctgttcacctattgatggacatttaggttgtttcaagttttgatctattatgaataaagctgctatatatataaatcac

SEQ ID NO: 380316 - DNA, 785 bp, Homo Sapiens
  misc_feature (158)..(158): n is a, c, g, or t
  misc_feature (305)..(305): n is a, c, g, or t
  misc_feature (330)..(330): n is a, c, g, or t
  misc_feature (583)..(583): n is a, c, g, or t
aatatctctcgattggggtttgtctgatcgtttcttcacaatcaaattcaggagagggcgtaaaccaggtttcggctgtccaacgcaggccgtggtggctccctgagcaacgacactaccttggggctgcactgataaaactacaagatacctgctcnagagcctggcctgctcttcctggacctcagctcctcactcaatgatgacagcacttttgaagaatcacacctatgctgtttccagctgctggtgctgctgaagtctagagagtgtgccgccagcccaggccaaaattgacgcaaaantacagacatttttaaaactgagaanacaaaataagatgcactccgttttaagggaagcagaaattatgaagagatacaaagtcaccaaaacaattttgttgattaattgtaaaatgtgccacagaacagtaaatatgatggtaaaacgagaagcttccttgagcaatgggaaacaattttactatcctaagatcaggcccagcagggaaaacaccacagggtgaccctcggagttctccaggtctggctccaaaggccagagctcagcactgaatttncctaaacacctacattctggacagtcagcagttatttactcttcaaaggacatgagcaaaacaaagaaatgcttctctctactaacaatgttgcttaatcagaaagaatctaaattggatttcaaaagtttctggtcttctctgtaaagaatggattttgagaaatgtctattgcgatttctaaactaaagctagtcaaaaa

SEQ ID NO: 380317 - DNA, 325 bp, Homo Sapiens
tttgtgggttcagaaggctgagtcactggaggatgggttttatgggactatagttctgagctgggccactttctcctgttacctcacttctatgagttgtcaagtggggacaggggacgtacctttttgcctgggggtcctggcttggaatcttctggatatgtaatctatactcattatgggaatggagtttcttgatggtaagggaatgacatatttgagacttttgttctttctccaattcagacagaaaatggactcaagaatacaccaaaaatccttgatgacatctttgcctactttggtgcaaaataagacgacttac

SEQ ID NO: 380318 - DNA, 265 bp, Homo Sapiens
tcgtcaacttccgtaagttgttttatatacagcttgatccaaggtcttgaagcccttcttattagtagtgatgggatgtagtaggagtgacccagtttttgaaatgtagtatctattgattgtttgcaggctgctttaagatttaagcctgtgtttattaatttcatgataaaatttaatgtcattgatatttatgaatttcagatgacagatactttattaataaagctatgtaaattatattgggaataaattgtttaacatg

SEQ ID NO: 380319 - DNA, 572 bp, Homo Sapiens
  misc_feature (16)..(16): n is a, c, g, or t
  misc_feature (65)..(65): n is a, c, g, or t
  misc_feature (93)..(93): n is a, c, g, or t
  misc_feature (169)..(169): n is a, c, g, or t
  misc_feature (184)..(184): n is a, c, g, or t
catgagaataaataancagaccaataaaagagaatagtgtttagtgggcatgcctctttggaaanccacttagcagaatcagttaacactgancatgtacacaccctgcagccccaacaaatcccctctctttctaggtacagaattaatgcccccccttccgacacanaatatctagctacangtgtaattagtatgtctccatactaatcccccagaatctatgcatacgttaccgtacatggcaaaaaataattaaggttataggtagaattcagttgaccttgatcagctgaccttaaaatagagaaatgatctgggattattcaagtggctgcaaacctaatgagatgagtccataaaaaggaaggaagaagagcctgtgagaagggtctgacctacccttgctggttttgaagatagtcgaagggtcctcaaaccaaggcatgcagatggcttctagaagctgggaatggccctcatccagcaggaaaatggcaacctccgtcctacaaccacaaggaattgaattctgcccacagcccaaatgtgcgggaagtgcctcgtgccgc

SEQ ID NO: 380320 - DNA, 510 bp, Homo Sapiens
  misc_feature (299)..(313): n is a, c, g, or t
agactttttagtagcttccaactacaaaaaaagagaaataatcaattatgtactaatcagacacttttaaaaattacaacagtttattcagagaaacaagctttgtgtgacattctaagcggattttattctgcaggtccttttaacataatgagtaatatttgtgttgggaatgactgagaagaaatttcataatgatgtgaagatctacctgtaaatagttcctctgtcgtatgctggtatttatattctagcatctcaacagtgctgatggtcactcatcttggagttccctgaannnnnnnnnnnnnnncaaaactcctgtaatgttacattacccatacttttgttgttgctgctgttgttgttgttttgagacggagtgtcgctctgtcgcccaggctggagtgcagtggtgccgcgcccggcacattgactgcatactttcaaggagaggactcagagcttttatttatttaaagaaacttgaaaggaggaaagtggattaag

SEQ ID NO: 380321 - DNA, 273 bp, Homo Sapiens
  misc_feature (16)..(16): n is a, c, g, or t
ctataaaattctgagnactaaatatcaaattaaagaaagtactaatcgtcatgcgatgggggatgtactgctatttgcttctagtggtactcactgctcatttcctatattcactggtataaaaaaatttcaaacaccctcaaaaaagcatatactggtggtaccaggaaaacgctgaaaatcattactttctgtgtggtgtccagctcttttggttacatcatcacttcgaccattcacttttaaagaaaaacttttgtggaccaaaatata

SEQ ID NO: 380322 - DNA, 364 bp, Homo Sapiens
taaaacaaatattgacagaagttaagcaagaaatacacagcagcacaataattatagatttcacggcctcattctcaatcatgaatataagaaaaccagatagatcaataagaaaataaaaaacttaaaacattacagaccaattagacctaagagacacatacagaacgttccagttaaaagcagcagaatacatgatattctcaattacacacagagcattctgttaggacacataacaagtcttaataaatttaaggagactgaaatcatacagtgtatattttctgaccaaaatggaatgaaactagaaatcagaagcagaagtaaaaccgtaaatccaaaaaatgggaaattaaaccca

SEQ ID NO: 380323 - DNA, 344 bp, Homo Sapiens
  misc_feature (231)..(231): n is a, c, g, or t
  misc_feature (268)..(268): n is a, c, g, or t
  misc_feature (325)..(325): n is a, c, g, or t
aaactctatccctggtcatggttggctactagactttgatactaggaaacctgcttggtgtgcctgttggctcagactctggtgtgcctgaattctgagcttagtgctcctttcctgtggcttgggatggtggtaatttcatgcacagctaaactcaggaatctctcagagccatctggtcaccggccaaggattttgtgcatttgggtggagaggccaaaatgtcagacncaggggaaaacaaagcaaatatctcctttaataaccngtctctgggaatcagccaagtttaagcctatcagaggtccttcagcccaccccacangcgaggctgggctgccctc

SEQ ID NO: 380324 - DNA, 151 bp, Homo Sapiens
tactagatgctttcaattaatagccctatatttttgtgcaggcgaactgtataacaggataaaaaatgattagtatgtattgaaaaggaggagaacactctcacagaacaccatatgagctttagaccaacaaggggaaacaaggtttaag

SEQ ID NO: 380325 - DNA, 555 bp, Homo Sapiens
cacagtttgagttaatttcaaaatattgagttggttatgttcacattccagagctcctggtctccttcctggttgaatcatacagctaaaatacctcaggcaatgagacatcaaattcagtagcagagtttttcagagaaaaaaacaagactaattcctgaggaccatgacagcatgttgaaaatttgcaagcatggagcctacaccttcctccaaatacaaagcgagcataaacacaaagcgtaatgccctcacctgggtcaggtggcacacaggtacaggaaaagagagtgttgtagcccactttgaagttggagttgatggggtagtaatctgcaagcttgatcatcttcttgaaagcatcatagataaagatgaagctaatcagagaggaaaagccctcctccgtgaaacgtgtgaagtattgaaccaagaagctggcatcagtggctaccaaaatgagacatagaaaggcggaccacaggccaatccaaaggcgaaactccaaatagtcaaaattattgtccctgaaaaaagaaagaaaaatgtttagat

SEQ ID NO: 380326 - DNA, 822 bp, Homo Sapiens
  misc_feature (804)..(804): n is a, c, g, or t
cgttatttttccaatgtagccttactataataaattggagtgacacttagtcttcttggtcagtaacactgaggtggtgttttagatactacacagtaagaatataacaatgcatagaacaagtagtctgagactcatctacattataatcatacgaatttctcaaagagatctcttgggatttcatacattgaaattttaagattttgcttagatgtcacacctgattaatttaccagtttaacagtacctgtttagcacattctcttgccaagtactgccatggccaggtgggggaatacgacagtgaaaagattaacaaggtctctccccttaccatttcctcatgtccttacctcccaaagctgatttagctgcccccactaatatgtccccatggcatctcttacttactactgccacaaaattcacttcacagtaaagacagatctgcttgtttctctctctcatagacactatccacggtggctctgttattcagttatgtgggagccatcacagcattaggattaagagagttgcttctgaagtcaaaccacaagcattttaattctggcctcataatgtatcagttatgtgacccaggcaaattttttaaccttgttgtccctgaatttcctctcctgtaaaatggaaataataaacaaacgcctgtctcatatggttgtagtacagactgcaaaaagtaatttatataacattcttagcaccatgcctaagatttagtaacttctcaaaaacggctacttattcccataccatattttagcaacaagtctatcncagaatgtatgcacagtc

SEQ ID NO: 380327 - DNA, 809 bp, Homo Sapiens
tcatataataaattatataatttattttcatctttaaacagtctacaccgaaaacatttttggaaacatcttttccttttggtaaaacaggttagcaggctgacatcagcttcatattctcatggctaaaatcccccacggttatacagttaagcatagcctttctttgtatttctcaagttgacaccacttgataaaaaacaaaacaatataaacatttctagattttgcctaaggccttagctttaactgcagagtagtgagtaggaaattacaaacatatattcattagccttaaacttaccatcttacatgcgcacataccaaaagggcaaaaggaaagtaaaaagtaaggcacaaaaggatgcagtgagtgttaggtctgtttactaagattgggccataagagacattaaccaacataatatgacagacaaggaaaaaactgactaatagaaccttttcttaaaaagctgttaatagcatattcaattattatcaaattattcaggttgtgagacttcttaaaatgaccaaatttctgtgtatgcaaaactggacttttttcaggttacaaaataaggttggcctcaaaaatgcaaaacataacaaaatcatttaagggtctggcagaggttagtacatctcagaaagtgggaaaaggaaacccaactcttatatgcaccaaatgtgtatgtattccaaaaactttctccgagtatgagtcagactcaccagagctttattattgttgttttcagctgttggttattttcctctgtgaaatataactctcaggatgaacctcc

SEQ ID NO: 380328 - DNA, 709 bp, Homo Sapiens
  misc_feature (43)..(43): n is a, c, g, or t
  misc_feature (72)..(72): n is a, c, g, or t
  misc_feature (134)..(163): n is a, c, g, or t
aagaaattaccatagcaaataaaaaaaggcaaagcaatcaaancgtaaaatataccaaaatgaataaaaagncagtcttaagatgaaaagggcaaaagatgaagaggactatatatattttttatatatacacnnnnnnnnnnnnnnnnnnnnnnnnnnnnnnctaatacaataagtcaaccaaatccatgacttctctcaaggagtctggcagagcaagggcaagtgaatagagaaaagaaatgaaatatggacaaattagtgtaattagaagtctcatgaaaaaaatgatggataggatgggagaacccactaagaatcctctttctggcttgatgttagagaaatattaaaattattttagtaattacttaatcaaacattcatgaagtaaatgttaataaattgggtgaaccaggaagcactaaacccgagttattttaatttattccaaataaaaaactttttgaaccatgaagcagtaaaaatacatgttcctatagggatctgaagagaaaaatatgtaggtagtatatttttaaaaagcaggctttggagaaaatcaaatttggttctaatattagttttgtcaccgtatgaccatgggtaaattcactgaacttctccaagctgtaatgatcccaaatacgaaaggtgggaagtgatgtctacatttaggattagaaataacataaggagtatattattg

SEQ ID NO: 380329 - DNA, 313 bp, Homo Sapiens
  misc_feature (273)..(273): n is a, c, g, or t
gcaaaatacttaccattgtgttacagctgcctaaagtgttcaattcagtaacatgctgtacaggtttgtagcctaggaccaataggctgtaccataaagcctaggtaatgtgatctaggtttgtttaagtacactttgtgatgtttgcacaatgacaatatcacctaatgccacatttcttagaatatatccctgccattaagtgacatcagactatatatgctatttatacaagtcacactttaggtataaaaactgagaaagcttgaaagnaagatgattaaaaatatatgccaggtaaacactaaccaga

SEQ ID NO: 380330 - DNA, 664 bp, Homo Sapiens
ctttctgctcttcctccactgctgaactggtccctaactgaaacagcccctgacttagcccaagcatgcttcctttagctgctgtgagaatttgtcttcctcaccagccaggtcctcaggcaaagtcctcagccagtgctttagagcaacttcccgcaaatcagaaactcactgtgattccaaaaatgtttctgagccctggacccctgcccccaaaatattttcatctttcccccaaacctcctttaaaggagcatgcataacagtgtgctgaaagacagttgttggttttttggattttagccatattatttcctgtatgaaatatgttttatataatctcctattatttttatcttatgttttgtattgttgataaatcctttttgtccttctaagatgtcctattgtaaaatcacttataaggtatgattactctttatgctattactttatatgccatttggtaataaatagtaaattgttgatgatatgattgactgatgcgcagtccagagcatgtatgaataatctcataaaacagtatcacagacattaagctaaactgcttcgtttttttgaaagaacaactcatactttggaacagttgtcaatattaatttgctgcaaatatttaatttaaataaacatttttgtaccatgg

SEQ ID NO: 380331 - DNA, 734 bp, Homo Sapiens
  misc_feature (699)..(699): n is a, c, g, or t
ctaatggctacccatttcactctgggcaggagcacggcattttgtttcttttaataatccagagtgacaatagagttaggcaaagtggttacgttggatgcatattgaaaagattatttcatattttgagacagcatgaaggcattacagctttttagtggtgtgccaatttctcggtggaaagtggaattctcttctcagcccagtcctctccaagccatcttgaggggagacaaagaaccccattatcctgaaatgtgcctgttttgcatctgagggccatatgcacaggtaaacaaccccataaaaagtgatggcttgagcctcatcttcccctataagcgttagtctggaaggtgagaagaagctcacttattacggtgaggcagagtgaaggagagaggaggaaaaacacatttatttgtgtgaaagagaaaatgaaacaggaaggttgtgaaagcctttcccagctaggggaagccaacaggttctgataagtgtgttctcttcacccagaagaaccggaggaacacctctcacagactgagcctagagtgctgtcatgaaacaaaagaaacctctgggaagggagaaagggatcaggagcctgaatgggatgactttctggtggcatcatctggcagatagagttgtctggcccagccatcctctggttcctgttcaactgcctgccacatncagccccctacacttggctctgccatcctcctcct

SEQ ID NO: 380332 - DNA, 728 bp, Homo Sapiens
caggcaataaataataaccccaataaataagtaaattacactgtgtattaaaaagtggtaggtgctttggagtaaagaaaaaatggagcaaggtaaagaggattgggaatggaagggaggggagtagggaaagggcctgatccagtgtatttgatcagtcataaggggcagaggtagtaggacatggtcaaagtagagactcagataacacaaggcctcataaactttggcttttactctctatgcagtgggaagtcatttcagggttttgagcagaaaagtggcataatctgacttatatttctagtgattcctctttctgttgtgttgagaatcaacagaggaaaagcaaggcaatgcagggagaacagttatgaaaataggtaagaaaccattgctacagtcaaggagacaggtgctggtggcttaaaccaggggagttgctgtagaggtggcaaaagatatttggattttgaggtatatattaataggaattcctaaaatattagatataagatctgagaaaaaaaataataaggatgtctcctggatttggcctgatcaactgcagcaccattaactcggatagataaggatgtatggaggccagttctggagcatagatcaggaactgagctctagggcttaaatttaacatccaagggaagatattaagttggactatgtatacaggtcaggagttctgaaaagagatggaaatgtgtgag

SEQ ID NO: 380333 - DNA, 363 bp, Homo Sapiens
  misc_feature (23)..(23): n is a, c, g, or t
  misc_feature (48)..(48): n is a, c, g, or t
  misc_feature (303)..(313): n is a, c, g, or t
ttaaaaccaccctagtaacctgnaatgggcttttctttgggaggggtnaatacattttaaaacatttagtgtgccacctactgctccacagtgactagagagcctctatttcttggtgacttgggactagatcagatgccaaatgtacaaagtttcttaagagctgagattatatcatctgaagtcatcttattttagccaaatctttttaatttcaccggcaaatctgtgaaggaaaacacttgatgttcaaaaagaatagtacattttaaaagctgcgattttaaacagttgttaatgttnnnnnnnnnnngcactagaggtatttttaaacatagaactcttccataaaaagttgatttg

SEQ ID NO: 380334 - DNA, 733 bp, Homo Sapiens
  misc_feature (41)..(41): n is a, c, g, or t
  misc_feature (100)..(100): n is a, c, g, or t
  misc_feature (711)..(711): n is a, c, g, or t
ccaaaaccaagtgacatgatttcatcttgttgggaaggagncaaggaaatgtagcctttcttccatgcagtcatgtatccaggctaaaaatcagggattntactaccatgtatgaaaagaaaatggatatagaggacaagtagcagtttttatcaaagcatccatctgaatgtcttcccatacaaaatggtcatcccaggaggctaagttccaataatgctgtcattgccatagttttcaacttccattggcacctacaatacatttttatacatatccttagaagtgtcaaatattcagtcttaaggagtaaatttgattttttgaagcatcaaaaattatcttagagagaatttcctgtgtaagatatgcaacaaaattagtgatgtcatttgagggcagaaggttggatatggcttcaaacttatgtttctctaaaaacaatttcctgagagggtcttacacatgtttcccaagactggcatcaccatttactctcctcccaacaccatcatcaatgtcatcattagtagtagcacttaacaaagactgaaaacttatgaggagggtgattttcatatgtgacactttctactcaaaatatagtactcaaataaatgcgtttagtgcccctcaacttgtaacttccagacttacatccatttgtctgtataatatgctctaacaacagatggtatatcattaaaaatnctttattacacttgatgctctt

SEQ ID NO: 380335 - DNA, 583 bp, Homo Sapiens
  misc_feature (178)..(178): n is a, c, g, or t
  misc_feature (209)..(209): n is a, c, g, or t
  misc_feature (444)..(502): n is a, c, g, or t
  misc_feature (564)..(564): n is a, c, g, or t
tagaagaaaaggttggtctcagataaaatgaaaattataagtgaagggtgagttttcacattctggaagatctgtagtttacttggaggatgggttttcaaccttgttctattattctatgcttctctattatacaagataaatggatggtttctacccatccacagctccccaggantccatctctcttggtggtgccatttgaccancctccccggctaccctgtagtcacaactgattgggccaagctgggccattctcacttttctctcttgaaatttaatgttaagacatggaaactgagtacatcaggtggttacaagctctgggtttgtaagtcacagccctaggtccatacctttgtattcccttcaccctgtagtgctgtaaaagggaagaggaaaccaggaaggtgatactcatgggaagagatttggaagatnnnnnnnnnnnnnnnnnnnnnnnnnnnnnnnnnnnnnnnnnnnnnnnnnnnnnnnnnnnaagatcagattgagcttgggtaaatcccctggggcaggggaccccaagattggcccaaacanccagaggctagggattggt

SEQ ID NO: 380336 - DNA, 461 bp, Homo Sapiens
  misc_feature (31)..(31): n is a, c, g, or t
  misc_feature (90)..(90): n is a, c, g, or t
gctcctgcgggtgagaatcagaagaaggacncccaaccagcaggaggcccatggagtcatgctcaccaagctcttccccctgagcagtgncgggaggctcactcacttccaaaccacactgacaatggctgtgcagagagaaggttacacagcacagaccctttcttcacaaggggaggacccatgggagaagcctcgcctgtatcacctgagtcaggcttatgcctgggcggggcagatgactgtggcatcggggtgtggccaggctggcctgaggcagcagaggctgggcctttgtcaaggacagctgcacttctctgcctcccggtcaccaggctggaggggtcgtgctcctttagggcagccagcacccagctcaaggtctctgaatccaatggcccatgagccacagctcgggaaggagaaggagctgccggggatccaccgggtgaatgatcaga

SEQ ID NO: 380337 - DNA, 805 bp, Homo Sapiens
  misc_feature (18)..(18): n is a, c, g, or t
  misc_feature (244)..(244): n is a, c, g, or t
  misc_feature (254)..(254): n is a, c, g, or t
aatcttcttgtctatatnaaggctaatgatatctaccctgtagggttgtcttaaagattagaaataatacctgtcaagagcttgacgttaaaagacagaaataaacggtagctaatgtcacgaaatgggaagtgatacactgactgagaatgttacattcaagccacactggatcggagaaacaacctgttcattcctacctctaggcctttgtttcctaacctggaacacatattacccccgncccgcaattnctgccacattctctaagtgccaactgagaagctaactactacagaaaaaaatccttgattgctcatactttccaggtgctcttccacccctgaactgtgtgatgctgtgtctcctgcatagagcggtatctactatcagtatttctgcatgtatcttatacatcatgaatcatgttagattctaaggacctttgtctccttcatagtggattaaaagcatgatgtcattcactatttgtagttaattgaataaaaatatgtgtcaggattaactaaaggcattcctaaggaaatgtcaagcctagatgccaagtctgatctgtaatcttgtccaccatcttttcaataataaattcaaccataacaaatctccctttcattttaacaaactatgcagataccaagtttaggggtaggttttctggttacttttattttttctagagttggtcttttggcttagtcttgtacttttctaggggatttgttcattctgctgggcagaattaagaaaaaactgaaatttatcaaaaataaatgtctttgataag

SEQ ID NO: 380338 - DNA, 584 bp, Homo Sapiens
  misc_feature (557)..(557): n is a, c, g, or t
  misc_feature (570)..(570): n is a, c, g, or t
ttgtgatgttaatcgtgttaaactgtaatctgtgaagttttcattgcctgaactagtcaattctgtataaatcattgtcttaattgttttcctaatcttaccatatttcctaacactgaaatataaatgtttgtcaattagccattcatattgtattgatctttataaactttagtgtgactccattaaactaacctaaacaaaggaaaatcaaagctttccctgtcataggctcagggacattttacttacagccaaaatcatttattcattgaatcaacaacgtatttattgagtatctactgtgaatcaggctctataccaaattttgggagaatgcttaagaaccgagagaaatccaaaccctatattccccagtgagaatttttgaactctacctaaagtattcttctgtaacttccactgagttaagaaattattttgcttctcctatgttataacaaagattaaagttatccacaaaagagtcttaaattaaaatatggcacattcagtccagggaaatgccactatcactcaccaaagcattgagtccncaaagtccagctntaaaataagctaaa

SEQ ID NO: 380339 - DNA, 429 bp, Homo Sapiens
  misc_feature (377)..(377): n is a, c, g, or t
  misc_feature (390)..(390): n is a, c, g, or t
gcgcttcgtgattgctcatagtctggtagaggaagaattcaggtaagcaaaaaagccagtcatatgatcatctctttctgcattttgctcaggatcaacttctacacgactgatctatagcttatggcccctgtcctctttcctttcttgctaagtcatagacataccagttgaatttatacaattcatctgtggggaaagtttcacaaggctgatttttccatatatcttctctgtataatttattgttaataaattcatttaagtattttaaaatcctaaaatatatggtcagtaaagggtgctaaaatggtaaacaaatattactttcagattttcttttcttctctttttattcctaatctaatttccccccnggggtaaatttanttttccccaaaatctcccctttcctttcctaaaccctat

SEQ ID NO: 380340 - DNA, 654 bp, Homo Sapiens
tagaacgaaagtacaaaagggaatctttgtacagatccagaccaaatagccacaatgtataaaacacattatcaaaatgaaattgattaagttgtgaagccttcagaatgatttctaacagtactaaatagtttataaatacttagtagatagtttacgtatctgtgaaaaggagctagtaatgggaacctctcatcaagagagtcattgtatggtaattaaatagaattgtaaaaacagatgctattttaaagtatttaatcttataaaacttcttttaatattacaaacagaaagaactaatacattaattaaaatcataaactttagcaactttaagacctaagaccaatattaaattgaatcaataaataatttttgatacctagacaattcctaagaacaggattcaaaagacttataagacttaatataattttaatttacccttatttcttgagatggctacaaattaacagcgtatgcaaatgacttttatgattacatacatttgttttgctatcttaaatttgttgaaattagctaaaattttaaaacaattcaacagttttctagttttcttttgtgtttggggaaaaaagcaggttactttagctacacataataatataaatggttgagtagactagtgca

SEQ ID NO: 380341 - DNA, 946 bp, Homo Sapiens
  misc_feature (499)..(499): n is a, c, g, or t
attatgggggaaagagattagagataattgtctagttagggggcagctggagaaaataagctaagtttgcaataacagagtacacaagtatagtggcccaggatgtagtgaaagaacaaatcctagagtctttgaaatttctaagggcattctagacctctgttgggatatggtattattttacatactgacacaacctaaattttctttgggtagtaactaatgtcaagtctacatcgactggtaaaacattcaaagaacaaactgacaatgatgttctacctacttgttacatgctcatggaagaccgtgcagtattgaaagtatttgttaattatctgcttagtattaacactaaatttgtagaatgactttcaggtttgttgaacaatgccttttcaggttggaagaagaaaaatagcctcaatctcccaccccatgtaggcactacctcccccaattacccttagaaaatgatcacaccaactctgcctacaanacttccagggatagtggctcattgtctgttaagggcaaactgttcccactgttgggcatatctctttgttagaaagttctttcttaggttgctaaaatctgcctagtaccccgctaccctgttctgtcttatggagcagcccagattatctttactccctctttctcatggcaaccctgaagataatcaaggccagttactcatcatctcccaaccactgtttcctcaactgcccttcatatgtcatggttttcagatccattccaacctgactgaatgttaacagacagaattcttcacattaaggaactgtcttcatcatcatacatgtagaaaagaatctgaacatttaagtgcgaagttttctctagaaatatattcaagatatgtttattctattattgtaaatttcaaacaataaataaataagaatccatgacttccttc

SEQ ID NO: 380342 - DNA, 734 bp, Homo Sapiens
  misc_feature (388)..(388): n is a, c, g, or t
  misc_feature (505)..(514): n is a, c, g, or t
atgtctacatatttactgatataagaagacactgagatatggcccaatggataactgcatcttcaaaacagcacattatattacaattccattttcaaaactgatggacataattgaaaaattattcctgatttgatccagaagctcaaataccatcatataaaattatttaaaagtccagaaaaacagatgcaattaacattaagagtggtgttctctggactgtgattttggttttctttataattttctgtattttctaaaatgtctaaaacaacgaagtattaaaagtgagaagaaaatgagttaactgaatcttctattgaaagattttattttggtgcctcttgacaatcagagagcttcagcatgtaaaattttctagtgnatgtggtatggaataaacttcccatttaccatggataattttcaaccttttccttacctcactttccatacaggactttgcattaatctcaccacagtaaatttgtttttcccacannnnnnnnnnctttctgtggtctcatgttttctaattatttaaagagaagcactcattctttacttggacaaaatattattaatatccccaccatttgggatgatatttttatagggtattataataggtttttatgtatgaatttgactattaaattgaaataattcacactaaatacagatagaaagaataacttatttaatcagaccagatgatatgattaaaggcc

SEQ ID NO: 380343 - DNA, 579 bp, Homo Sapiens
gactgtttattctattatttttattaacataaccaatgtgcttctttctttggtgacagaataaaaaagttttgttttaaaaaatttaatttccacattagcaaaacagcttcacatttgctcattaatgtagttagtaaatttcatgagagtggatactgtaattgtgaaattactgtctactttagaaacattaatgaagacaaaaattatattttctatttcttcccttgttcatttacaactttatggttctactttccaagaagtttgcatcccttaggcaatacaaaggtccagaaagcaacagctaaaggtttaaagacaaagtttgcctctcaagtccaattcagagagaatgaaatatacacaaacacaataatcaaccattgtttaggctaccctacataatatactactattgtctgtaagccacagagtgagggttctgtattttcataaaagcaggatttctaaatatgataattaaaaattcaagccaaagttgttttaaaatattctattccatgaaaaggactgaatgtaaaatacaaaaaaattcctttttgtcccttttaa

SEQ ID NO: 380344 - DNA, 745 bp, Homo Sapiens
  misc_feature (286)..(312): n is a, c, g, or t
  misc_feature (693)..(693): n is a, c, g, or t
caatagatagggaaaaacaaggacagcagaaaagaactgtgaagaaacatatttgcttatattatttcaaagtggattgtaaatatttgagattggtagatgctgtaggcagaggcagcataaaatgaatgaaaaatctcacatgtctgagaggtcacactgcaagtctaaccctgcctcagttggcagcagggttcatccagaggccattagatttctcgctcctgtgaacacctgggaacccagtttcctgccccttcccccaacttgatgtgtgtgtgcatgnnnnnnnnnnnnnnnnnnnnnnnnnnnccagcatgtggcaatacaagtcaacagcaacagctcctgctccaggaatgacattcacctgctgtgtctaggtctccagtgcaatggtctctgactcctggattctgaaccatgtgtacccagagccttggtgcctgcctgaaggagtctcagctgatctgagattccgtcctgaacattccaggattttgatgccaattgggtttgttccttgaagcttaacttctatttacaaaagacttgaaaatatttaagctctgtcagccaactattccatttctgggaatttgccattaggaagtaattagggattcttgagatttatgcataaagctgttcatgtctgtgttacattcaacagtgagaaaaatgacaacaaantaattgtagttcccaacagggggatttcttaaataaattatgatacatctac

SEQ ID NO: 380345 - DNA, 726 bp, Homo Sapiens
atgaaaaagactgagaaactagccatttttgaatacagcaagggatagatgaggaaaggaaaaaagaaagaatatttcaagtttcaaactacttttaccatgttatatctatttgcccaaacgtttgacatatttttggtcaaacaaaaagctataagtttatggagcttgagtttaaaatgtgcattctttaggttaactcttaaacttgaaaaataagttggattctatgaaaacgttgcattatatttctacagcatgtaatgttatgccaagcatgagtctaaaacagtttgtgttcttgtaagcaggataatgtgtaataatccctctgaaataatctcaagaagaatgatataccttaaaactcaactcaaatttacatttgtttacagtgggaatggttttctcttgatagaaatttggtttttgtctcaagttttggtctgtcagtaaaggcataaatgaatatcctagtttttatttgaaacattggttccaagtatagtttcatatttggcaatagattcatcttattctaatatgtttggaatagctttttgattcaatgagtctaggaaaatctgttacacattgaaacccaagtccagagaatgttacacacttctaatatatgcataaaatgatggtaaaggctattaaatcattgatttaaaaagatgactttgatataattactttatgggcaaaattgtcctcatttta

SEQ ID NO: 380346 - DNA, 479 bp, Homo Sapiens
gttaagaggctagagaaccgtgcacagattctgtcactgctgtctgcatttaatgctttgcagccatcaaaaatctttctggtgaatttgcgcatggttgcagcctggaacttccaagccaagagcagcactcggaattctgtggggtcgacacataggtcattgcaaaagtgctccatgccttcctccaaaattgcatcttcccactcatccttgtagcacctgaacagttcttccaacccctgcaaggaagactcctcggcactggagttggactccctcccaccatctcctgaggatgttggcagctggcagcctcggccttcttggtcccattgacaaggctatctctacttggcatgccacagggtggttacttgctcctcacagtggcctgcaccctgcctgctgtgtgacttcttgctggggtcatggtctgcattcttgctggcccagggtcaatgagggattcttacact

SEQ ID NO: 380347 - DNA, 453 bp, Homo Sapiens
  misc_feature (14)..(14): n is a, c, g, or t
  misc_feature (21)..(21): n is a, c, g, or t
  misc_feature (190)..(190): n is a, c, g, or t
  misc_feature (291)..(328): n is a, c, g, or t
  misc_feature (352)..(401): n is a, c, g, or t
  misc_feature (414)..(414): n is a, c, g, or t
  misc_feature (435)..(435): n is a, c, g, or t
agagaaacccaagnacacagnatttaagttactttgcagactcactgtagtgaagatttaaacactgtgtaccagattcaaaaattagtgtgtaccatcagataaagtgcctgacatgatagaggctcaccagatattaggcaatgtatatgcagaaaaacataacccaaccagccatatgtttatagcnacacagttaaccactaaattgtttccattgttacaaacatatatcgggctatctccttttcctatggctaaataattaagtttgattttcttagatctccnnnnnnnnnnnnnnnnnnnnnnnnnnnnnnnnnnnnnngagatgggatctcgctctgtcatnnnnnnnnnnnnnnnnnnnnnnnnnnnnnnnnnnnnnnnnnnnnnnnnnnttcctgggctcangcgatccccttctgcctctgnctccgcctcccctcccaa

SEQ ID NO: 380348 - DNA, 573 bp, Homo Sapiens
  misc_feature (269)..(269): n is a, c, g, or t
  misc_feature (399)..(399): n is a, c, g, or t
ctgtctctaaaatcagaataatatgccaaaatgcaagatacctcatatcacaagctaggaaaaatacatataattattactacacatttaatatggtactcagaataaatgtcattgtaagagctaagcagccaaaaattaaaactaaatctttagagacatttattctgagttctagtaaacaacttagagtaagtattaatagaaaaacataaatgtatttatttttttctccatgtttaaccttatgcaatgctgaaatgtcctanttaggaagtgctttaaattttaaatcaattccatttgagctctgaatctaaaaaggaatgtaaccttttgagtttttcttgttaacagtaaatacagaagttcctgtatcacacaaggactccaataagngaccggatcatccatttcaatatttccaacattttaatgattcagtgtacttaactatgaatactttattataaatatttgatatttcatgcttcagctcagcaaagacacaggttagaaaaatatagacctgtctttcattgtttaatcctacccctttgaataaaaagaatt

SEQ ID NO: 380349 - DNA, 376 bp, Homo Sapiens
gatgatccagttaccattcatccagttggtgagttttgaagaataactacattttatttcaaactaacaaatgtatacgggttttagttcagtgttgaagaattttaatacaatattaaattacttgaactgaacagttccttgtatatattttgcctattcactgttgatatgtatgtagcaaaatgagagttaaataacactaaaatatggtaccaggaggcaattgtataggagcaaagttaataggagctttgctgaaacagaagcatatgtgtaaataagcttgggcttccagttataaattttgtaatttttgtcattatttatatcctataaaaaaagcacacaaaaataaaacagaagttgtacagca

SEQ ID NO: 380350 - DNA, 499 bp, Homo Sapiens
  misc_feature (162)..(162): n is a, c, g, or t
caatatggcaaggtgtatgtgatctgtgggagttatgccatttaacataggaagtgcatgggactttccctctctgcactccagctcttactgtaccattagaagatgcagaattctgttggtgtgccaaaaagtatagccttacattcaagccagaatggnatctgaagaaagcagcaatatctgttactagagaacattcccatgtgtttaaactcttcacttcttagatgcatttaaattcttaatgcaaatgacgtagcaatttgaaaacttctccgtattacttgtgtttaaaatgtcttgctttaaatacaaaacaaatggtaaaggggattatcttttgtttagatggttaaatattatttttgccttagatagctttgtaataatttttctccagacagttcaacacttttgaaaaatgacatgaattttcattaaaaacccttttcctatgtttattgtatacaagaattatgcaataaaatttctttat

SEQ ID NO: 380351 - DNA, 461 bp, Homo Sapiens
gtgaactttggaggcatatcctccccccggtttagccttttagatgagggacccacagccaaatagcttgactgtaagccagatagcttgactcatggagggaccttccagccagaggcatcttttgagccatacggaattcctgacccatagaaactgcaagacaataaatgttgttttaagttgctaaattttagggtaatttgttacacagtaataggttaataatacactggcccagattaggaaggttctgccatccatcccagccatcccaaacaactaccagaataatggattaaaacgttaactgttttaagtcactaagttttgggcagcatgataacaacccagcaaaaagctaactgatacattgattatttattgcatttcttcctccactattcttctctaacagatgaccaatactaataaactactgtgaacactttcatgtttta

SEQ ID NO: 380352 - DNA, 324 bp, Homo Sapiens
aagaacaggattttcaagttcttctctgggcttcagtttccttatttggaatatgtggataataactgcttaacaaagtccatttaggatcaaatgagataatgtatgtgaaaatactgtgtaaattatgaaaaatgtatacctaatacataaaactctttgcactgcataatttttggaaattaccttgaggggctgagtgcggtggctcatgcatgtaattccaacactttgggaggcaaagtctggaggatcccttgagccttggagttcaagaagatcagcatgggttacatggtgagatcctgtctctacagaaaatta

SEQ ID NO: 380353 - DNA, 237 bp, Homo Sapiens
gtatttttattgtattacctgcttggttgcaagaggatgatgaggaggactactataggataaatttgtttttatagagcgaatttctcatgggtcacgagggatagtactccattttgctcactgatatcggcttgatcatctgagtcagtgggctcattgtggaaacatatggaatcctttatgctttttctcaggctgcttctgttacatgaaataaagccagagttgattgtg

SEQ ID NO: 380354 - DNA, 551 bp, Homo Sapiens
  misc_feature (40)..(40): n is a, c, g, or t
  misc_feature (170)..(170): n is a, c, g, or t
  misc_feature (521)..(521): n is a, c, g, or t
aaaagtagaacttaaaactccaaactagagtacgtactgnggtgaaaaatgaggcataaaaatgcaataaactgttacagtcaagaccattaatggtcttctcccaaaatattttgagatataaaagtaggaaaccaggtataattttaatgtgaaaattaagtcttcanctttctgtgcaagtaatcctgctgatccagttgtacttaagtgtgtaacaggaatattttgcagaatataggtttaactgaatgaagccatattaataactgcattttcctaactttgaaaaattttgcaaatgtcttaggtgatttaaataaatgagtattgggcctaattgcaacaccagtctgtttttaacaggttctattacccagaacttttttgtaaatgcggcagttacaaattaactgtggaagttttcagttttaagttataaatcacctgagaattacctaatgatggattgaataaatcctttagggctacaaaaagccccaacttttcctctaatttancatatgccatctcctccctaataatggtaa

SEQ ID NO: 380355 - DNA, 461 bp, Homo Sapiens
gggagctaaccctttatccccaccttggacactacccccccaatcttgccaacactatccctgtttctccagaaccagtttttaaatggccaatccatagaggggaactgtaaagtgtaccaagttactttatatcatgtaatgttcacttgagtggaactgctttttacattaaagttaaaatcgatcttgtgtttcttcaaccttcaaaactatctcatctgtcagatttttaaaactccaacacaggttgtggcatcttttgtgctgtatcttttaagtgcatgtgaaatttgtaaaatagagataagtacagtatgtatattttgtaaatctcccatttttgtaagaaaatatatattgtatttatacatttttactttggatttttgttttgttggctttaaaggtctaccccactttatcacatgtacagatcacaaataaatttttttaaatac

SEQ ID NO: 380356 - DNA, 452 bp, Homo Sapiens
  misc_feature (22)..(22): n is a, c, g, or t
  misc_feature (254)..(254): n is a, c, g, or t
gtagggaggtaaatatgtgtanctggaggggggtaaaaatcccatttaggttatggcaaagatgggaatcaaactgtaaaactccatagccccataaaattaatattctttgttaagtgccagagggtttaagagaacttcttgcttagagtttattgataataataatgcttcagaatatcccatttaaatgtacagtgtaaatatgtaaaatattttactttcccaggcaagtttggggctgtatttccacnttagtgggctcttttgtgactggccagttctgtatatctgaaacaaataagctgtaagcacttttgttaaaactttgtcaaataatccttttatgtacttgttctcagacctgttctctggttatgaaatgtgttaaagacaaggtgcaaatttaaaacaatgcctgtattgaaataaatgacttaaacagaaaaaaa

SEQ ID NO: 380357 - DNA, 458 bp, Homo Sapiens
  misc_feature (17)..(17): n is a, c, g, or t
  misc_feature (418)..(418): n is a, c, g, or t
  misc_feature (423)..(423): n is a, c, g, or t
gcgcattattaaaatanacattcatgtaaatggagtaaatcataggggaaccaatcgtaataaataccttataaattataaacttgtttagatactagatttctataaccataaattttatactgtaaagtctgtttaaaatagggtttaatgaagttattttaatttttagagactcccctctaaataatttactcctacattgtaaatacattgatgccaacaaaattccaactgctactaacaaaggtttggttggtgataaggctaataacagctactttgtgtaggaggtaaatatgtgtactggagggggtaaaaatccatttaggttatggcaaagatggggaatcaaactggtaaaaccccatagccccataaaatttaatattccttggttaagtgccagaggggtttnagagnacctcctggcctagaggtttattgggtaataataa

SEQ ID NO: 380358 - DNA, 618 bp, Homo Sapiens
  misc_feature (48)..(48): n is a, c, g, or t
  misc_feature (77)..(77): n is a, c, g, or t
  misc_feature (85)..(85): n is a, c, g, or t
  misc_feature (206)..(206): n is a, c, g, or t
ctgagtgtgagcttaaagtcccctggcttttgacccaaaatcttaagngtctgggatcgtggcttgaactcggcccngcctgggnccccattgtaggaaaacgtggctgtaggacagaagcctgtggtgcccagccccttggaagggctcagatgtgccccagaaacgaaatgccttgcctgccccatcctcctggggctccctangacccccaagcccaaagcagagatacctgttatcaaaaggttggggaagagcctccaaggcaggggcaaaacttccaatatctctttcccccaaactgatctagcttctccttcaccttcccccaccggagccaccccggccattttaaagtttagtggctgtggacttttagaatttggtttggtctgtgatccttaccgcacagacccaatgaccaccacctctttctttttgtcttttatctgctctccttttgagggggaggaaagtgctggcctgttccatcaagcccagttcgcatttgctttagcctctgatttctctttcttctttggaaatttcattgagatgtctctgtacttcgcttgtcagttatctttgttccttttaaataaagggcttttaaatgga

SEQ ID NO: 380359 - DNA, 676 bp, Homo Sapiens
  misc_feature (39)..(39): n is a, c, g, or t
  misc_feature (64)..(64): n is a, c, g, or t
  misc_feature (80)..(80): n is a, c, g, or t
  misc_feature (100)..(100): n is a, c, g, or t
  misc_feature (116)..(116): n is a, c, g, or t
  misc_feature (152)..(152): n is a, c, g, or t
  misc_feature (157)..(157): n is a, c, g, or t
aaaccattaacctaggtttcctaaaatccggataatccntaaccaaaatgttagtccgggtccnctaaaaggtatggccnccatttatataaataccggnccttttaaaaattggncttttaaaaaaccaaaagactttgtacggatatggngtttntaatgcggttgcaatatttttatagtagcctttatgaactccagtataagtgcaagttgtttgaaaaggtgtttttattagtgcacaatagaattgtgaggttttcaatagatgtcatgagattttgtatatctaccataaaatatcagtacatttttttctaatgctactggaaattttacttttcctttgcaacacataaatgatatgatgtacaaaataacagctctggttccaccagtacctaatgttgaaaacatttttaaagtaatttttaatactaactatttagtatactgtcagtactgtacatctgcacactggtgttaatagggtatatattaaattatataaagaaataagatattttgctgttattctttctacatatattattggtcagtacatcaaataatatttggctttgatatgggaaaaaacaaactttgcctatgtaatggaaataaaatattttcttttatgaaatatattagaatgcagattatactaatatcctga

SEQ ID NO: 380360 - DNA, 744 bp, Homo Sapiens
  misc_feature (53)..(53): n is a, c, g, or t
  misc_feature (60)..(60): n is a, c, g, or t
gaaactactcctggtgaagatcctgtgacccattgttgaaatgaccaaccaanggacttngaatattacataaacttagttggataaaacagccagcagagtttgagaggattgacttcaattttgaagaatgttccactgtgggtaaaaggctatccaacagcaacacatgctacagataaatctttcggaaaggaagagtcagttgatgttgcagccttccttgttgtctcatttaaagaaatctctagagccacactaaccttcagcaaccaccacaccgatcattcagcagccatcaacagtgaggcaagactgtcttccagcaacaaagactcactgaagacttagattatcgttagcatcttttagcaataaaatatttttaaattaaagtatgtacattgtcagatataatgctattgcaaacttaatagactataatatagattaaacataacttttataggtactggaaaataaaaataattgtgtgactccctttattgtgttaaacattttattacagttgtctggaagcaaacctgcaatatctccaagatatgcctgtatttttcaaaatgtggtcttttaacattgctatgaagtttatcagtaataatatcttatttcatggttgtccagaagttacataacttgtcttaatctaaaaatcatatcatttaaaaagcctgatgatttaatatttttcataaagaaaacttttgacaatttgtttttaag

SEQ ID NO: 380361 - DNA, 426 bp, Homo Sapiens
  misc_feature (178)..(178): n is a, c, g, or t
  misc_feature (188)..(188): n is a, c, g, or t
ttagcgtggtcgcggccgaggtacatgagccaaaaactgcgtcttggattagcctttgacattgatgtgttcggttttgttgttccccttccctcacaccctgcctcgcccccacttttctagttaactttttccatatccctcttgaccattcaaaaccagttacttaagattcagntttccccacntttttggtaatatatatatttttgtgaattatactttgttgtttttaaaaagaaaatcagttgattaagttaataagttgatgttttctaaggccctttttcctagtggtgtcatttttgaatgcctcataaattaatgattctgaagcttatgtttcttattctctgtttgcttttgaacgtatgtgctcttataaagtggacttctgaaaaatgaatgtaaaagacactggtgtat

SEQ ID NO: 380362 - DNA, 261 bp, Homo Sapiens
aatttgtgaaacgaagaaagtactattttcaatgggggtaaaagaaaagtcaggtatttgttcagtttagttgcagccatccaagtaagaatatttaaaaatttctccctacttataaaacttttttttaaagcactttaaagatgcattcaaaacccacaaatgatatttcggatctctgggaatgaaaggtttaaaaactatgaaataccctttctgggtttgtaccaaacattaaatctccgatttgattttgaatag

SEQ ID NO: 380363 - DNA, 608 bp, Homo Sapiens
  misc_feature (201)..(201): n is a, c, g, or t
  misc_feature (371)..(371): n is a, c, g, or t
  misc_feature (412)..(427): n is a, c, g, or t
  misc_feature (455)..(455): n is a, c, g, or t
  misc_feature (522)..(522): n is a, c, g, or t
  misc_feature (559)..(562): n is a, c, g, or t
  misc_feature (564)..(566): n is a, c, g, or t
  misc_feature (568)..(568): n is a, c, g, or t
taaaataaattaatagattaataaaaacacaaccacccagttgctatagggaaagcaggatttgggctctaatggtgaccataaaacactatgaagaaacgctttcgttcactcctaggaatacatttaaaatttaaaagaaacataatcatagatcaaaagaaaggattttggcaacatttctaaaaatagcgtgtccantggttatagtttgtattttgactgaaacagactgatactagttagaataaacattaggatttggagtaggaagcctataatgtagaactttaatcaggttcagacccaggcagtatctgcaaaaggaaacggttgggtgggaagcgactgaccagtgactcctgtggcantctgcactgcttacatggcatttactgaaaatgcctgtacnnnnnnnnnnnnnnnnttgtgggactcaaaaggccaaataccanctacccatgactctcatccaattgcctatcctgatctacttactgctctgggcttccttcttccacnccacatacatgacctaattgtttcccttccctctctnnnngnnncncattaaactaagtcctgggccaaggcgcagtggctcacac

SEQ ID NO: 380364 - DNA, 307 bp, Homo Sapiens
agttgaataggttaatatttaatacgctacatctagacttactaaataatttatgccatgagatgaatacataattttacagtgtcacatctaaagttcctttctttagagtgcagcatagtaaaacttaaaaataaatatcttaaatagcattactattaaggcacagtataaaccacattatcattaacctttgaagaattgtaatctcagtaaccttgttgtctcatgtactgtagtcactaataaatagttttaaatatgacctctgaaatagatactaaagtgtaaaattacttaaaaaggg

SEQ ID NO: 380365 - DNA, 423 bp, Homo Sapiens
  misc_feature (404)..(404): n is a, c, g, or t
atcactctttttagatgatcactaattttatggagtgatatacaccagaatgaacttctagcctgctttataatcaatcagttaatccaacaagtctgagtggagcgtgtaatgctttgcgttatctgcagtgcggcctgaggttacgggagaaaaaaatggcactgtgtattgcttgaatgctcagggctgcgttcaactaattttaaccattgaatcaaaatgatcaggtagagggcaggaaatgtagaatggcttgaacaactacctcatgaaaacatgcagtatgcatttgtaattcagcatcttaaaatgtctcttttggccagtatttctttacaaatgtggcaaagcatggatatctttgaggtaaaattttttaaacttcacaaaaggttttctgnaaaaaaatatggtaccatc

SEQ ID NO: 380366 - DNA, 484 bp, Homo Sapiens
  misc_feature (168)..(168): n is a, c, g, or t
  misc_feature (435)..(435): n is a, c, g, or t
acagggcaagagcttaatacctacaagggtcacagggtgattcagcagtggtttgggtctctgtgttgtacctgggacttgtcatcagggtatatgggtctccctggggtctctgatatgtcactgaccccagacctggacaggagcatggagccaggatcagggttngctcctccaaggagccctgaggccgccccaacttaactcaccttcttgcagagctgggggccaggccaagtttatagacagtgtggttgggtggaggggtgaggtggcctctgaaggggcttccctcaccctcttggaggtaagaaacagatcttgactctggaggtagggctcagacacaggaccaaattgaggactagccaaaacagggacagagcggaagcatctttccattggacacgcccaccagtgtgccatgtcagtttncatcaccatggcaacactcaggagccactgcccttttccatggcaaaga

SEQ ID NO: 380367 - DNA, 406 bp, Homo Sapiens
  misc_feature (166)..(166): n is a, c, g, or t
gtaaaatttgtgcacttttttaaggatatggagtaaaattgtaatagcattataagctggtaattttcacacaaagaaaaaaatacgttccggtcgtcacagactctactcctaaacttagctaactaactatcttgcaaatgcctgcagtttgtcccagtgggcnaatgtgagaggggatgtcggtggctcaggcagcacagtccatcaccaacacagagaaaattactgccaggctaccggtggctggccagtagcatcaattttgtattggaagggcaatccaaaccagattcaccaaaaatttgataactgttatctgctaaaactaacttcattatgtacaagaacaacagatttaatattgaaagcatctgtaacaattgggaaagtaaaagcataaaac

SEQ ID NO: 380368 - DNA, 727 bp, Homo Sapiens
tgaggagaaggagaagatggaaaggagtctagcaacttaaaaatctcacagcattctctgtgaggtgaccttttttcctgttggtggctcaatttctttaggacataaagaagatactgaggcctgtgacagcctgtgacagtatcatcaagtcgtatctgaacttattgaactgtttcctccccttccttattctttattcacagtttgcttttcatgtgcataagttgactcatttgtttcctgttagcatttgaaacaccatatagcccaccataagtcctgaccaaaatgacttttaataaggagggggaaggtccatgtcccaccttcctatgaaattttggcctattcacaagtctacccccacataagagaagtagttatgttctgtaaagaagaggttgataaaaacctttagcatggtgttttgtgacttagaagttttaagtagtcgttcttatatctaagcatttattaattttggtaagaacattactatacgtttctgatgtcacttttactgttaagaggtgccagggatctggtgacctgtcacttcaggatttgtgtgaatcagaccatctaaatataatataaattagagactggtacttgtaattcctgattaaaaacaaagtaacgtctgttttactattgaagtaagagtactttataatgaatacaaaaatgtatattaaatatccagtagagcatgctaaagtga

SEQ ID NO: 380369 - DNA, 428 bp, Homo Sapiens
ggtttgggcgggaacaaatagtcaaattatattacccatctacatggttttctttttcttagtatgggagtgtccatgaataaattcatgggcatcctcataactcttccatgaatggcaaggggtacttatggaaaacagttttccaaagatctgattgttttgaaatgtgttagattggacttgttcaaatgttcatatttttgttctatgctaaatgcatcgttaggggagtagtggtaaatattccagaatccatatgaaattcatgagtttatttatgtctaaaacactgaaaactgtgtccaatatcgttcagtttcctgggtctttttcttattagcacatttgagaaaaatattcctttcctttattgtagtaaatctattaaagcaatagccaataaaacatttttaattttaaaaatt

SEQ ID NO: 380370 - DNA, 465 bp, Homo Sapiens
  misc_feature (63)..(63): n is a, c, g, or t
cccgaaggctgccgggaggagggcttgccttgccgcgcggcccttcccgtcgtgccccgggcntcctcggaagcagcctccccgctccttcagacgtcggactcctgagtttcgaacctgccccgcggtttccccctcacgctgaatccaggggagccgctactcgtttttgaagttcctatgcagccctctcccgacatgttcgagaatcttgccggactggggatggatttgcagcctccgtgtttgcccccacggttcgaaaaccggaatctaggcccggtctcctggcctgtgttctgtcgtgggatttctcccagagcacggactgacttaacatttccattactgggaatgtaatggttgctgcgtcaggactctggagatgatttttttatttggaacgatataatttttggaatttccttaaagggaaaaatacatattgcttaattataaaaaaaa

SEQ ID NO: 380371 - DNA, 417 bp, Homo Sapiens
gagacagagtctcactttgtcacccaggctgtagtgcaatggccagtcttggctcaatgcaaactctgcctcccgggttcaagcgattgtcctgcctcctcagcctcccgagtagcaaaagtatctatttctttcagataataaatttattattgtattatttctattaaaaataatgtagtaaacaattagtcatagggaaaaacttctaggaggtaccaagtttcatctcatgaaatttagtatgaaactcagaaatcaagataacaggatacagaacagagatattcactctcagaaatttaccctgcagaaagaggaactaatgttttataaatttatgtaactcaccaattatctacaatatttcctcgtggaaatgtattcattttctacagccaaaatcgaaggagattt

SEQ ID NO: 380372 - DNA, 664 bp, Homo Sapiens
  misc_feature (340)..(340): n is a, c, g, or t
  misc_feature (425)..(425): n is a, c, g, or t
ggaaggatgacaattacaactgatcaatattttcctagaaataaagtagcaaacagatgtctcttgaaaggctttaacaattattttttgctgtgaccaataaagtctgaagacatgtacagaagttaagcaaaggtaggaagcatctctaaactaattcatcacactctactaaacaaaattggaaattggggccaaaggatacagttcaggaatatgcacatgatttcttctaagcccagagttctgaccaggagaaatgacttcaacgtgagaaaaggtagaaagaagaaggaaaacaagtgttaattcttaattaaatacagactaataaagtccnacatcaccaagaaccctgtgaggctgcagcatcacattgaaccacactgacctcgtgtaaaacatgaaaatgccaagggataaanggaatgatatagtgaagtggtgatatcctaattggaaataatgtgaagcccaagtttatcatttcttttatttaaattctgtattcttgacccattgtttgctgtctgggctgaatagcaccaattctattcaaagaagaagaatgtacatgaaagaacaaacatgaatattatgcataacaagaggatgaacatgcagaagaaaaatgaggattaaggtgaaaagaagtggaaaaatg

SEQ ID NO: 380373 - DNA, 453 bp, Homo Sapiens
gggaccaggagggcttccagttagtccatcctgtcctttcccacacactctggtgaaaggctttggataagagagaggatggaactactgatttataaaagactggagggtacctatgggtgtgttaccttgtttcccatgagcagagatgattgagacctgggtccatctgattacatattgctgttgattttgtgagcataatcgttggctggtttatgcactgaacctccttgctctgggatcataatcatatttgagtataagttatggtattcacatttgtatttgctacccaatacatttatttgttatatctgacaagcactgggaaatgaaaataattatttgcattacaaactcattattcatgtactttgaaagctttatctaacagcagtttttatatgggctatctgaatcttatcttctaaataaaaactagatttgtga

SEQ ID NO: 380374 - DNA, 233 bp, Homo Sapiens
tggctgctgtttcaaagtgtaaagtttgtgtagggctgttgtgacaactgcaactctgttgtcaaggtactgtgctttggttcctatagcaacactgggtgtggcccttgaattgctaagggcatttaatacatcctggagcaaattttaactgcagattttctttgtagaaattctatgtataatgcaggtacctacttggcccatggctggtaactatttgggcaattaga

SEQ ID NO: 380375 - DNA, 393 bp, Homo Sapiens
  misc_feature (225)..(225): n is a, c, g, or t
  misc_feature (239)..(239): n is a, c, g, or t
  misc_feature (373)..(373): n is a, c, g, or t
tggaaatcatggcaactacacaggatgttgcttaccaggacggagttttggtatcttagtactgaagttagcactatgtttacatgcaaaagattaaggaaaaaacccttaaagtggacaggtatccaaagttcattttctgtgactcatcaaagtgacaaaagacttgtaacaactttgcctggacttttttcattttacaacaggttcatccattcacaatgnattttggttctccngctccatattttttaatcccctttaagcatttggatgtgatgaaacactctttagtgctatatgcattttccttacttttgttaaaaatgtgacaattgtcaaaaaatgcactaaaatggtaaatggagattgnacaagttcacttttccaggg

SEQ ID NO: 380376 - DNA, 158 bp, Homo Sapiens
aattaactttcctttattatgaggctgaagacattatgtttttttacctcaaaggatccaaatgggagaaaaaaatagaaaagaaacctaaatataggcttatagcaagaaaaagtaaatgaagggagagatttccctgaatattttaacatagtctg

SEQ ID NO: 380377 - DNA, 462 bp, Homo Sapiens
  misc_feature (19)..(19): n is a, c, g, or t
  misc_feature (44)..(44): n is a, c, g, or t
  misc_feature (421)..(421): n is a, c, g, or t
  misc_feature (430)..(430): n is a, c, g, or t
accacacatcttctattcngtctggggtttagcaaccatgtacnttgttacatgaagtttcaaagtgtattgatgagttgtagctgattttgtttttctctttaaatatatgaacatttttaagaaattactaaacagaaaattttttcttagatgtattatatgcattaaacatagaaactgaaaaagaaattgtgttcctagtttattataactatttttcttttgctttgactcttcctgtgtgacttcattaactcatttcctcagggttttcaacacatcattttgatactggcagatgataacttacatgtgtagccctctttcaagtgttcgaaatgtgtattctttctaaatctaaagaaataattctgtaaaaatgttgatcttattatatgtattagtgctggatccttantaccaaatntccattatcctttcatcctggatattccataa

SEQ ID NO: 380378 - DNA, 404 bp, Homo Sapiens
  misc_feature (239)..(239): n is a, c, g, or t
  misc_feature (317)..(317): n is a, c, g, or t
  misc_feature (377)..(377): n is a, c, g, or t
taaataatcattcatttaacagatattcaccatatactatttgccaggtactgttctaggtgctggttatgcagcagtgaataaaacagaaaaatctgtaccctcatggaacttacaatcttgtggaaagagagaggataaataagacatatggtatgttagacaggcaagctggttaatttttatgcctcagtttgttccaattatactaaaggtacttggaaacaatatctcctaanggaccttccctagctcctaaaaatccccatggattctggtgggtggttttaactttcccccattttttttcccaaccngtggctggacctccatcccattggaggtaaaataattttaccacacctacccatggtggnttaataactggccaatgcatggggggg

SEQ ID NO: 380379 - DNA, 358 bp, Homo Sapiens
ggacagcttattcagcctgggaaaaataatgttggagaaatactctatgaatagaatatactttggaagcccttaactaaacgcttacttctcttgacatcagataattcagtctagcaatatgatagataattcagtctgtcatactgaaaatgacagcacttttaacacctttctaaccttcttaacgtcaaagaatttttgtagaaatgtagtcctgtgattgtcattttttcccctaatttctctaattgttacattcttacgtattttaatccatattaaatttatatggctataaatttcatctgtttacatcctgatttggatactattttaaaaatacctttagtacctg

SEQ ID NO: 380380 - DNA, 356 bp, Homo Sapiens
  misc_feature (18)..(18): n is a, c, g, or t
  misc_feature (42)..(42): n is a, c, g, or t
  misc_feature (89)..(89): n is a, c, g, or t
  misc_feature (109)..(109): n is a, c, g, or t
  misc_feature (125)..(125): n is a, c, g, or t
atttcacaaaattaggtnaatatatccagtctgacataaacnccatatggtagctgccttaagagacaggagttgtatgttacgtggtnaaattatgacaccagaggtnagtagtaagagatggnaaagcaaatgaaatttgcacagttgggtctgaagcctaatattttctttttctagataaaaataaaattgcaatataggtatggagtatttttctccatctagtaaacatcatagaaggaagcagttgttaatatattgcaatgattttccaaataacggcatggtttagcagatcttccctggctgcactgtttattgaattttagtttaaaataaaacttagtgtaacc

SEQ ID NO: 380381 - DNA, 596 bp, Homo Sapiens
  misc_feature (35)..(35): n is a, c, g, or t
  misc_feature (118)..(118): n is a, c, g, or t
ctagtccagttgtggggatggaagcatgagggaangggctagagaagtttgaaatctcgaatgtgtaataccctgaaaatttaaaccactggaatgtcatcatggtatcccaacttgnggactcatagggtctgaactccaaaggataataactgccagtctaatttttcccatggtacttgctagtgactgtatccagaaaagctttaagcagttaaagaaacagaaaaaaaccgacactttgtcgacactgaaatatcgattaagtgccttaaaacctctttagacatagctatgcaagttttttatgtttgtgttccagaaggacagttccattcattagttgtgatcttccgtcttactttatgaaactgcacttgaaggttattcatacaagtttttttagtaacagctgtcagtcaactgctgttattagaagaaaagtactgtactgaaaattcagaaaaaaaatctcaaccttatgccaaaatggagtaatgctttatggtcccttgtaagtagtggagctgctctgtttaggtgaatctcctcaaatacagtgaagtgcccactgcaataaagtaatacgtaccaat

SEQ ID NO: 380382 - DNA, 429 bp, Homo Sapiens
ggaaaatcccattaagtggagttgctgtacgtaccgttcctatcccgcgcctcacttgatttttctgtaattgctatgcaataggcacccttcccattcttactcttagagttaacagtgagttatttattgtgtgttactatataatgaacgtttcattgcccttggaaaataaaacaggtgtataaagtggagaccaaatactttgccagaaactcatggatggcttaaggaacttgaactcaaacgagccagaaaaaaagaggtcatattaatgggatgaaaacccaagtgagttattatatgaccgagaaagtctgcattaagataaagaccctgaaaacacatgttatgtatcagctgcctaaggaagcttcttgtaaggtccaaaaactaaaaagcctgttaataaaagaaactttcagtcag

SEQ ID NO: 380383 - DNA, 278 bp, Homo Sapiens
gtaaaagtagcagtttggtatgagttggcatgcatacaagatttactaagtgggataagctaattatactttttgttgtggataaacaaatgcttgttgatagcctttttctatcaagaaaccaaggagctaattattaataacaatcattgcacactgagtcttagcgtttctgatggaaacagtttggattgtataataacgccaagcccagttgtagtcgtttgagtgcagtaatgaaatctgaatctaaaataaaaacaagattatttttgtca

SEQ ID NO: 380384 - DNA, 473 bp, Homo Sapiens
cattttgtgggaaatatcctgttcgtgacctaggagaaacaagacagaaaacaaatctttcttcatttatgaatttcttactccatacaagcagtttatggatgtctgggcaatcatagcacttgccatttaaaaacatgctacaggggcacattttctgtggttaaaaatgatctccagaataagtgtaaactgcagttttcctttgcattgagggttttggctttttatttgtaaattaaatcaagatgttacccactccttggtgtggtggtcttgctggttcgtgttgggaagtagtatggcagcaatgcacaaattcagaatagccaaagaaatccctccttttcaacgctcctgtgccctcgggaaccatcagaggagttttaaaaaccatccctcatagcccacaattttgggtcaactctcaaaattgggaataagaaaactgggcactggttgggagaaaaatc

SEQ ID NO: 380385 - DNA, 754 bp, Homo Sapiens
  misc_feature (347)..(363): n is a, c, g, or t
agtgctagataggaggaatataaagtgaaaataataataaaagttaatgtttagtgtttatgtgccacagattgtattaaccattttacatatagtattttgttcagttctcaaaacattcctgtgagatcaggtctatcatcagtattactggccttgtaaaaggaccatttctttgtcttctctgtgcttcctcaaattggcttcctgctcttgacaggttgaccttcagagcagcagtgtaagggaaccattccaggtgctctgttagtaacaatgctgctgtggaagcccctagactgttggctattagatggggtgacttaagacatatcagtagggatagnnnnnnnnnnnnnnnnncttaaaaaaataattcagccccatagcaagacttactataaatctccaattattaggacatggtggtattatccccatggatagacaaatagcccaatggaaccagaagagtagagaaacaaatgcacatatctctgggtgcttgttatatgacataggtggcactgtaaagtagtgtggctgggtcatttcggctggatgatcatgtgaaaacaaaaaatgactcttgaccctatttcacgccacacacagaaatgacttaaagatggattgtagatctaaatgtaaatattaaaataataaaactgctagaaggtaaaatacaaggatgtctccatgatcttaaggtaggcaaagatttcttaaacaggacacaaaaatccctataacc

SEQ ID NO: 380386 - DNA, 232 bp, Homo Sapiens
aattatttgtgccaattcgagaattgctgttaggctgttatcctcccttccttggggctaagaattacaagactcatggcactggcgtaaagttgttgtttatctaatcactgatgaaatattttcacacttgaaaatccccaaatgctttacaatgaatgaagtgttaatttggtgaccaggtggtagccattagccatgttgcaaaattctagacagtaaaacctgtgtt

SEQ ID NO: 380387 - DNA, 276 bp, Homo Sapiens
  misc_feature (31)..(31): n is a, c, g, or t
cagaattaagatacattataactaagatatntgtatttcaaaatttaaacatttaaaataatttttaataaagaataaagtagaaaacttacaaacccatgtctatttgaaggattagctattatgtgttttgtaagcgagtagataaaaggagtaactaacttgtagttttacttgtttttagtatgcatattatagaatgtttgcatgtaaaattaatacaatttgactttgacaaacatttcggataactggaaagatgggagccaaagcttc

SEQ ID NO: 380388 - DNA, 377 bp, Homo Sapiens
  misc_feature (31)..(31): n is a, c, g, or t
  misc_feature (354)..(354): n is a, c, g, or t
gatcatgcctggacaatctaccctgtaaagntccacgttgtcagctgcccagacactgtgtgctgccactgccaggacacaatgctcctggaacccctacctgcttcagtgttgatgctggcctggaccaagcaagagggagaggtggctccagatgtccacctggacattaccagtgattgctggtccctgcagctccctctggcatgggcatgaaattcctggagttatctccttttctccctgtgaggtgaggttacagcactatctttgaaatcttgttagaaaaaatataagacatttacagttatatagagtattggaacaattttgttctttttaaaatttaaagcngcagattccaactaactattttg

SEQ ID NO: 380389 - DNA, 401 bp, Homo Sapiens
  misc_feature (13)..(13): n is a, c, g, or t
  misc_feature (32)..(32): n is a, c, g, or t
  misc_feature (42)..(42): n is a, c, g, or t
  misc_feature (58)..(58): n is a, c, g, or t
  misc_feature (67)..(67): n is a, c, g, or t
  misc_feature (88)..(88): n is a, c, g, or t
  misc_feature (154)..(154): n is a, c, g, or t
  misc_feature (250)..(250): n is a, c, g, or t
ttaatttttaaangtatttatgttggcccatncattatgggngtataaaaaatggtanaaattgccnaattggattgtaactatttantttatttttaaatgaaagtgtaagaatgctttctgattcaacaaatttgttatcaaactgttcccnttatcctcttttctgatgtagcataaaaattgtcccggtttgagttataactgccagtagatgaccagtcacaagtgaaccacttctcagttgccnaatctttgctcatattaaaaacaacttacaaatacttagtttttgtatctaatctctgattattaaaatgtttataaagtttatttttaccaaagagatgcaattcgattatgagaaagtattgcgataataaattttgttttataacttt

SEQ ID NO: 380390 - DNA, 460 bp, Homo Sapiens
  misc_feature (12)..(12): n is a, c, g, or t
  misc_feature (62)..(62): n is a, c, g, or t
  misc_feature (393)..(393): n is a, c, g, or t
gtgaaaatgtanccttgtccccccattttcaggaagcccccctgaaactgaaaaataattangattaagtccaaggggtagattaggaaaaaactataattaatagataatatgtgaaaattaaatccttggttagttatatttcctgcttatctgctccagtgatcaaaagagatcctgattagttctatctagtgggtgtaagaggtatatagaggctgtatttctttttcttgagggtaaaccaatgcagtaagtacatgcaagtggtaaattttctgcagtgaaaccaacaacaagcttgttattgctagctactggttaccacctttatagtacacccttagctagaacatactcttctgaagaattagctttcagtaatttccaganaaaccactggcttgtggacctgttaattccaaagaacagtccatcaaaatatccctatagttcatta

SEQ ID NO: 380391 - DNA, 535 bp, Homo Sapiens
  misc_feature (16)..(16): n is a, c, g, or t
  misc_feature (40)..(40): n is a, c, g, or t
  misc_feature (51)..(51): n is a, c, g, or t
  misc_feature (114)..(114): n is a, c, g, or t
tggaagtgaggccttnccgtatcccaggcctgcttattangctctcgtgantcaccccaaactctcttcccttgctgcagcaactgcacagagcctgtgcttaagatggccagnatcgccaagacagagcaactggagcaagtcctcattaagaagagccgcccgatgcatttggactgcgatgtgttacgcccatgagatttcagggttaatttgttacccttgccgtgccctatcctcttccagcagatacagaggcttactgccagtttgcaactttgcagataccagcagaggaagaaaaacctgggagactgctgctaacctaatgtggagacttgacttaaacttcagcccagacaaaggcggaatcttaatatggaggggcctggctctgcagggaggtcacctgggctggctggatttcaatccagttacacagcaaaaaagttacaacccaagctttggcgatgctgagccttctactctcagggattccaaagcatttgataaactctttctttgttccattgtt

SEQ ID NO: 380392 - DNA, 433 bp, Homo Sapiens
  misc_feature (397)..(397): n is a, c, g, or t
tcattcattcaaatatttaataagcacctactacatgctgggtactcattgcggctctacaaataacagcaataatcacagtccctacccttaaggagttacattttggttgagagagatagtaatgaaattcataggtaaatacatagtggtccgatggagataaaagccacagaagggctcttttcaggcccttctttccctggcatgcttacataacaataccctccttccctctgtgacaacacatactttctttggatttactgatactcattacctcgaggacagtaggatagccagcaatcagttcatctcaaaggtgactttgcatatcttttctgttgtgtatttgtttcatggcatgggttactcagagatccaatatggcttttcnaattccaaaattcccttcttaagacagtaatggggt

SEQ ID NO: 380393 - DNA, 316 bp, Homo Sapiens
  misc_feature (208)..(208): n is a, c, g, or t
  misc_feature (269)..(269): n is a, c, g, or t
tggagcaaatatcacacatataagccaagagacaagaatgtttggtcgctctatgatttacacagaatcttgctaagttccaacatgcctatggagtgtcttaatttttgtcttcctccaccacactcagagtggacttgtcagatgttggtgttatataacattgtttatattcaacagaatataatagcctagccattagggctanatactcagttccagctgacagctgtaggggttgctcttcctttctcattataaacaggatnactatgtacataattattcagcgaggttcaaagaagtcatgagatac

SEQ ID NO: 380394 - DNA, 600 bp, Homo Sapiens
  misc_feature (37)..(37): n is a, c, g, or t
  misc_feature (61)..(61): n is a, c, g, or t
ggcattctgtccctttgggacctggaagggggaattngcatgttattgattaaggaatccnggaggataattctaattgggtatgggaaaaattttatacacccataaaccatctgtatatgtacaccatttatcatatatacgtattgtgacaacccatatgtattaataaaccttcaaaaggtaagcacctatattttcttgtaattaacaattttagttttgtgcaatgtagtctatatttgtggacttccccttacatatggtgacagagagactgaaacattgttcacagagaaacacagaacatatacaaatctcataataaaataaccatgtataccactgtttagggaaatattttagaggaaacatactttcactactggccccaaatcccatcatccacttaggttcttcaatgtcaactttttaatacaaaaataccttccaagctggataattaagaacattcacaatggacttacaaaatggagcaatattccaatgctacacaaaacggttctataatacacagcttaaagttttaaagttcttggctggcagttgattttttttatagctgatatgaccgatcgc

SEQ ID NO: 380395 - DNA, 547 bp, Homo Sapiens
  misc_feature (66)..(66): n is a, c, g, or t
  misc_feature (537)..(537): n is a, c, g, or t
ggaaaggagcatggaagatcccaagccaaaactttactttcagcgttggcttggaggacaaattangaaatgaaacatcctatgaaatactttatagcacatggcagatttgcaaactagtaaaatgctggtgaaatgctgttggtaaagcacatggttcaaatctagaagatgccagttcaaaaacaagacagactcgagttgttagggctgaggaaccaatcaaggtagaacaaagaaaatgttggggtaaaagtgttgctgattgtcaacacaaactggcttaataatattaataagaacctgtcttattaagactggctttagaaccgtaggtttctttaaaaaattattatttatttttgccctctttggggaagtgggtgggtagatttaaaaaatcccttcctgagtaataaagatacaaaatgttactgctgataattgtgatttgttgagccacgtctatattaactatagctcccctctatttttaaaattttacataaaattgcttcttcctcttttgtcaagtcnacagagacaa

SEQ ID NO: 380396 - DNA, 362 bp, Homo Sapiens
aaaaccagtctcagaatgatcaagctgatttgccaagtaattccaactatccaaaacgaagtcccaatacttttaaaggcaagtgcaaaagcagtcactccaaaatgctaaattaaaacaatccagcatccaacgtaaactttacgtaaatatgggaagaagcaaggatatgtgaccatgatgaggaagaaagttagtcaataaaaacagatgcaaaaatgaccagatggatgggaattaacagacaaggagcttaaaacacagctgttataaccatgtttaagtatttaaagaaaaacatgtatataattaaaagagaaatgaatgatataaagaaaaactaaatatgacttctggagatg

SEQ ID NO: 380397 - DNA, 200 bp, Homo Sapiens
tcgccggagagaaggcccctgccttgactgactggcacctactacaactgggctgtttcaccagtaagaagctttaaaaatggaaaatggcctcttttgtctgaatattcccactacactttccaaaactagaagaaagagaatattaatttaaggctaagaagaaaagagaactgagaattatagtctgcttcacattt

SEQ ID NO: 380398 - DNA, 539 bp, Homo Sapiens
  misc_feature (474)..(474): n is a, c, g, or t
  misc_feature (501)..(501): n is a, c, g, or t
  misc_feature (524)..(524): n is a, c, g, or t
tttgtagtggagtgtttattagtaaagcaaaggagtaagtcagagatgctagcccctgctctcagttaaacagaactatcctccttcctgaatatttaaacataaaattaattttaaactactataaaaatcatgttccattgcttgccaaatcttataccattataatgctgtatttttacatgttagtatacattgtgtccatagggatataaatatgagaatttcagcaactgtcttgcagggttaagatgtgctatttgttgattttgcaaatttttctcatgtggtacagtccctccaaagaaaatttccttagacctaaatggtagcataataattctcctccatatccgtgactaacaagttcctgaaaacagaagtagacatattttatgcccaatttagtcctaataattgaggttaaaacaaaatttcttgggcaagttgggtgattaaatatgaattaaactntagagaaagattccagatgccctgttncatttgattaggtttagttcatncacttgggggaaaaa

SEQ ID NO: 380399 - DNA, 452 bp, Homo Sapiens
caaggtgcaattgccatgaaatgcaatttgtcaagaaactcacatattaaattacattaaataaatagatagcaaaaacaacatcaaaacctccaaaatccagataccaagaaactaaaggccctctcccaaggacattatgaaggtgtctctaaaataggcatgactgtaaaaagacaagacaaacattttaaatgtactacttgttcacattatcattgacacagacctttacctggacaaatcaattttttgataaaaatataagcacttttccataccagcgaccatcactatgacagtgacaagagaaacatctgtgagtacacagagggttttagggtaggcttttctttagggcttttactctcaaatttttacccttcatatggtaattcccaagcaaacaccctgggatacaaagtaggccagggtatttaaactggtaactc

SEQ ID NO: 380400 - DNA, 487 bp, Homo Sapiens
  misc_feature (35)..(35): n is a, c, g, or t
  misc_feature (420)..(420): n is a, c, g, or t
  misc_feature (458)..(458): n is a, c, g, or t
cccctcttccaacacatgtgaggtttccatgtgancagtactttttcataggttacaataaattgcttgcagttacaaatttggaggtgtttcagcttgtattgtttcacgaggaatttcttaggggcacttggcctacaccctgtttttgttctagaattacctgccgttaaggtcagataaattttcagtaaacagattatggcacaaatcaatgtgtcctttcccggacagaagagatggctctctggccatgtcctaacaccagactgtccttatttaagaggcaggcgtgtcttttgtctaggttgtcttcaaatttaacccattaaaccagttaaccttatttcatatgtgaagggctttgatgtggacaagatggaggcacaaacttttcataataatttccacatttttagncaacagggttttttttcctccaacaacaggttttcatncataaaaagggtgactaaaccagcaaatt

SEQ ID NO: 380401 - DNA, 683 bp, Homo Sapiens
  misc_feature (46)..(46): n is a, c, g, or t
tgcctgtgctcagtaaataaggaaaatgctttcttagaaggctgcnccagtaactgcatattccttgccatcctctacagaaatcaccatctgctctcctaagttcttctggaaagagcaccgtaaccatgtcatcctaacagcaatgccatgaagaaagggaggcagctccctccacgtcctggctccagtgcccactcccgtgccccctccatggcccacgcagcctggccacctgggtgacatctggtccctgtgtcactttctgcaagaccaaggaccagcctcaaagaggagagcatggtgtcctgaaaggagatggcggccaccatcacctgtcctgtggcttttccttctgacttgcccagggtgggggccccaagaggcggcggcctcttcaggtccagcttttgagtggagttacataatttccaggctttccctgcagttctcgccttccccatccctgaactgtttacacagtagctctcacccacaaagagtccgcatgatggcttttcctctgtttggaagatgtggatggctgtgtcccaagtttttcctacctaagatccttttcagtaggggatggatttggtctatctgatgatcaagagttcagggtggcctttgtgatagtgttacaccccctcccaggtccaataaacagtcttctgacaaat

SEQ ID NO: 380402 - DNA, 225 bp, Homo Sapiens
tattgtgggtatgagaaggaaaatatatcacgaattgacataccttgctaatattataacaaaatgcaaattcctcattagttatttggaaatggtttcatagattacagatagttatattaacataaaattttaattaatattctttaatagaatatcatagaaatatttaaaacttttaactgccaaataacttgaagatgtataaaactccctcccataaga

SEQ ID NO: 380403 - DNA, 308 bp, Homo Sapiens
  misc_feature (133)..(133): n is a, c, g, or t
  misc_feature (260)..(260): n is a, c, g, or t
ttagatagttgctccttaattgtatccattactatttaatcgctcatttttctgtaatactattacttttttaatagtcacctatttcactgaaaggctccactggatttgaaaaccagattcagaaacatgnacaaaggtgcaattcacaaaccacaatttttttaaaaaattaagtagtcatgccaaatcaaaatagccacccacaagtgccaaacacgtttctatttcatgatggagacaaccacaaattaaaagtntctgtcaaaatgtctcttttctctaagtcacctttactttcaagatgt

SEQ ID NO: 380404 - DNA, 228 bp, Homo Sapiens
tactttttaagaaattatgttagggaaaataaattctgcttccagggacaacttcatggagcctatttacgaaattaagagtcagcttaatttgtaacatttctaccagagccaagaatcccaaattcctggtagattagtgttttatttctaaggggcttatgcattcggctccaactcaactcgtctatgtgctgccagtaattaaaatgttccacctcagactgc

SEQ ID NO: 380405 - DNA, 622 bp, Homo Sapiens
gagatggtgatggtggtcagggaagacctctctgcagaggtagtgacttgtgatgtgagctgagacctctgtcctgggaagaccaaaagaaaagcatttcaggatgagggaatggcatgcgcaaaggccctgaggctgaaatgtgcccatgtgttctaagaaatgcagcgatgctggtgtgcctggagcagggacggagggggagaatgggaggagacaaggagctgaaggagtagttcccgaaggaccttgtgggtgatatagaggacttcgcttttgctctgagtgaagtgggagccatagaagcttctaagcagaagagggacttgccctaattcaggtgatcacaggtgtcttgtggcctccatgggaggttgaaaaccagagaaggtgaaggggggctgcactgagccacaggaacaatgatggagattccagctaagcccagaccccgtggattctagatagattttagaggcagcagacagaattactgaggaattgagtgtaagagtggaataaagttatcaaggacaatgccaagggtggggcacccccaaatttgactctgggagactcagccaaatcctatctggtaataaaatttcttttttatttttaa

SEQ ID NO: 380406 - DNA, 443 bp, Homo Sapiens
  misc_feature (93)..(93): n is a, c, g, or t
atatttttaggtggttaggtgatgaaacacctcctccaaatgaaggcataaacaacaatgcatggggatccaagaaacagtgactccaacccnaagagagcagtgaacaaatccacaggacagcagctaagtaggaggcctaaacatcacctggggcagatggggcgagagagcagagagcttgggaaagaagtctctgaggagaaagaatgaggcaataagtcagatgcgtatttgcggacctcagaaaaatttgagtacataggaaacaatagatgaaggatagaaataatccattcagattctctcctttgcatgatgaccacattaaacttacagagtaagaaatgtcattctagatttgattctactgtttgtctttgcagtgagctatgtttttttataacatgtagaagtgaaataaacttgtcacaaaaatgcag

SEQ ID NO: 380407 - DNA, 268 bp, Homo Sapiens
  misc_feature (90)..(90): n is a, c, g, or t
  misc_feature (92)..(92): n is a, c, g, or t
  misc_feature (94)..(94): n is a, c, g, or t
cagaaattgcccatttttcaaaattttggtaagtcatcaaagaagactatccacacttatctgaaaaggctattaagataatcttgtctntntnttttgctacatatttgtatgaggctagatttcttcatgtacttcaaaaaccccatgaggaattaaatgcagaagacatgagtatagctgtgtcctcctaacccaagtattaaagaaatttgccaatcttttaactaaatgttttgttataaaatatagttatttttgacatgtt

SEQ ID NO: 380408 - DNA, 536 bp, Homo Sapiens
gaacttctgaccattaggtgtagttgataccactgaaactgtgtaacattgtctcccttttctgtctcccctatgcttctgttggatgtgatattccattggagagtcatcgtccagtaaccctgtgtacccttctcaaaacctatgtctgttgccactgaggatgaaaatccaacactaacaaatgttctttgggctaaaaataaagatcatttaaatacatggttttccaagaagggttgaacctgccacagggttgtgctactgtaatgtctccatgcgtcacttggactaaatctctctaattccattgattagagtcacaaacgggttataatatgttaagttccaatatttttctgacttgattggaacctgcttctctgtgaggctatttttgtaatgagttttttgtacttaatttaactgccgcggtctttggtgggggtgggaagggattttgttcttttgttgtttattgttaatgctctcctatgccagcctgtcattgttccagttgtttgaaaaaacaaaac

SEQ ID NO: 380409 - DNA, 528 bp, Homo Sapiens
  misc_feature (14)..(14): n is a, c, g, or t
  misc_feature (24)..(24): n is a, c, g, or t
  misc_feature (40)..(40): n is a, c, g, or t
  misc_feature (76)..(76): n is a, c, g, or t
tattggtccaattngtcttcgggntcccaagggaggatcnggtaggatgacccacttgaaattggcccaaaaaccntcatctctaattaccgggggcaattgggcatttagtgatctatccccagcattagttcacaaaggacccttctatgtgtgctgcacaataagatatgatgtaacaagcttggattcccatagtacatagtattcaagaaggactacataaagcaagttgctgagaaggggttaacagcggtgcaggtattactttgaagcatatcattccaataattgatatgagcattagaggattctctctctttctctccctctagcctaactaattttcaaaaggcatcaacccttaagataccatcaattttcttgccctggtatttgaaatggggtacctccacagcttatcagtacaggttttctaaagtttccatggtattcaaccaccaagtaaaaatttaggagaatacagttgtcaaaaccattgtcaccctaataaaaatatatgctaaa

SEQ ID NO: 380410 - DNA, 409 bp, Homo Sapiens
  misc_feature (74)..(74): n is a, c, g, or t
ttttcaaatgacttatatgtgatattacaaaattatgcatggctgaaagtccattctacatgcatgataaaccnagtgaatgttaatataatgccacaaaaagttcattagtatggcttgagtctatgttatagttaacctttaaaaaactaccacttgttaagttttggtgtagtatcaaagaaaaatgtccacagttatttgaaaaagccatttaagtcttccttttccaatacgtgtctgtgtgaatgcccattttcttcatacacttcagtcagaacaacatattgcaacagaatgaatgcagaagcatatgtaagaatccagcagtcttctattaagccaaacattaagagatgtataaacataaagcaaggctattcatcttactaaattttcattttttgtt

SEQ ID NO: 380411 - DNA, 462 bp, Homo Sapiens
  misc_feature (12)..(12): n is a, c, g, or t
  misc_feature (29)..(29): n is a, c, g, or t
  misc_feature (47)..(47): n is a, c, g, or t
  misc_feature (55)..(55): n is a, c, g, or t
  misc_feature (79)..(79): n is a, c, g, or t
  misc_feature (124)..(124): n is a, c, g, or t
  misc_feature (429)..(429): n is a, c, g, or t
gtcacactactnaatctcctccaatcttnaagtatctcacagctctnttctgagncccactgtgacttcttttctattnaactaagcatttactcacgttgttcttaacagtcagcactgctancatccgtcttaaactttcttgtatgttttctgcctgttgttggagttacactaatctctacccgatgtctttttgggatgaagtaccagaatgttaagtaaaatcaccacccaagtgttgtattctaaggggtgttggagagagctgtgtgtttgagatgacctgctgcatctaatcaatgtacagggtcgtgagtggcgtggttaccagactccacagataaaactgtggcctctgtgagctaaccagacgctgttggccatgactcgttaagtgaataaagctttgctatgggccaggcgggngtgcacgcctgtaatcccagcactttgggaggt

SEQ ID NO: 380412 - DNA, 409 bp, Homo Sapiens
aatgtgttaagtgctgttcatttaagttattggaaaatgagaataaaatgttgagcttctttaaaagtaacacactatgcaagcatgtgtactttttatatctctcatgtttagtttttataacaccatatccaggttgctatctcacatagtagtcctttaacatatggtattagcagtgcaatgtggactaagctgcttcactttccctttgcaagttcagatcatcatgcccattcatagccaggattccttatccccaaaacagttctatttttccttaatcactactatagagtctttacattaaattactgtcgtatgctagataattttctcaaattgttaaaagaatatgtactttggaaacaaattagtatttatattgtaaatatattcaaaaaaaact

SEQ ID NO: 380413 - DNA, 749 bp, Homo Sapiens
  misc_feature (721)..(721): n is a, c, g, or t
caattgaacaaatacatgatttcccatgtctgacacaaaacttgacatagagaaaggtactacagttcaacattctcacagacaatttttaacattacttgttacaatagtctttgaaactctatataaatgtctgatttttaaaagtattatttaataacttcattacatatatcagatttactttgggagggtacaacagcatgtataattattatttttctatgtcttattaatgtctgcactatgtccattttatgtaccctaatctgacagatgagcattgtgttcccaagtagaaatgtgcaacaaatctccggaaaatccaaggggtctagagaagcacctgggttacaggctctgtgtagttgccatgcattgttcatggctacatcaatcatgtagctcaccaaaattgagtaccatttcttgcttcttatcctcacccggtatttcgaaataatttggatccattttagctacaccttccttgcattcatcatacacttttactatggatggttgacttatctgagggatttcttcgttatcagcatcacaacagcttacctcattgactggttctatgcccacagcattggagcacagactgataatgccatccccataccaacgacacaaaattatctcattgttttcttctattcggaaatcaaaataccctctcttcatttttttccatatgttctacattcataanccacccatttttcggtcctgttctcacg

SEQ ID NO: 380414 - DNA, 293 bp, Homo Sapiens
  misc_feature (41)..(42): n is a, c, g, or t
  misc_feature (44)..(44): n is a, c, g, or t
  misc_feature (240)..(240): n is a, c, g, or t
  misc_feature (248)..(248): n is a, c, g, or t
ttcgtgttagaaaataatctaaagccagggaaagaatcgtnnanaaaggattaaagagagtagtacccagcactcatgtaaggccaggaacattgcttgttcccaccagccagactggaaaacctcaaaattcacatggcattggtaagaacactcagaagggtcttgcctcagaagtggagaataatttggcatagacaatgcaacactctggtcccacctaacaaactttaaaaagcnaaacccanaggattaaacagtttccaagtaacataactggcatcccaaaacca

SEQ ID NO: 380415 - DNA, 535 bp, Homo Sapiens
  misc_feature (34)..(34): n is a, c, g, or t
  misc_feature (47)..(47): n is a, c, g, or t
ggtaaatttcaccagtctggaattcattaaaccnttagtcctgcccngaggatttcaaaacctatttatgtatacacttcccaccttcaaggagggtgctccccactccttacacatggacttatgcattagtgacttcccttcaaaacagcaccagtatgaaaatgaggggaaagatttactttaccagtggagaaatgtgacaagcattatctcaggcaggtgatccaaggataacatcaatagtaataaatcatgtcagtaataggtatccttgatatgatgtgatgacaccagcagttttcctctcaaaaacagaaaatcccagtgtaatcatgagaaaaacatcagaaaaatgtcagttgagggacattctacaaaatacctgacttgtactcctcaaacctatcaaggtcatcaaaaacaggaaaagtctgagaaactgtcatagccaaaaacagcctaaggtcatgtgactgctgaatgtgatttggtatcctagatatgactattaggatcagaaaaagacactgta

SEQ ID NO: 380416 - DNA, 245 bp, Homo Sapiens
  misc_feature (45)..(64): n is a, c, g, or t
ctgattttaaagtgaacaccctattgtagaacatccatgtaagcnnnnnnnnnnnnnnnnnnnntgatttgtaatttctccaagaaatgacctgtgttgacatttcagtgattatacttccaagtcttttactaaatgtgtacgtaaatagctttatttttgtgtgtgtaaaaatctgtagcctctgtaaacaagccaaatgtcatatacaccccacacaaaacaataaaagcaaaaatcaccag

SEQ ID NO: 380417 - DNA, 541 bp, Homo Sapiens
  misc_feature (28)..(28): n is a, c, g, or t
  misc_feature (33)..(33): n is a, c, g, or t
  misc_feature (41)..(41): n is a, c, g, or t
  misc_feature (100)..(100): n is a, c, g, or t
  misc_feature (157)..(157): n is a, c, g, or t
acaagtgattattcagtgtgaggatggnaggangatcaagnttaagtagggccaatgattgtatccttcccggtgtcattgccccttagtcccccaagcncacccttcctgccaatccatgagtatagtggtgtattgtggaaaggcagcatgcccnagttttccagtttcaaaatatattatttagcagtgaggcttaactcccagtaaatgaaggggtctgtgagtaggggaacccttcagactggttatattatgagctgtagaactgttgccattttgttgttcccagttgtgcccataaagagatgtgtctgagctggatacttaggctcagatggggaacaaacagccaagtaccaaccttagtttggtccgaataggtgaattttagcaactctctaaactcagctctatacctgtaagactcagaagtgatacatatagtgatagaaaaaaatactttagaaaatagaaaacaactttactggttactctgctaatgtgatggaggttgcagaatggaaaatgaatgaatgca

SEQ ID NO: 380418 - DNA, 553 bp, Homo Sapiens
  misc_feature (345)..(480): n is a, c, g, or t
cattattgtgtaagtgggtttaagggtgggtctggtatgattttagtaagcatgtttggacttagtactgtctgtgaagtgtaagtagttattgtactgaaataatctagggccctacagtgctgatgacgtcgtctcatggagtgtgtgggtgtgtgttccatacctgttatgtcggaaggcactctcatggcaggcccatttggctctttgactttgggaactaaccaggcacatctttatcattactgatttctgcagtttcaggaagttgaagggtgcttgctgcttgggagggccttcctcgacatatcaaaaggctggctgggcgtggtggctcacacnnnnnnnnnnnnnnnnnnnnnnnnnnnnnnnnnnnnnnnnnnnnnnnnnnnnnnnnnnnnnnnnnnnnnnnnnnnnnnnnnnnnnnnnnnnnnnnnnnnnnnnnnnnnnnnnnnnnnnnnnnnnnnnnnnnnnnnntttagctgggcatagtagtgtgcatctgtagtcccagctacttgtggggctgaggcgggaggattgcctgaac

SEQ ID NO: 380419 - DNA, 587 bp, Homo Sapiens
  misc_feature (148)..(148): n is a, c, g, or t
agtgtcatatgttatatttagctagttgttattaggaacttccttccagaccactaagatcatggttgtatttcttgaaaacccatgatgacaaacatcttaggtttaagactttatataagctccagatcgcacccatgctattttncaagcctaggccaagggcaaactcaccctggatgaattctatattcttgcctaaggtatcgtttatggagtaagttgtcttttaagtttcatttggaaaggatttacttgtaatacatagtgatatggatagcttgtggttaggaaaatgggcaatagctgaatttaattagtacatttttttcttacagattttctgcagcaataaagaaacttaccctttcatagggcaaacagtaacagttacataaaccttagaaaattatactagaaattgataaattacatctcaaatgagcacagatcagtttcttaggttgatgatagccaaaataaagagttcctaaaatattcaagatgcaaatgacttgagatatacttttctttgtaaaatatagtaattctcggggcaaaaaatgtaattcactgataaaaacccc

SEQ ID NO: 380420 - DNA, 464 bp, Homo Sapiens
  misc_feature (69)..(69): n is a, c, g, or t
  misc_feature (144)..(144): n is a, c, g, or t
  misc_feature (198)..(198): n is a, c, g, or t
tgccatttcttcgggctgcctttgtagaaggcgcctatgagaaagtgaatgcccttacaatcctaagcnaagttgggacacccaaagcaggttgtaaaactgctgtattctttggtttattgtagtcatgtgaagtattttaanattacaaaatgtagagcccgtaattaaaatgccttttatagtataatctggacnttgatttgaacaactgatataggcagttagaaaaataatcttaggtttagtcttgacatattttgtattcttgcttgttcccttttattttaaatagtcatcacttctacgagaaggtgttcttttgttcttaatgaggaaaggataaatgcagcactgtaatttctatactaagtatttaatccctgtcatgatgtttttgttttgtaatttgcattatttgttaaactgggaatgcaataaaacaacttttgttaaaacgaaaa

SEQ ID NO: 380421 - DNA, 393 bp, Homo Sapiens
  misc_feature (43)..(43): n is a, c, g, or t
tccgagcccaaaaaattcggcaccgaggcttaagccccgagantgccagatggggagaacgccatgagcttttgagcttgtgtattttgcgagaggctcgagtgtgaacagtagactacaggccttgagactgagaaggaagctataaaatgtgggccaagggaatgtctgcaggaccgggtttcagagcaccctatcgtggcggataaagagccactaacagcttttttctttatttagtagccaaattcttggttggcgctttgagaaaggagtaagcgttaagcgaatttcaccaagtaaaatgtatcgtcctgccctttgtagtcccatagttcactatcctagagatacctatttttcactattttattaaagtgtattgaaaaccta

SEQ ID NO: 380422 - DNA, 565 bp, Homo Sapiens
  misc_feature (51)..(51): n is a, c, g, or t
  misc_feature (407)..(407): n is a, c, g, or t
  misc_feature (441)..(441): n is a, c, g, or t
  misc_feature (460)..(460): n is a, c, g, or t
  misc_feature (468)..(468): n is a, c, g, or t
  misc_feature (473)..(473): n is a, c, g, or t
  misc_feature (480)..(480): n is a, c, g, or t
  misc_feature (517)..(517): n is a, c, g, or t
  misc_feature (523)..(523): n is a, c, g, or t
  misc_feature (530)..(530): n is a, c, g, or t
  misc_feature (552)..(552): n is a, c, g, or t
tttcccttcccccccttcacaaggcaaggccaaggctggtctggaaggctncccggggacacagccaacatccaagacctctgaagggaagacccttcttggtctccgctccctctgccactgctgacctggtggacgaggaggagccccttgccttagcccgtgaaggcggccaccgtgggtgcctgtgaggagccaggggatgtggcgcagcttcgtgcagcacagctgtccgctggggtgggcgtgggggcaggcaggccatctcagagtcccccggatatcccttctcctctgctcccgaataactcagccctgctcagacagggccccacattccaaaacactttctccgttgccagaaagaaagcaagcccagtatctgcctacccaccagtgcccatctnccaaagggcagggtacccgagttcctgtgggcanagggccatccgtcgaaggnaaccttgnggctncggccgnaaagcttatttccctttaagtgagggtaaattttaanctttgnacttggncgtcgttttaacaacgtccgtnacctgggaaaaac

SEQ ID NO: 380423 - DNA, 449 bp, Homo Sapiens
gaaagggaaagccagtaaagagggaaaaaaaaggaaggatgggaccccattgaaggaaggacgggagggacggggagaaggtaggaagaaagaaaggatgagagggaaggaagaatcagagtattagggtagttaacttacacatttgcattcttagtttaactgcaagtggtgtaactatgtttttcaatgatcgcatttgaaacataagtcctattataccattaagttcctattatgcagcaattatataataaaaagtactgcccaagttatagtaatgtgggtgtttttgagacactaaaagatttgagagggagaatttcaaacttaaagccacttttggggggtttataacttaactgaaaaattaatgcttcatcataacatttaagctatatctagaaagtagactggagaactgagaaaattacccaggtaattcaggg

SEQ ID NO: 380424 - DNA, 429 bp, Homo Sapiens
  misc_feature (82)..(82): n is a, c, g, or t
tgcaaacctaaatcaccagatagggaattatactacataacctgcagtttcttttctttgtgaatcctgacacactgatagnatgggggattgtcgatcagagaacttattaatatttagtactggaagaactctgtctccacagttgccagtaataaaaagaaacattggctactatgagcaccaatcactgggttatagctttcaaaattattgatgctgcagtgctttagagctatttccttgaatttaagaaacaaatcttaacagttttatggtgctgatgcttagttgtctcatgccattaaattgtaaaagtgagttgatgcaatacatgtgactttctgctataatgcaaatatttattttttaaatttattttaaaatgccgtgaaaactgtttaataaagatttattgttttaatattt

SEQ ID NO: 380425 - DNA, 306 bp, Homo Sapiens
  misc_feature (82)..(82): n is a, c, g, or t
catctggaagttccacttccatggccttccaggtaataaccttggagagagcttcaagcccagggtctggtggctgcgggcnacgggcatctcagctccactggttcctccaattcagcttaaccagcgcctcccaagcagctgcctatagctggctctataactgagcctggggaagatagaggaaagtcacgtccctgccttcaagggtctcgcagacaggtggggaggcagatggtgaactgtgggtacctagaacagcagaagttcactcaagctacagaaatactagaggagggtgctcat

SEQ ID NO: 380426 - DNA, 584 bp, Homo Sapiens
  misc_feature (29)..(29): n is a, c, g, or t
  misc_feature (45)..(45): n is a, c, g, or t
  misc_feature (63)..(63): n is a, c, g, or t
  misc_feature (73)..(73): n is a, c, g, or t
  misc_feature (333)..(372): n is a, c, g, or t
gctcccctggctaagatccatgctcaccngcggctcaaaattggnctcccgggaagattgccntaaggggggngattaattgttggtacatttctcactgtaaattaaaatatggatagtgttttaaaaaaatagttaccggggagctgggttaatgtgggtttgcccatgatagtcccactctctatgtactgaaacagtgggcctgaaatttttaagggatctgagttatcagactttctgtacacattaaatataggccaaggtatggccatctcacgagagtgaccagctgaccatattcctctactaccctcagacctctatacccannnnnnnnnnnnnnnnnnnnnnnnnnnnnnnnnnnnnnnngggtgcctgagatatgactagtccaaactgagatgtgctgtaagtacacaatatacactggatttcaaagacttagtaccccccaaaagaatgtaaaaacatctaattgtttttatattgacattttaaagtgatacaatattttggacgtattggaatagatgttactaaaattaattccatgttttctaaatgtggctactagaaaaccg

SEQ ID NO: 380427 - DNA, 597 bp, Homo Sapiens
  misc_feature (19)..(19): n is a, c, g, or t
  misc_feature (35)..(35): n is a, c, g, or t
  misc_feature (50)..(50): n is a, c, g, or t
  misc_feature (189)..(189): n is a, c, g, or t
  misc_feature (444)..(444): n is a, c, g, or t
  misc_feature (454)..(454): n is a, c, g, or t
atccccaaatggggatacnacttatccccatggtnaaaaggtatggaccngtcttataaatattaatattaccatattcccctaattaaccataatggaaaattgggattaaaaatggcacccaaggcatcggcaaaaccaatactatattctttaaaagtgctccaggtagccagggccctggctttnggtatcaaccctcatgaacccataggagctgaatatttgtttcactgcttaataatcctcaatttacactattcataactcttaaaattattctctttttttctaagagcccctcccttccaaaagtgtatttttttcaaagattttcacttctcaattgttgcctttgtacatactatagagtgttgcttgtaagaaaggctaatatggaaccaaactcttgtaagtaatggtaaatagaaaggtgggtggatnaaagttttcnaatactttctactacctcagtttacttgagtactacattatagtttattctttgcttatctggtctaagagacttttaatgctagtagtaaagttggtttctgctttcattgactattttcatcataatttcatcattgatta

SEQ ID NO: 380428 - DNA, 480 bp, Homo Sapiens
ggttctctgatctatccacaccggaactaggagccaaggaggtgatgaaatactgatctctttcctcacataagtctgagcctaccaatatggatgtactcaaagtgaaacgctgccctgttctctgcttgacccattgttataattttattctgtccttagagtactgaaggcagttcaataatcaacatgctatttggaatgttttaatttggaaagcaataaggctctgcacctgatatcagataccttataattctcttagctttaaaaatatgtatactttctcacaaggtttttccttatctagcttcatttctctcatggtaattaatgtaattatgtatagaattaagaccacaataagggagatgatcagaggaatctgtatagtgtaattagaaaaagtacaatattctaatgttctaactgggttgtatacctaattatataataaatacaaaataattccgagtgaaa

SEQ ID NO: 380429 - DNA, 183 bp, Homo Sapiens
ggtttgtaagggaggcttccttcatgatatgaccgtagatcgctgtcaccctgacccggttcctgatgcgtgatgtttctaagtgctcagtaagtaccaatctactcccacactgcagtatgtgggcgtgtgatgctgaacagagagagcacgatgtgatcatagttaattccctctggtatc

SEQ ID NO: 380430 - DNA, 479 bp, Homo Sapiens
  misc_feature (247)..(247): n is a, c, g, or t
agagttaggcccttcagggttgaagtctgtggtttcttgtgtctcaagactcaatgtcttgagaagttggtggaccctgtcctccatccaagaagtgctgccaaggaaacccaggggacctagcaaagagtcaggagaaaatggccaaaggaattctgacattccgatacctgaatgaactgttttcgtgagtgctttgatcaccctatcccctatcaaggcgctgaacaggtggcccgcaggaaantctgtgtcgcaagaggagggctttgacttacttcccctaattgttgagtaaaaagtgattctcttaatttctgtattctgtttttcatatcaccagtagaagggtcctgtggatctaaatagagcacattttaaggctacagagtagtagaaattgatgtttagacaaggcagcttgttcaaaatctgaaaggcacacccagaagctttctctaaacattttggctcccatt

SEQ ID NO: 380431 - DNA, 268 bp, Homo Sapiens
  misc_feature (11)..(11): n is a, c, g, or t
ctctagtagcngttccgaaagccaatgcattcactcttggaaagacaatgtcaattgttctgacattgctgttgactacatttaactaattctatgatatggtactagagctcaggaaatacatcaagccaggtcactctgttcagacctcccaagggaaacatgttccctggacagcacctgactgggaaaagactgttaatgttgctataaaatgcaaaataagtaaaagcagcattttccccaatttaaatttcagtgagaaagc

SEQ ID NO: 380432 - DNA, 400 bp, Homo Sapiens
  misc_feature (73)..(73): n is a, c, g, or t
  misc_feature (92)..(92): n is a, c, g, or t
tgtgagctcaaattaataaaaaagaatctccacgccacaaaaattagcaaatgaatggcaggtgcaaaacaanatacagcaaagagtttganactacataacctaataccatcaaaaataattataatccatttttaccaattgatatggttgcattaactttcatattcatacacacatagcttaaagcttgtgtattttacatatacacaaataatttaacattggagcataggttcgattacctatgaaattgccagtgtaacaaaaagttacactgacatttgccatatgtacataatatttggggaccactgtggtccgatttaaaacgtgaacatcgcacatttacaatgttgtttgtgaaatgcttaaaagttaacaatagagatttaatttc

SEQ ID NO: 380433 - DNA, 336 bp, Homo Sapiens
  misc_feature (17)..(17): n is a, c, g, or t
  misc_feature (321)..(321): n is a, c, g, or t
ctgctacacactggcangccttggaggaggctgagcccaggaactgagaacaggggagagagactgcatctcaagtaatactggcagtgttgcagcaccgtcacacacaatgagactgccctggcaggagtgtggcacgcccagtgtctgtttagcagttcacctttatctaccaagcttcactgctagatatacttttggggttattttttaaatgctttggcataaacttaaggtacaaccaatcacatgctgactagaaaaactcaagactatggccatagtgtccaggtaagtgaccgttcttttccctaggcaaantattcccaaaaaggt

SEQ ID NO: 380434 - DNA, 251 bp, Homo Sapiens
taatcctttaattcagtaaatttttattgaatacctactgtgtcaggcacttaagtaggtgttacgatataaatttaaaactgcatttaacaggagtcagtaaaggccagatgaaatatttctttgtcaatttcttttacacatataaatatacctgaaatctataaataatagtcaaattttctgtacttttctactagctttctatccaactcattcaaaataaatatttaaaataaattaagacatac

SEQ ID NO: 380435 - DNA, 297 bp, Homo Sapiens
tatatatatataaatacactgtagataacatttgtatgccagctacacctttttctacttctgtttggctttttttccccacaccaatggtaatttatcttcacagattgttcttcatttctagaaattgttacttcatggtaattacttgagcaaaagcttgaaaatccctgacaagtacttttcatctcatagtatattagttttcactcagtcattttatgaataatatagttatccacttaaacatttcaatattttaaccatcttgaaaattaaagattaaaaatcccctta

SEQ ID NO: 380436 - DNA, 501 bp, Homo Sapiens
  misc_feature (199)..(199): n is a, c, g, or t
  misc_feature (231)..(231): n is a, c, g, or t
  misc_feature (390)..(390): n is a, c, g, or t
  misc_feature (403)..(403): n is a, c, g, or t
  misc_feature (418)..(418): n is a, c, g, or t
acaattttaagatcttaaaagtcttctatcaaatactgaattttagatgttaaggctagtagagctgtacaaaaaacaacagcttcttgtatgaatgttcctcagtttaaatatttagtgttctattatcagtatgtgggcattaaaaaaacaagtcatttgaaactgatagagataattaagaaattcttagattttngggtatagggtgccgcaaccttagaatttaangtgtcgtccaaaagagattagtattggtcataacatggactctaaagccaccatttaaatgaagcatgtaaaaaagaatattctagtacacaaaaattattaatggcctagaatgacctccttctcactcatatgatgcaaagaataaaggtatataanaatgtttgttacnatggctatccataanaaagaaaccctccaaaacagcaaaattgaataggtatccacagtcaactttatcctgaaattggcctagaaatactgggtgtg

SEQ ID NO: 380437 - DNA, 435 bp, Homo Sapiens
atggcaagcgccctccacattccctctggtactgcataggcatggacctgcaggctaaatgtcttcccatactttcagacagaggctaggggagacagggctgactggtggccaaatgtcaaggaaagtaactttttaatacgatatattcctttaagtgacttgtccgtttttagccatcaaattacaaattaagagctagtgattctgcagtaacacacaccaattcctcgaaaaccttctaaagtcacaccagtttaataattccaaccttagggaaacaaagccaaacatattttaacaagtttgaactttgacctttctattgcttcatctctcctcagtgctgtttattctatatagtttttaaaatagtgttattatataactagtataaaatatttgaaaatccatgggactatataatttaaaaag

SEQ ID NO: 380438 - DNA, 495 bp, Homo Sapiens
  misc_feature (21)..(21): n is a, c, g, or t
  misc_feature (101)..(101): n is a, c, g, or t
attaccttgaaggccatggantgaaacttccaagatgaaacttcatggtggttccttcatttccgaactgttccagcacacacttcggcttgggccaagcngctcccgggtttccctgggcctgctccagctgcatgtccagggaagccaccaggccacgggtgtgaccccctatcccctccaggcagcgggccttctcctcgtccaccgggtggcgcagctcctggaactcgcggcggatcacccagctgaagacatccgactaattctgggacagggagggctgctcactgcagagtcacagccgagctgccaggctctgtctggctggcctcggtgtccccagggccttcctgaccgggttggtcctgggacctgagtctcaggggaggctgcatgacctggcgccgggcagggagttcaacccatgcatggggagcctgcggtggccgtggggagggtgccccagctcccatttcaaatggatgagtctgc

SEQ ID NO: 380439 - DNA, 382 bp, Homo Sapiens
actgccagccttgggtgaccagagcgagactccaatctccaaaagaaggggctcctgtgtctacgtcaatggtggggctagagagaggtccccgcagctgggctgtgttgagtgagggctcgtctcttcagcgccaggcaatagtttgtcttgtctctgtcccttttctgtgtccacatgacatttacatcttgcgagttgcataatttaagttgtttatttacattatacatttaattgcattctatagcgatgctatgttgaatgtattctgatcggatcgtttatggttatttacaatgcagttactcttgaagattattgttagaggtagactgttgatttgttttgataaaataaagcttttgtgttttaaaaaatg

SEQ ID NO: 380440 - DNA, 205 bp, Homo Sapiens
  misc_feature (123)..(131): n is a, c, g, or t
aaattaatgccaaaaagaaaatgcataatttgtaaacttaattatatgtcttatatcttattagcttagtagttggaaccacttagtctttaggtgcaagactgttgttagatagtactgagnnnnnnnnngtatgtgttatgagactgtacatgtttttttaaaaatagcaatatgcaataaagagatgaattcattgggtgta

SEQ ID NO: 380441 - DNA, 456 bp, Homo Sapiens
  misc_feature (397)..(397): n is a, c, g, or t
  misc_feature (436)..(436): n is a, c, g, or t
ctagctggcgtggtatgatttataggcgaatttcagcagaaggaagccaaaatagttttttccttttgaaagttttttaaaaattatttcatgggtcttttttttaattaatatgtgtgcattgttacaatgtatgttggatgtcttttgaccctaaatgctttttttgttatcagagattgtgtactatttttatttttaataaatgtatcttccctttccttgttttagatttactttgctcttcgttaatcttattcctgatgatctagaacattagtcatcaacattacatgtttcatgcttcagatattttactgcttgtgtccttattgttggacagctttaaacagagttgatggtacttcaaatatagctcattgatacttaagggcancttccttgggatgtgggctttttggaaggaaaaaaattnccccaaaggcaaatcccagt

SEQ ID NO: 380442 - DNA, 425 bp, Homo Sapiens
atgaaatatgtcaatgtttggaagatatacataactcaatgaggtaaagattttccaaatgaaccatgcataatgctacaaaattatgtgtgttggcaaaaaagatccattgaaagtgcaagacagaccaatgggtttctaatgtaacagagtatggaaagttaactgacataatttcagattccacattgcaactaccctttaaaaaatgaccattttcaaattttggtgagctatcaaagcagaattatccacaatgatctgcaatggctactagaatattcccgcctttcccaattactatctatgtggggctggattttcttcatacacttcaaccaaaacaacacgtcccaccagaagcagatatgagaattcagcagtcttaggggtagaaaatggagacttggcaaaaatggtaaaaa

SEQ ID NO: 380443 - DNA, 351 bp, Homo Sapiens
  misc_feature (302)..(302): n is a, c, g, or t
  misc_feature (321)..(321): n is a, c, g, or t
aaaactgtattcattccctttaaaatgaaacattcctggtgtatgtgtccatgcctctagcctgggtgagtgaagctggctgtgttggcctgggtgattgttcaggttgtagaatgcgcattttacattgtttatgataattgaagggtacttctgtctgctccaatttccattccttggtatactcagtatgtcctagtaaggaaggctttccactctactggctccttaagaagcaaaagtagggtaaattttatacttcactgactaggggttctctctcccctgttctgaatggagtnaaagtctgatgccaagacnaatattgggaggagccttcctcactaagcc

SEQ ID NO: 380444 - DNA, 193 bp, Homo Sapiens
  misc_feature (23)..(23): n is a, c, g, or t
tcaatgccaatattctcactganctttgggggactgatgttggaagatgactcatggaattaagaggatcagatggttcaaagaatcttgccctatcaaagttgtttacagcctaaaaatatttgataaatgaaggtatgttcaaagccttctcattctccaaagcagtgctgctgagaatatgcatctttta

SEQ ID NO: 380445 - DNA, 311 bp, Homo Sapiens
  misc_feature (51)..(51): n is a, c, g, or t
caatattatcattaactatactctttatgctatttaatctgcttatcccgntttccctatgctactccttgaactggtagatatacccactcagtaagaaagcaaataaaaataaaatagtttgagtcttactctggtgatctctctatcttgcatgaagctttctttatatgtaaattgtattcctcccctattccaaaccattatttttttctgtctctagatgtaaggttcttaacagtgctggagatttcatcagatggggacagacagctgatgaacattctttgggctcttcaaccccttttctt

SEQ ID NO: 380446 - DNA, 243 bp, Homo Sapiens
  misc_feature (184)..(184): n is a, c, g, or t
cctggctgcctcagctctcccagctgcctgcgccaacccccatgagcccaggagtcctatctttttcaatactcccaggcagagaagtcgtgcccagcccatctcccaaaagcagccagtcaagtccacctggagccctaagggagcgacagaggaatcacaggcccacctccttctctcaagngagcttacagtttctttgtggggattagaaaatacacgagaaactttcgctgtgccgaa

SEQ ID NO: 380447 - DNA, 200 bp, Homo Sapiens
  misc_feature (154)..(154): n is a, c, g, or t
catcttttaaggacctcctaaatatttcagaccctgtcactatatttattatgtatcaattgaacccctggatttctcctcatatggtccagctttttcctacaaatctagctgcagatttcttctcttgtctgagaaacaaccaatgaaactnttcacttttgtcgttttatgtattccttttactattaaaaaattaa

SEQ ID NO: 380448 - DNA, 239 bp, Homo Sapiens
  misc_feature (128)..(128): n is a, c, g, or t
aaatgtaagaagttaatgttagaaccctgatactgtatctaaggaaggaggtcgtgtagaagtgtttctctccttttgtgtctttttcatttacaaatgtagggggtagagcttaccactttccagangtaatcatcacgtgcaaacgaatgctcattgccaatcagattgcaagtggagtttcacaaatttggtatacaaaggtctatagaaaaattggccaggcacggtggttcaca

SEQ ID NO: 380449 - DNA, 636 bp, Homo Sapiens
  misc_feature (19)..(19): n is a, c, g, or t
  misc_feature (31)..(31): n is a, c, g, or t
  misc_feature (41)..(41): n is a, c, g, or t
  misc_feature (78)..(78): n is a, c, g, or t
cgatttatccgactcactntgggaattgccntcgaggccangaattcggcacgaggaaaagggtaaaaggaaaagggngggaattgtaggaattaacctatatgtgattaccttattttcaattctaagtggcttggtataggtttaggcaggctacctggaaataaagaaataaagaagcagaatgtactgagccaccccctccaccttccttctttccctttcacccagtggcccaggcatcttatcggtgggggccccctcatctaccccttccccactccacagagaaatttagtttaagctagcttgcaacatagataattgtaccctttcttatcagctaagtgcagccactagagccgtaagtcaaatgtttgaaaaatcctgagagtcataatgcattgtatgctgcaataaaatgcagcagaaagaccctaaagaatgtacttgaagaacaatcaataggtgatgtctaggaagattgtggaaggctagtactcagcctatgaggaactgagggagggacctgtgcactagggcgtaaattgcttgttgaaactgtgctgggtgtgcctgcatgccagacacccgatcttgcaagaccgtcattaaaagtctcactttcgctgttca

SEQ ID NO: 380450 - DNA, 460 bp, Homo Sapiens
caatatgcattaacaggatacaacagttcataaaaactgagtaactatgcacacaaatttcttaaacagtcacctaaagagaaaatgcacagatgtatgggtggaaaaaactgtatctaacactgaaactactacaggactccatcaatgagtccaacttttagtgataaaaaactactgtactgggcaaacttggcagtcataaacccacatctactctaacaagtctgaatggtgcataagtacagtaacagcatgagtacgaatgcccttacacagcacagattctaaacagacagatttatacagacatcattgtgttgtattttaaggaaaaatttccatttacaatttcacattaactcatataaaaataacttgaccctacacaaaatgtccttttagcaacattcaaagtaattaactgttacaatttccaaagcggcagaagtattgaagc

SEQ ID NO: 380451 - DNA, 144 bp, Homo Sapiens
ctaacatggtcatttgcagaaggggcagaaaaagggtctctgcctagacctggggaggtcagggaaagtactatggattggtaacaaccggctgggcttcctacaagagaaaaagactatactcacagagccagaccccatctc

SEQ ID NO: 380452 - DNA, 755 bp, Homo Sapiens
  misc_feature (26)..(26): n is a, c, g, or t
  misc_feature (36)..(36): n is a, c, g, or t
  misc_feature (41)..(41): n is a, c, g, or t
gaaatgccaattccctatttataccngacctttttngtttngatatatttcaagtttcccccggaaaatatgaggcatgttaatacaacacaattatttaaaaggtaacaaccattaaaacattttactgctgccaatgtaacatacagacatctgagaaatgacaattatcaacctttgtaatacatgattacgcaaggtgatatgagacaacccaagggtagcacattttaaaaaatacccacagtatataactgcaagccaaaaaaacttcctgtattaacagaaatgattactgaattgaacgctttttaaaaaatggcttttaagcaaaaattgtatttctcttttcatggtacattaagaatttggaatattatttttcagttaagtcaaagaagaacttggaaaaaataatgacatacttcacaaatagtagagactagatgtaaacacagacctaaaaatgagcagtaggataaaaaaaaccatgaatgtttgttctcttctggaccatgattttaaattttaatttggtaattccagataaagattctaatttatcatggtttctggactgatctctttaagttaaacactttcagtctaagtgtgttcaactggcctaaagccactgtcaggaaaaatgtatttaggaaaatatacaacacagggcaagaaaatactactgtagaataaggaatttagatttcactgcaaataaagccatatttgatattaaagacacatgttcc

SEQ ID NO: 380453 - DNA, 483 bp, Homo Sapiens
agttcaaattaatagcaacttagctttaatagtatgcaaaatatacatacagtatataaataatatataactctgtcctccccctttatgttattattgtcacaagttacatctttatacagtatgtgcacactagcatatatttataatcattcgttttatacatttgtcttttaagtcatataggaaaaatgggagatacaaaccaaaaatacaataatactggctttgacatcagcatatgtagttacctccattggtgttattttttcatatggcttctagttactgtctagtttcctttcatttcagcctaaaggactccctttagcatttcttgtgggcaggtctactggcaataaatcccctcagcttttgtttatctgggaatgtcttaattcctcattcatccttgaaggatagttttatgggaatatagaattcctccttgatccttttaccttcaacagcctaaataagtca

SEQ ID NO: 380454 - DNA, 555 bp, Homo Sapiens
  misc_feature (35)..(35): n is a, c, g, or t
  misc_feature (115)..(115): n is a, c, g, or t
tggaccaaaacttccccaggtcagctttttactangattacggtcctagccctcagatgtggtctacccatcactacttcctggaccaggctgctcacccacccatggtgtaccntttccccagcccagggacggtgctgctttgggcaaacaaattcaggttcagcaccgactatgaatttttagataaattcaagccaagtttttgacacaacactgttggctgaatatccagagtcgatcagtcaaactttttaaggggatactaaaatgggactaaatccaacaaaatgcctttcacaacgttactgtgtcttttgagcaatgtgttagaaattgctttggtaatagacttctttcacaggattgagaaggtagtgcatagaaacaacttgtatacttggaacaaatgtaacaatactgcagaaactttctaatttctaagataatttaagattatctggttaatctaaatatctaaaaagaacaacataaaaacatgaaagtagctttgttggttccaacgaagttacatgtttaataaatcttacatgg

SEQ ID NO: 380455 - DNA, 286 bp, Homo Sapiens
  misc_feature (25)..(25): n is a, c, g, or t
ctccaaagatggctaagttgtctgnaactttatttgaatcccacccaggaattcacttagagattggaccctggtcccttactgcttaagttcaaaaacaattcaaaaacttgtcaggctgtattttgaccccagtgtagtccggaagattggatattaatctaactcccaaagttgttgcctctgtggatatgagtacaatttggaaagttatcagagctcagagaaaagaggaagagtgatctaataacaagattgaaaatgtcagctgagcagagtggctcag

SEQ ID NO: 380456 - DNA, 478 bp, Homo Sapiens
  misc_feature (47)..(117): n is a, c, g, or t
  misc_feature (131)..(139): n is a, c, g, or t
  misc_feature (328)..(328): n is a, c, g, or t
  misc_feature (433)..(433): n is a, c, g, or t
ttagccaggtgtaatagcacatgcctgtctgtaatcccagctacttnnnnnnnnnnnnnnnnnnnnnnnnnnnnnnnnnnnnnnnnnnnnnnnnnnnnnnnnnnnnnnnnnnnnnnnagaactcatctctnnnnnnnnntttttaaataaagcaaaatatgccacagcatagatctgattgtagaaaattattatatggagaactgaaaaatctcctaatcaagacaaaaattttaaatagaggaaaaaaatactatctaccatttagttcaagtttccattaagagtagagtgtggaagtagctccaagttcagagctggagaattnttgcatctctccctcttaccagccaattgactttaggtaaagaatactagagttttttagttagtaaaatatagttaataattctgtataaaggagcaaaggggngtttctcattgtttcctatctcccttcataggtttgacatgttga

SEQ ID NO: 380457 - DNA, 297 bp, Homo Sapiens
  misc_feature (280)..(280): n is a, c, g, or t
gcaggattctactacacatgccagtgctttaaatctttcaggtagcttttccctggacaacttcaactccagcacctggaatttctgctcacagaattggagtcagctcccactgctgctccccaaatttgatgaggtatatgcccgctcttactgcttctcagccaactacatctaccacttgtttgtgaacggttacaaattcacagaggagacttggccccaaatacactttgaaaaagaagtggggaatagcagcatagcctggtctcttggctanatgctcagcctggacaa

SEQ ID NO: 380458 - DNA, 271 bp, Homo Sapiens
atgtgaaatgttcttggcttcgggtacaagctgtatatctcattataaaaaccacatgtgcacagcattttctgtcagtctcccagactacctaccctttgcatttcaacttgcttttcaccaccctcacataaaaggggtaggacagaggtcacacagagtgatgtgaattcccctgtgacttcagaagaagtatgccaggccgtaggcttaaatcaattcattactctttcacgtcgagccccaggtctggcctgcagtagaaggagcc

SEQ ID NO: 380459 - DNA, 324 bp, Homo Sapiens
aatactgtacaccagtctctcaatagggagatcaaaaccaaattcacacagacatgaaaagttgatttatgacagatgatgttgcagtccctggggaaagaatggaaatggtgctagaataattggtttctatatgtatttctatatatgtatatgccattacattaaagtcaatgcctatggagtttgggaggagtgatcaaaatgttctggaattagatgtgatgtttgcacaactctgtgaatgtactaagaaccactgaattgtatatttttaaagcatggtatgtgaataatacctcaataaagctgttataaaaaata

SEQ ID NO: 380460 - DNA, 546 bp, Homo Sapiens
  misc_feature (61)..(61): n is a, c, g, or t
  misc_feature (66)..(66): n is a, c, g, or t
  misc_feature (101)..(101): n is a, c, g, or t
  misc_feature (191)..(191): n is a, c, g, or t
  misc_feature (242)..(242): n is a, c, g, or t
acttttctgggccgattcgggtggctccccggatctacaccgccaaagttaccctgccacngaaancccttgtgccaaataaatgcttagtaagtaccccnggatgcacatgttgaatagagtatactggattggtgaaagaaaataataataatgagcatctaagtggttgggttttagagatcaatcangaataattttaatttccttttgtatttgaaatgtaaatagttttcttttcngattaaaaaaatttcctataactgctaaacagttaaaaactttaaagtagtaaatgagtttatagaaagcatgtattcttgatttttgtgccttggtaaagttgataactatttatgaatatttgaccaaattattccagcatcagaataataagcaaaataactttgttagtgttttgttagactgtttatgaaatataacaagaaatactattttgtgttggatggcggttatttttaaacttaattaatacctgtgaaaaggcctcttacctttatgtatataattaaacaaaatcagaga

SEQ ID NO: 380461 - DNA, 653 bp, Homo Sapiens
aatgacaaaatagtatttaatcctatatttagtcaaaagaccagagttaaaccagatctcttctggggctttttctgtgtaaaccacatcaaaacatgaacgaaagactggcttctggtttagtcaatcctggtaaatttacccaatcctgcaaaggaaactatggaggagaaatccagggacttgttgggaagggcacacagaaaccttagttcaaaaagaaactagtcattgttcggggccagcagaactctcagtaacacattttctttgttggttttacccaaggtattcctgctgccacccaagagacagccaatgacatgtacagccatctgggacatgcctgtcttcctaataccatttgggagctgggacaacatttggacaccaaccaatcatactgggacaaggcccctagaggacttgaaatatacttctcatgctggtagtttatttaggctgtgactctctctctaatgctgctctcgggaaggacgaaagtgacctgcaaggagagaaatgcaaccatacatgggctccagtcaactatgggactgaaggtcctaattgctcaccaagggggctgcttaacacaaacagcctcagacccgaggtttagatttctgaaatatgcattttatgttaagttg

SEQ ID NO: 380462 - DNA, 570 bp, Homo Sapiens
  misc_feature (109)..(140): n is a, c, g, or t
  misc_feature (553)..(553): n is a, c, g, or t
aacagaaccataagatttttatttaacatttttgattaaaggaattgtattgcaaattatgactttttaatttggcaacatccttttaatggtgttctttctttgtccnnnnnnnnnnnnnnnnnnnnnnnnnnnnnnnntccctaaagctccattccgacttagacaagggagagggcactgcgaaatacaccctctcaggagatggcgctggcaccgtttttaccattgatgaaaccacaggggacattcatgcaataaggagcctagatagagaagaaaaacctttcaacactcttcggtgctcaggctgtggacatagaaaccagaaagcccctggagcctgaatcagaattccatcatcaaagtgcaggatatttaatgataatgagccaaagttttgggatggaccttatgttgctactgtcccagaaatgtctcctgtgggtgagtaggcaaatcaaaattctgtgagatacaatgagacctcttcaacattgactttttgcaggttgatgtaaacatcttatctatcatctaaaagaattatttntcaattctagaaaatac

SEQ ID NO: 380463 - DNA, 395 bp, Homo Sapiens
  misc_feature (235)..(235): n is a, c, g, or t
  misc_feature (243)..(243): n is a, c, g, or t
  misc_feature (309)..(309): n is a, c, g, or t
  misc_feature (364)..(364): n is a, c, g, or t
  misc_feature (370)..(370): n is a, c, g, or t
tgacaccagcacccggccagcttactctttaagtgtaggcatgtatcacttaacccctgcctgcatggtcttaggtcctgtttataatttggtattttgttgttacaagagtcggttttgtcggtcttataatctctattttaatgttaagtggtggtcacttgtgcctaaaattccaaaagggccgggggggtggggcacaaatgagggtgtgtccaaatgcccacttcctggncatacccntgataagattttcaaggggtttttggggaatccccgtttgggccaaaaagcggggtcccattccantcctggtccgggaaggcttaagggattttaatttttttaaggttccaaattcccntttaangggtcaaaaaataatgcccagaagg

SEQ ID NO: 380464 - DNA, 442 bp, Homo Sapiens
  misc_feature (53)..(53): n is a, c, g, or t
atttaccaatcttccaggcaaatattaaactaaatccggatggctttttaccngtttcacatgtgtacataggttccctcccagtcccttcccatatcccattagttattgaactttctaaactgccattgaaacattacaacagtgttttgttgcaccaattttataaacttaagcagtgcaatacgtgttacttttctgaggcaaaccaaaggtaaatttctcaaggttcttgctgccttctttagcagcatttgagggaagatcttttatacatttgtaatagataaaaataaaccagattgcaaatccttttttaaaatcctaaaccatgtaccaagtttttggtccaaattatgtaggataagttaaacttaaattgcattctattaaccaatatgagtgtatttctgtaagcatagttatgttgaaataaagtttt

SEQ ID NO: 380465 - DNA, 525 bp, Homo Sapiens
ggagtgggaggagttgagactgaaagttaagagagggttttccaagtcccggctcatctcaccccagtgactttgacagtgtgctcactctcagagccatggattacctggaaccaaagtgcagattagtgcccacggtcctttccagggtataacaggctatcgttctttaattttattatatatacatacttttcttctgttttttgctttaagaactaaccccgatcaagagtattttctttagctagcttaaaaagaaaacatatattttatgtaaaaacacatacatggccaaatgcaatactgaagagacaatcatcctgtatcttttatggtttttcctgcttctgagtgtcgttctacaatgcccgttgacttattccattgcgtctctgctttagggtatggtttggtcgctttggttgtcatgagaaagagacattctccttgcagctacctccatgtgagtgaattcctggataaagcaagatttcctttcaataaacgctgtcacccaatggg

SEQ ID NO: 380466 - DNA, 459 bp, Homo Sapiens
  misc_feature (80)..(80): n is a, c, g, or t
  misc_feature (414)..(414): n is a, c, g, or t
tacatttccatcagcataatcctttaataagtgactatattagcattcggttcaaatgctgagacagtgctctggctcancttaacttaggggtatcaaaaccacacccggtggggtccctagcagaagcctaccagccggaggtgttggggtagctcttgcgcatgctcatgcatttttcctggtcgatgtacagggaattggctttgacagccaggtcatactcgagtgtggctttgatgtggaccagcgactgcagggtgtcctctgcatccctcaggcgctgctgcagggtctggatggtgtcgtcaacctcgtgtacctccgttaacaaggcgtacctgaagccatgtctccggcacaactcaatgttccggccgtcttgtgcgctcatccagtctgggtctgagccancttcaggaaggcagtcttgtccttgatggccttcttgatggattt

SEQ ID NO: 380467 - DNA, 445 bp, Homo Sapiens
  misc_feature (24)..(24): n is a, c, g, or t
  misc_feature (43)..(43): n is a, c, g, or t
  misc_feature (52)..(52): n is a, c, g, or t
tggaacccttggtttaaaaggtanctttaatatgaaaatggtntgttaattngaagatgttaaaatgctaatttgagagaagtaggagtgtatctgtgttatatgttgggatgtgaaatttattttctaaaattgaggagaaggaagttatacatttgcagaatgttttaaagtgaattgttgtaatgaagttcctgtgaacatcattatggttttgtacaaataggaacctctgatgtcattcttcaacgtttgttcctgtgtgtacaattgtactttgtatgaacagctttatcatttttataggctttccatgagttttgctgtaactactatggcttatttattttctttaatatttgtgaaagtcttactcctttgttagttttgtttctgcacaactactgtacttttccatatggaataaagactattaatagaaaaa

SEQ ID NO: 380468 - DNA, 490 bp, Homo Sapiens
  misc_feature (58)..(58): n is a, c, g, or t
ttaaacctgcaccaggtgccaattaccaggggccgggaagggataatccaccttagcntttggacctaagagggtaagagaggccccagaagccctttaagggttttgcccattactggagttacctgggtatgtagccgactggttcgtggttaggtgtaaatgttacttgcttgttcgactgtttcaaaacatgctaattccaaagccacttttgaagtctatagtggaaaatatagatggggtgaaagatataatgtattgatttttaaagctgtttataagccgtcccacgtataaaatgaaacattttaccttctctctttctaatgagatggccgcttgttaaatcatgaaaacatccagaattcaagtgccgcttaaactttgaagccatagataaatttgttagaaaagtaaaccaggattaaaagtttttaaaaatatggtaggatccttctttactttttaagtcttttatttaaaaaaa

SEQ ID NO: 380469 - DNA, 476 bp, Homo Sapiens
  misc_feature (161)..(161): n is a, c, g, or t
tttaatttatgacatggtcatataggagtgcagcagtttgacacactttcaatcaagaggtggaatctacatccctctgtgaactgtcgcccagtagaatatggtagacgtaactgctgtgctggtttcttgactcagactttactggtagggttacttcnatctcatgaaatgacagaactgtcttgttacaaagtctggctactttgctgaagagaccacatgaagaggccctgaaactacgtagagagggagaggcacctgctgaaccctgtcttcttgacatccaccaagataccagacatttgagtgaaattttggatccaccagaccagccaccagctaaatgccagtgagcgacttggtaacctgaactgatgccatgtagaatggaagaattgaccagctgagcccctgcccaaatttctgacccacaaaaacatgagatataataaaatggttgttgttttaagccg

SEQ ID NO: 380470 - DNA, 271 bp, Homo Sapiens
  misc_feature (187)..(187): n is a, c, g, or t
  misc_feature (248)..(248): n is a, c, g, or t
cctgcacacacacggacaggaatttccgtgactgtggtgcggagactggagcccaagctctgcagcgtgtcgccctcaagctgtaggcccgtgttccagtccctccacccacccaccgggctcagctccagggcacagtcacttgtccgttgcaggttgggcactagaaaaggcccccactggctgnctgggagccccacaccaccgggccagtgcaggcactgtggtgatcccataaaaggccagtncatttgcagggtcatcagacagt

SEQ ID NO: 380471 - DNA, 423 bp, Homo Sapiens
  misc_feature (32)..(32): n is a, c, g, or t
  misc_feature (60)..(60): n is a, c, g, or t
gctacctcaagaaatatatacagtagagttcnattgctgatgtatacttgtatgacctgnagcatatgcacacaggaataaagtaaaacaagaccctccccgtccataatggagagagagagcccactcaatgaatatgtgccctggcatagtgtgagagtgggaaacaaatctgtttttctgtcagttttagttccagttttcctctcttgtgggcatttggctgcatcaaggatgaatctagtgtttaaaggaaatatttttggtatgccattgccgctgtaacatctgctactttccttggatgtccataagaaacactgtgtactttgtgcattatttaaaggggatttgcaaagcataatccatggactctaggtaacttagggataatcccgtgtaagggtatggattccacctgtc

SEQ ID NO: 380472 - DNA, 314 bp, Homo Sapiens
  misc_feature (11)..(11): n is a, c, g, or t
  misc_feature (43)..(43): n is a, c, g, or t
  misc_feature (59)..(59): n is a, c, g, or t
  misc_feature (291)..(291): n is a, c, g, or t
  misc_feature (295)..(295): n is a, c, g, or t
attgggattgntgtaacaaactttttgaatatgactcatgacntcaagagtacctcgtngatgaactaaaccagtataaagggcgaggaacaaatttgataaaaacaggaaacttagagctggtttcttccatgttttcaggtgggttaatgagtatcctatatgaagatagacatattgaaccttaacactgacaatcttttgttatgttaactgcaaatacatctgtaatttttaatggaaatagcaaaaactgtaatactgttatagacaaataagaaataagcaatnccgncatatctctgaccattcac

SEQ ID NO: 380473 - DNA, 297 bp, Homo Sapiens
catttgcacaactgctgcaaaaccctgcatcaaactaggtaccacctattacaaatttcagaatcttatgctaagggttgtgaagtactgcaggaggttggaattaaagtgcgacaattctctttgttttgtgataggctttaaattaaacaacccaaaaggatatatctcaggattctctataatacaatttcttttcctccaaggcatttgcatctttggtttagttcacctatgttgtatcactgaaacatgttttataaatactgttaacagactgaaagcatctgaatcatt

SEQ ID NO: 380474 - DNA, 366 bp, Homo Sapiens
ccttggtgagggtcccagcactgcgggcagccaagagctctggcagtgtgcgatcccagacacccaagaggcctccccacaggcgggtggcacgcccaccacccggattcctagggtcttccacctccgaccacagcccttgtctgccgtccagcaaggagcaggccctgctggtgttcccgggttccccggttgtgcgccccaccccaggcccctttcccatggctgcctgtcccgcggctcagggcagccctccatgtacagtgctgcctgcacagagcctgtggattgcaggccccaaggcgttggggagagtccggggtcactgcagacccgagccccctttctttcatggagtcaggcctg

SEQ ID NO: 380475 - DNA, 487 bp, Homo Sapiens
  misc_feature (27)..(27): n is a, c, g, or t
  misc_feature (33)..(33): n is a, c, g, or t
  misc_feature (54)..(54): n is a, c, g, or t
  misc_feature (79)..(79): n is a, c, g, or t
  misc_feature (84)..(84): n is a, c, g, or t
gggcgaactgcattttcctgttacacnggtaancattggaaaatggatttcccncagtgtttaaccagtttttggtttngtttngttttttaaataataactaattgtcggagcactgatagagatgcagattttggtggggggaggtggtgggggagataatcacttcaccaactgcagtgcatttgtgtgtttttaaccctcagagaactctgcattttagggtacttgaggctgacttaactaaaagttttaaagtaaccttttttccattgtaaatacttctgtaaatactaccaattggaaattagaacagtagaatacttttctgaatccaatcctatttttattttatacagtatttctcagctgtgatctttggagcaaaaccaacggcaggaaaaaatagtttgtaccagtttcatgaagtatgtctttgggtttttgtaaataattttaactcaaataaaattgatactttaaatac

SEQ ID NO: 380476 - DNA, 500 bp, Homo Sapiens
  misc_feature (343)..(343): n is a, c, g, or t
gacaaaggatttatctctttattaaagaacccatgtaattcaataagaaaaggctaagtgattccaacagttaaagagaacaggtcttaaacagacctaacaaagaggaaacgttgccagtaaacaaacatacaacaaaaaagctcaacaatggcagttgttaaataatgaaaataattgtgaggtagtaacatctttagctactaaattagctccccaaacctaagaaaaatggtggggagagggactccaactgctcatgaggagccgtgaaccccgtgagcagtgaagggttctgtcaaccgaaacaacgcttttagagagcaatgaggcagacgccggngtatcaggagccacagaagtattcacacctgacctggtgaatccactctgagcatccatgaggaaatcataaaactatgagaaaagtcatacacagctgccctccatacccagaggttccccatttcagattcaaccaaccgtgcatggaaaaattg

SEQ ID NO: 380477 - DNA, 477 bp, Homo Sapiens
  misc_feature (19)..(19): n is a, c, g, or t
  misc_feature (65)..(65): n is a, c, g, or t
  misc_feature (87)..(87): n is a, c, g, or t
gtccacctaggattgccanccctggggtggtttggtccatcatccctcatctcacccattggtantggctatgcccctccccataanaaccaccattgatcccctagcaagattattggcattccagattttactgcctttgctaggcttttgcttagcaaagggctgactttccattgttatcatggtgtatatatttttgtcaccattcccacaagtatacttgatgttgtcatagaacgaacatcctactctatgatttactaaccaattactttcccagatcatagacctctctgcatagtagtcataggtcttgactttggggaaagaaaaggaagctgcaggaatatttatctccaaagtcgaatgagaaagaactccagcaaatccaatggctacaaactaaaaatcagcattatttcatattgctgtttcttagctgaatatggaataaagaactattattttattttg

SEQ ID NO: 380478 - DNA, 463 bp, Homo Sapiens
  misc_feature (88)..(105): n is a, c, g, or t
  misc_feature (420)..(420): n is a, c, g, or t
  misc_feature (435)..(435): n is a, c, g, or t
tacagaatgaaagaatgttgcatataattccattttaatacagaatttataaataaaatcatagtttatacttatagcatttcttcannnnnnnnnnnnnnnnnncaagtgggttaaacagatctgtgagtaccttgagagttgtcatgtagaataagatcgctaagagggcagagtttgggattccctatgtaacttcagctacaacagccttgctttatccattgtattcattcagcaacaaataggtatttgtgggccaagtcttgctttagccgatgtaatatgtctatgtgatataaacatttttttgaaaaataaataaagaaaaagttcaattaacttaaaaaagagcttaagaaaagctttgaactggatgaaaggtctttcatcagcagaagagagagaataaaaggggcngggggggagggttcngaaaattttccaattagggatttccctt

SEQ ID NO: 380479 - DNA, 513 bp, Homo Sapiens
taagctcatcagctattacatgaggtaaaattctgaagaatatgttggcgggaggcaggcctggcttgacccaagccagagcagtggggaacagggcaggaagggaactgctggggaaggtaacaggatcatagctgcccatagtggccactagaggacgccataagtctaggacagaacagctgaggaggcttcaggttggaaatagtactgttgatatttcctttaaggtatcaaaatcaaagctcaaaatagaaaagatatttaaaccaatttaattctgcaccttaaatatacatagcccctcatttttcaccatgtgctgattcgtaggaaaacaccacttatggaaataaatactgcctgacaaagtttccttaccagtttaagaacaaactcagtcacatgcaagcttgtccaacccaaagcccacaggccgcatgcagcccaggatggctttgaatgcggcccaacacaaattcgtaaactttcttaaaaccctcgtgccgaatt

SEQ ID NO: 380480 - DNA, 379 bp, Homo Sapiens
ttttggggtaattgaaatgaatgcattttacatttgagaaggacatgcctttttgggggatgggccagaatgaaatggtctaaatatatccccttaaaattcatatgttcaaaccctaacctccaaggtgatggcattaagaaatgaagcctttgtgaggtgatgagctgatgagggcaaatccttcatgaatgagattagtgtccttattaaagagtctgaaactcctcaccaattaaagctgccatatgaagttacagtgaaaagacaactatctatgaaacagaaactgagtccttactagacactgaatttgagggtgccttgatcttggattttcaagcatccaaactgtgagaaataaatttctgctgtctat

SEQ ID NO: 380481 - DNA, 489 bp, Homo Sapiens
accgtctcctatattcagaatcaatccctaaactgagccaaggtcactgtcaaaggaaagctttatttgcattaaaataaaacagcaaatatagaagacttacttaaaagatttagagtacagaaaaatcaaaacaagtttatttcatcacagacttctttctcgtgaatcaaaggcattcagaactatgttttagagatcaaataatgtattctacaactatatacatacaaatctggtataccactaacacaacataggagttaattctattgatgaatatcatggctaagatatcctgatatactttggctacagaataaaacatgtaaagaactatgctcaaatacagttctttctttgctcagggtttagacaggtttccctctgaatcagaatcacagactaaacaatcacaaattcttctaaaactaagtgctaaacccatggaaaaaaagatataatggtttcctgccagaaattttgcta

SEQ ID NO: 380482 - DNA, 445 bp, Homo Sapiens
  misc_feature (353)..(353): n is a, c, g, or t
aagtgggatgggcctagttgggcttggggagggatgaggaggtgcctagaggagctgggcatgggaataggagagctggagctctgcccaagagaagcacgagttttagtgtcagcctaagaggttcgaatcccaattccaccctaccactggcaacttacagaactgggtgtgttacctcactttttagttcattacctttgtatgtaaaggagctggctatcccctggtccagagcaggtacttgttatccgttggtcatatgccccttgcccttcctgctcacagctgccccttaccgggacctgccggcctccctttctgccccgatgttcaagcagctcatcagctgnaaggccattgcacgcacagtcagctgagctggcagcgttggctggggaaacagcagcagtggctgcaatggcccatcacccgcttgcacagt

SEQ ID NO: 380483 - DNA, 272 bp, Homo Sapiens
ttatgctcgtttttattcccaataaatgaagagcgaaattgggtgtaaatcatcgatatatttatccttgtaatattctatgtgatgtagtaggtgaaacatatggatgggtgaagatgactctggcaaaaatgcagaattatatttttaatgcttttcattagctagcattttaatggtattttccttttgcctcttattttaaatcagtagttcatttaacatgttaattaaatgtcatataactaagaataaacaccgattaaaaactg

SEQ ID NO: 380484 - DNA, 492 bp, Homo Sapiens
taaaactcaacaacagctaaaataaagtgtattcccaggtaaaatagacaagtgctttaatttgaaatggattcgtctgatgagtgtcagttacaagggcagagaaggtaccagtgcagaagagctctgactgtgggcagtgtcaccaggtcccactaagtggcaacactagtgctgggcgacttgacccatcccgagggataaacccatagccagacaggacgtgcaaacaggtctcatggtgaatgcgatgctgtggaaaatgacatggagaatggctgtctctcagctagggaggagggtcttggtgtcctaggaaagaatgttcacgtcctggagttggtggttggtgttctatctaggcgatgagagaaggatgcctttcctaatgagcacctggtggggaatagagtctcctcctttgcacttcgctggaggaagaaatttctaccacttattttttcctcctggcctatagaatacacattgccg

SEQ ID NO: 380485 - DNA, 490 bp, Homo Sapiens
  misc_feature (11)..(11): n is a, c, g, or t
  misc_feature (121)..(121): n is a, c, g, or t
tttaaaagggnggatactttataggtcctgtctcaagtatctgacttccctgggaagctggattctccacattcaaaataccatgggggagtttggtccagttaaattttatccacaccangaattgttgaaaagccaataaattattactgtataattggtgccaggtatggttatttctgtttttaacttgtttggaaaaccatagaccataaactttttctgaacgttcgatgcagagctccaaccgaactagcaaagaacatttcctcaaagaaacggagtatttttttctgtaacaatgtaactttctgtctttcattcttcaaaatgtatcactataaatttcctacaaaaagagctatttcttctctcagtatcatacagattgatttgtatagatgtatatgtatggctgttaaattgtttgttggtataaaatggtgagtgtcagtataataatgatgataataaatagcggctaacattt

SEQ ID NO: 380486 - DNA, 725 bp, Homo Sapiens
  misc_feature (17)..(17): n is a, c, g, or t
  misc_feature (487)..(487): n is a, c, g, or t
gacagcagatcaagggnattgagagagtatgtgttggcaatttaagatctgacagccagagaagtcaccactgagaagatgatggtggagtaaagacctggggaggtgaggcatggaaccctgagaatgtctgagagaaaagtggtccaggctgaggaaggagcaagtgcaaggccctgaggtgggagcgtgctcctggcatacatgaagcacaaccaagaggtcagtgtggctggagttagtaatctagggggagagtggtagatgaagcccagaacaatacccaggggctagaacttgtagcccattgttaaatgttaaacccaggagcattaaaattttaaagaatttatttgagcagatggtgattccatgaatcaggcagcactagattgcacgtggttcagggctccaccaagagggtgtgagggaatattttttataaggtgtttgtggaagccaagacaaagaaattatttgattggtnaaagtggaaagtcccagttagaagttagttagtggtttcttgttggttaagcttaagtttcattttactgcttacattgacttgggttttggtttgcttatgtaggaatccaaagtgctggaaccatctcacctaatggcttcctgatagattattttaacactgtttactgtgactaagacaggaagctatttcaaggcagaagaaataatagaaatgctgttacccttctccttat

SEQ ID NO: 380487 - DNA, 471 bp, Homo Sapiens
caagatctaacaaatttaatcgattaacttgtaaaagacactacattaacagaagaccactggaaaagataaaagtggggagagtgggatacaacttatacacatgtactcattgacaattactctcaggtagaattttttctacaaaaatggtgatttatttaacatacaatggtagatatattggggatcatcaaatttttaaaaatttttgttgggcttactttacatattacaatactaacgtaagcttataaactcttccatttcagtcgaaggaaagggatccaattaacacctgctagcagcttggctaagaacggacattaaaatcagacaaaacactggaaaatataaagttacttttctccaaatggtgtatacaaagttttgggaacaaaatcactggcctggctcccacaggacagacaatttgaatttcaaaaatgctccaggccaggaattgcataa

SEQ ID NO: 380488 - DNA, 411 bp, Homo Sapiens
  misc_feature (66)..(66): n is a, c, g, or t
  misc_feature (392)..(392): n is a, c, g, or t
tcagactgtgaaccccacgaaggagcccattgtggcctaagaggctgccctcctgtgctcagcccntcaggacagatgcctccttcctcttttccttcccaaagcaagcaagaggccgtggctgctgtgggaaatggtactgtacagctggctctacttccccatggccctgagcgagtggagtctgccacccaggatccccaaggcacttgagggggaaggattctgctggcctctgcgagtggtttcttgtgcaaggtaccaagtgcgggtccggcagcttctgccccctgcagaaccggagagccagctaaggggtggggctgcgggggttccgtgtccacccccatacatttattttctggtaaataatgttgcactggaataaattngtacaagccgggaaaaaaa

SEQ ID NO: 380489 - DNA, 660 bp, Homo Sapiens
caaaacaaagaggaaactcaggtggcaatttcatagaagaaagaataaggaaatatctttataatacagaacatggataatatcaatgagagtttacccataagaagagagtccccttgctgtgtagggaaatactaagaacaagtcagagagctgatggatgaaagccttaacctctggggagattaaaagaaagaagcttggaaatacaggaggcccaaagatagcagtcttgagatggtatatgagggaagccagaaattaatattagaacctgggtacaggacagattctgaaagtgaatagtattacataaagcttggtaggaaaatcgcactagttcaccagtaatggatccaaaccaagaagaaatccctgatttacctgaaaaagagttcacgaagttagttattaagctaatcagggagggaccagagaaagacaaagcccaatgcaaggaaatccaaaatatgatacaagaagtgaagggggaaatagtcaagggaataaagaaaaaaccatcaaaaattcaggaaattttggacacgcttttagaaatgcaaaatgctccggaaagtctcagtaatagagctgaacaagtagaagaaggaaattcagagctcgaagataagttcttctaattaactcaatccaacaaag

SEQ ID NO: 380490 - DNA, 594 bp, Homo Sapiens
  misc_feature (27)..(27): n is a, c, g, or t
acacccatcatcattatggatctcatncaataaaagtgatagtttccattgacttttcactagtgcctatctgctcacttctgaagggaagggtggctacgggatgcgaagccccgcactgtccttggccacaaattttcgaaccttattaggctgaggttcagactttggtttgaccaactgagttcctggtggtatcatcccttttggtgggtcttttacttttacttccagaccagcatcgatttcaatgccatcaatggtaacatgaagagtgtagagtccaatagcccctggagtccaatttgcacaataagtcccatcattattgacacggatcagcatattctcactgggtctcttaggagttggtgatgcaacaacgtagttcttcaaatgaataattttcataaaccttcatcattgttatggcaatatatcgagcttccttcactatcattggttcatatgaaacatctagctttggtgatgccagccctccataagtcatgtcagtattagaagatgcagctgttactgcaggactgccaggaatccttgaggtttctctgcttgattttgttgtaaagacat

SEQ ID NO: 380491 - DNA, 502 bp, Homo Sapiens
  misc_feature (21)..(21): n is a, c, g, or t
  misc_feature (181)..(181): n is a, c, g, or t
ctttcaaacacttttttgccnggctgctttaaaaacgactgcttcctttcaccgtgagtggggctactctgttggaaatgctctcctctcttccatccccagccacccatttccttctctttgttctggtttctcggtatagagttcctggcttctgttctaacggttttacaaagggccnagttctattttcccttgctcaattatagtgcaaacatgctttgcatgatagggacagactaactagcaacttatctgtccctcagtacctcttagctttgaaagcattgtgttgatgtcagaaatgactgaattttgtgcaccctgatggtagccgtttatatcgaattctaactcctacaatagctctctaattcacttttgtttctccccatcttgtcaagtggatagaccactggcaacaagacagtttttgttttccagcttttcatgccacccctaatgtatataaacgcaagaataaagaaatcaagattgaacc

SEQ ID NO: 380492 - DNA, 457 bp, Homo Sapiens
taaaaccttctaataaattggatcagctgagtttagacttgtaatttattttttaaaacaaagagggcatattaaaggagtaaatttggaaatacttcagatgaataaataaccatctctgcaacttcctttttctcctgatcagtcctgtgagtgacccttgataacttttcttaaaagcaatatgagtcaaccaaagaataagattaatttttgaggatttgtgataaccagaagaaagcactgtaggctgtgacaacctgtgagggccgagagaaatacaggggagccaactggtgatccatattggctttcatagagtggtagtatttttgtgtcagcttgttacatgcctgaacctctggattgcagcagtgttgtcattgtaccagcagttgctcagactctaatcagagtctgatttaccctcaataaagttctgtacgcatcagattgg

SEQ ID NO: 380493 - DNA, 421 bp, Homo Sapiens
gatcctttataattttccccatctttttctagttgttgccaggcaaagttttaggctgccatgacctactatatcctatttagaagtggaagtctctagagagattttcaaaattacagatgtgtggatattagcttttctcctaatttaattgaattgtggtgagagaaggtgttctgtattattcaaatagcttaaaatttgctgaaatgggtttataatcaaatatatggtcaaatttaatagttcatgtactcttataaatatgtattctcccattgttggatgcaatgccctttgtatgttcatgggatcaagtttgttgactgttttgtgtaaatctatatgcaaaatcttgatttttgtctacttgatctgcttctgaaagaggaacaataaaacttcccactgctacggtaaa

SEQ ID NO: 380494 - DNA, 427 bp, Homo Sapiens
  misc_feature (38)..(38): n is a, c, g, or t
ccagatcccctagaggcttgtctacttactcttacaangcaaccaaaaatattggacttttactgctcccataataaccaggaatttgtctttttgggatggcacatttctggtcagagacagctctaaaaaaacaacaaccaatccatatgtcctcatggtgttgtacaaagataaagtttacaacatccagatccgttatcagaaggaaagtcaagtttacttgttgggaactggactccgagggaaagaggtaaggatttcaaatttcgacaattttcccaaagtctttatttatgccactctgcatgccttcatggagcgatctttgagagtccgtgctgtatggcaaatttaggattaaatcacatgagtgaagcccttcatttattggaagagaaataaagcaaaatctttacaatggtta

SEQ ID NO: 380495 - DNA, 479 bp, Homo Sapiens
  misc_feature (27)..(27): n is a, c, g, or t
  misc_feature (81)..(81): n is a, c, g, or t
  misc_feature (86)..(86): n is a, c, g, or t
  misc_feature (94)..(94): n is a, c, g, or t
  misc_feature (125)..(125): n is a, c, g, or t
  misc_feature (216)..(216): n is a, c, g, or t
tattacaccctgttttgcctcactgtngcttggtcatcagctagcatggtggctgggaaagattagtattcaatattcatncaatnagtgaatntgagtaagtttgggtttgttatggggatganttatccatccccacccccccactcccacacacagacacccaactgatacactgaagattaaaattctaactgtagaacctagaatgtaacntgtatttggagatggggcctttaaaaaggtaatgaagataaaatgaagtcatatgggtggactccaattccatatgagtggtttccattaagaagagattaggacacagacacacagaaaggtaagaccatgtgaagacactggaggaagatggccatctacaagccaaagagatctacaggctttagaagaaaccaacactgctgacaccttgatcttggacttctagaagtgtgagaaaataaatttctgttctttaaact

SEQ ID NO: 380496 - DNA, 334 bp, Homo Sapiens
  misc_feature (40)..(40): n is a, c, g, or t
gctgctttccttagcactgatcatgtccatccacagactnttcctgtcaggcatatcctgaatcacccttcacctttacagatgagggaactgagtgccagcgagtctggggcagtgctgggcctgaaggggctcggggcctgctgctctggggaagagtggtagccagcagcaaaggggcacatgtctggggactgagaaccacttcacttacacaccttctttggtccttggctgaaccagaggtcaactcaggacctgtgttgcaacaacctgaaaagtgtggtgtattctaccagggagccttcccagggtcaggcattcttttccccta

SEQ ID NO: 380497 - DNA, 212 bp, Homo Sapiens
  misc_feature (22)..(23): n is a, c, g, or t
  misc_feature (49)..(50): n is a, c, g, or t
  misc_feature (86)..(86): n is a, c, g, or t
  misc_feature (88)..(88): n is a, c, g, or t
gccctatagtgagtcgtatatnntcgtagaataggggatagtgcctccnnggtagggcacagcttgggtttagggccctgggcgtntnaccgttgctactccttcgggacagcgcgttggttctgaactggctcttgtgtacggcaaaaacaaagtactgtacttttgactggacttatcctcagagaccgagactctctgtccttctccca

SEQ ID NO: 380498 - DNA, 195 bp, Homo Sapiens
ttcctcaacttcaatataatgggaagggataacaatattcctggattagccaaatgggtgagaatgaggatccaaaaagaagcaatacacaaacatcatgatggaaggttcataaattaaatctatatttaattttatcaagtttttagagtattctgccctgttaaagtgtcctgagtttgcagatagtgtttt

SEQ ID NO: 380499 - DNA, 480 bp, Homo Sapiens
cgggtgagatgcaactttactgacgtcagtgaatgtcagtacacagttacaggactcagtcctggggatcgctatgagttcagaataattgcaagaaatgctgttggaactataagcccgccctcacagtcttctggcattattatgacaagagatgaaaatggtaagcatttacaacttatttccaatgagactaagagcattcacatttttaaaaaacacatttggcccctggctcgtaaaatggtaacagaaacaaattacccaaggttgctaagtggatgaattatgtctttctacctttcagatgaaaagaagaaaaaaataattgggcatcaattattttttctattatttcactccattcccatataaagagcatgcagcaagtgggaatgagtttttagctttgtaattttcgccactttaacagtacataaagaaaaggttctcgagaataagtgtccatctttactggaa

SEQ ID NO: 380500 - DNA, 411 bp, Homo Sapiens
  misc_feature (388)..(388): n is a, c, g, or t
acatattggagataagtttaaattttgtgttagtgtttgggtattacttcctgccaacgtgaaaagttaacctttctaagacaatctctactaatttggactttttcaagatttttgcctacttctttcaaagagattgcaaaacgattttaactcactaaagaacatttttcacctcttgattgtccagtacaagtgtagtacagttctttttttatgtatcctccctttgtttttatagactggaaggtatccagaaataaggcattcagaaatggaggcacacatagatgaaggcaaaggccattcctatgaaggcaggtctgtaggcagctggttaatttggtttttctcagcctctcttggcattcctaccttcatcctgggnaaaaaattttaaaaagggaggat

SEQ ID NO: 380501 - DNA, 359 bp, Homo Sapiens
  misc_feature (331)..(331): n is a, c, g, or t
tctattttgcaatgagacttaatgtgcactcacacaaatctacattgtcccaaatcccaaagtcctgcatgggttggtgcccaacctcgctcccaacagatgcttctggtgggaccgactaagctgttccttggagacagcactatgttcttgacaaccaaaaagggtttgccttaatctagaattttaggaacaataagtggcactgcagaggtccagggctgatgttcagtgtacttaaccaccagctcaagctggactcccagaagcctccagctgttaaccctttagttgccagatcaagggggtacagcggaatgaaccaggtcantcagggatttacctgggggctcccaatt

SEQ ID NO: 380502 - DNA, 396 bp, Homo Sapiens
  misc_feature (341)..(341): n is a, c, g, or t
ctgtggtgggagaagtatgcaggcgagcaggggctgcagtaccccacacacctgatcaatccaagtgctagccacagtgacactcctgagactgaagaaacagaaatgaaagccctcggtgagcgtgtcagcatcctctgagttccatctcctataatctgtcaaaacactgtggaactaataaatacatacggtcaggtttaacatttgccttgcagaactgccattattttctgtcagatgagaacaaagctgttaaactgttagcactgttgatgtatctgagttgccaagacaaatcaacagaagcatttgtattttgtgtgaccaactgtgttgtnttaacaaaagttccctgaaacacgaaacttgttattgtgaatgattcatgtcata

SEQ ID NO: 380503 - DNA, 516 bp, Homo Sapiens
  misc_feature (37)..(37): n is a, c, g, or t
  misc_feature (59)..(59): n is a, c, g, or t
  misc_feature (65)..(65): n is a, c, g, or t
  misc_feature (104)..(104): n is a, c, g, or t
  misc_feature (110)..(110): n is a, c, g, or t
  misc_feature (122)..(122): n is a, c, g, or t
  misc_feature (130)..(130): n is a, c, g, or t
  misc_feature (135)..(135): n is a, c, g, or t
  misc_feature (142)..(142): n is a, c, g, or t
  misc_feature (150)..(150): n is a, c, g, or t
aacttagctcctaaattactgccacaatgaaacaagnttggtccggcaccaatttcaanattttngcatcttggaaattcaattcctcggcatgttcctccaantattgncacaaaccatanccctggcnacacnaccgctncgaactcnctatggattcctggatgacaatctcctttcctgcaaacccataatgctcctgagtgtagctggcgtaatctgtaggaacaaatttctggaggctatgaagagatggttctatcttgttggattcttctaggactcccccggtgctgtctttctgcggagcccccttcttctcagcctctaaccagccacccggggagctgagtccttcccgccggcgcccaggctctgcgcggagctcagacacacgtccatagccggagcctgctgagaggaaagagcactgggggtacatgtggattctggggttaacgacatcatggatgagaagctgggatttggagcaaacacaaggctgctctgctttcc

SEQ ID NO: 380504 - DNA, 432 bp, Homo Sapiens
  misc_feature (310)..(310): n is a, c, g, or t
  misc_feature (365)..(365): n is a, c, g, or t
  misc_feature (410)..(410): n is a, c, g, or t
ggtttggagttgggaaagtccagatgaacttccttcatttactgagttcggaagccacccatatcatcaccattcactgtctaaacaccccaaggtggacaagcacacaaacaagtggcccaggattgcctattggtttcaagggatggaatggccagatttttaaagtaaacactctacttgaacctaaagtgctttcagatgactgcaagattcaagatggcagctggcataaggcaacatttctttttcacacccaggaacctaatcaacttccagtgattgaagtacaaaaacttcctcatctcanaactgaacgaaagtattacattgacagcagttctgtatgctttctgtaaagtctnctggaattagttcccggaattcagggctggttgggccagggttantttgcctggcaggaggggagga

SEQ ID NO: 380505 - DNA, 196 bp, Homo Sapiens
aaattagcttaacttatatctgaataggtttcttttctgaacagacatgggaagaatgtgtgaactttacctcttgtctgaggatggaacttgattttcattaatccctggttattatattagaagaaaaagacaaacacaaaacaagcaggtcaagaagcaatccatgctagttaatcacatatgctttccaatg

SEQ ID NO: 380506 - DNA, 474 bp, Homo Sapiens
gcctttttaaaatagtgtggtatttcaaatattgctagagctattttcctgaaataccatttgccaaaataaggctgctttgtaatcagggaatatttttattgattgaaggaaatgactgtactgcgattcaaaagtaaacttattttattatacagattatttcttaaaaactctatttataccttaacatgaaatccatgaccacaccaaacttggttattcataatttttcctgttaaatataaaacactgtaagttaaaaacagtaatgccaacattgaatttatttttgaggtcaaagaaccagttgttctctttatatttagatgaggatgattgagtccatatactatgtatgtttacatatactatacatgcacattaggtgttttcatttgtgttttgcctatgaaatgtcatttaaagttcacttcttgagcatcaataaaaagggaagctgtgtggttttgg

SEQ ID NO: 380507 - DNA, 441 bp, Homo Sapiens
  misc_feature (14)..(14): n is a, c, g, or t
  misc_feature (359)..(359): n is a, c, g, or t
  misc_feature (406)..(406): n is a, c, g, or t
tttggggtgatganaaaaatcgtcactgaggacgttgctgaaatgaagaatgtccagtccagtgaggggcctgtcgtgggaactcggtgggaggggatgcatcctcttcactgtgaccactgccacatcctggcattccctggtcagttgaccttgaaccggctgtgcaggtccagcaggaggccagctggcttcctaggagtctttttccctctgctcactctgctgtgtttgcgggtttcctagacggaaatggagagctggatttctccacttttctgaccattatgcacatgcaaataaaacaagaagacccaaagaaagaaattcttctagccatgttgaatggtggacaaggnagaagaaaggttacgtcatggcgtccgacctgcgggcaaaaactcangaagtctgggggggagaagctcacccaccaaggga

SEQ ID NO: 380508 - DNA, 420 bp, Homo Sapiens
  misc_feature (33)..(33): n is a, c, g, or t
taatatagatgcaaataagtagtagggagcggnaaaatgtaaggaattttccccctgaaaatggatctggaaggagtaaaagatatttaattgacctaatcgtgcattgagaattgactgtttatcccatttatttgttcaataaataagccaatgggttgtaaacattgtaaacattccacagcatgtggaaaggacatggatttttggagtcaaattgaatctaagccttgctacttacttacctgtaatgatgcaaccttaattacttgatctctgtaaacctcagtttccttacctacaaaacgtttgtactattacctgccttatagagaggtccagacttaagaatatgatgatgtaaatgtttggcactgtgtctggcttttagtaagtggtcaataaaggccagttctcctt

SEQ ID NO: 380509 - DNA, 509 bp, Homo Sapiens
aaaactctgatgattgcttgagcaacaggcaggttatctgctggtctgaattctggttgaaccgtgtattctaatatttctggttaagtggtgactgggtaaggaaaccacttggggtagcagttcaacaattcacttacgaatgtttataagctttccatttcctaggtaaattttttaaaagccagtcaaaacaaaaactttactgaaaatggacagaaataggaaatggactttttccttactgtctatacctcctgaaccttggtattgtaaagatctggggacctctgggtctgttctgaccattccctagtctccatggccaagcactcaaggattgatggacaccacacgaccagctatattcatttgccaagatcaacagctccttctccaaacaactcaagcccccaattcccatcgcattccatttgggtgagatgcaactaacagccccttcctggatgaaggagtcaaagaataaagcttcctagaggcatgccccc

SEQ ID NO: 380510 - DNA, 667 bp, Homo Sapiens
  misc_feature (139)..(139): n is a, c, g, or t
  misc_feature (601)..(601): n is a, c, g, or t
ccattttgttattgtttaactttgtgtattgaatgactcatttttagtctctcttttctaatatgcacatttctaagcaggtctgcctatatgctctctaaatactgctctagctgcattccacatattttaataggantttgacagttttaatttccatgactttttcccatgactaattagaaatgtttattaattctcaaatacatggagctttcctaaagatgccttttatactgatttctatctgaaatccattgtggtcagagaatactgtgtgttttgtagcaatcctttgaaatacattgagacttgcttaatttgcaagtacaggttttcatatttttccatatgtgattggaaaaatattaatttgacaatttggggatatagtatacacacaatacacacaaacatatatgtattttcagtacttcaaaatttctacatatttcctggtatttgtctgcttgcttcattaattactgagagatgtacggattttgagttgtactttcttttgttgctctctcatttttctttcatatccttatggcaattgtattaagtgcataccaatttaaaattatttcaccttccnccatgtcaccttttattacacaaagtgatattttctattaattcgcctaaataaactttgcacttg

SEQ ID NO: 380511 - DNA, 396 bp, Homo Sapiens
  misc_feature (383)..(383): n is a, c, g, or t
acatcaacagatactttgtactaaaagtaatttagtaaattactttacaggagggccttttataaaactccattgtccccaagcccatctataatctcaggcattgcttcatccattctacaaatagtttttggaattattcagagttttctttttttgtaaaattaatactaatattacaagttttttttcaagaaaatatttcattgcatttctctttaggttaaaagtacactcatttcttcaaatcacactatttcgtgggatttgtcttcaagtacagtttttcattgagaagttatacgattttgaagaaaacagtagttaaaatctatgtttacaaaggactggggaaaagaaccctagagaagtgggaaaaaacnaacaaaaaaagtc

SEQ ID NO: 380512 - DNA, 686 bp, Homo Sapiens
  misc_feature (158)..(158): n is a, c, g, or t
  misc_feature (160)..(160): n is a, c, g, or t
gggtggtttacccagatgttcaaaacattccatgtgataatgtgtttgtgaagagtgtatgagtgctatctagtgtctctattcccagatggccaggctcacaagcccaccagggaagatcccagctggaggggcttccacattttcctgatgaggancnaattttagatttcctcaaaatcttttgattgctgccaaaagggagaagggtttgcagctgctggtcaggcattctcctttccttgccagaaccctgactgactcagggcagtaggtgaggctgcaacatcaaccagtccggtgacgctgacacacagctttggggtcaagcctgtcacactaacccggctcccagttgcttaacggactcccagaggccatgatgctcagaagtaaaaagatgcaagcagcaatctggaattcagtggcccccaacgtttatagatagagggatagatagaaaatattagaacttccacttgtatttttaaattaaaaatctgactggggtggggggaatggggcattttttaatatgtatagactttcagtttttgcaagatgaaaataattctggagattggttgcacaacagtatgaatgtatttaacactactgaacgttacacttaaaaatggttatgatggtaaattttgttatatgtattttacaacttaacatttttc

SEQ ID NO: 380513 - DNA, 346 bp, Homo Sapiens
  misc_feature (26)..(26): n is a, c, g, or t
ggggtgaagagaagcctacctgcccnaatggctcagggctatatccacctcccggataaccctggcccttgggactccatcatctccttgaagtagcactgagaatccaagaagaggctccgctgctttttgcacatgttactgagttacatctcaggaagatttttaagcacgaggaaggaaaatacaggcctggccaagcagggtccccttttcggtatcatctttgttcctaataagcaatcaagggggtgggtgtgttggctggtaaaggaactactaagattcagaagcttgtagtcttcattattttgttttacaggttaaaataaaccacttgactggg

SEQ ID NO: 380514 - DNA, 193 bp, Homo Sapiens
ctgaaaaagtcgtttagcttaagttctatttgttatcggaagagaagaacttactatgagaatttactcaaacaggtctgaccaacaaggaaaacaaactagaaagacagtgaaaggggaaagttgcccatgaggtttctgatggcctaaaactcgggaaaagtctatctctgccttagtgttaagcagaggc

SEQ ID NO: 380515 - DNA, 467 bp, Homo Sapiens
  misc_feature (434)..(434): n is a, c, g, or t
  misc_feature (442)..(442): n is a, c, g, or t
  misc_feature (448)..(448): n is a, c, g, or t
tttgcctctggttccagttcttgtgatagaattaatttgatcccattactgtggactctattcaatgcctgtcatgttaagaggtatttccatacagactggtgagaacatgaatgttctctgtgtgagctctggaaactgttctgtctgctgctttccagtgattttttccctgacttccagtagtctcctcacacaaaagggctgatcaacgctcagctgctgactcatgagcaagtctatgcagctccccagagagttctctctgtgcagatctttcctctccagtactctgacctgcaaaattatcgccatctcagcctccttgaaagatgaactttgtttcttcaactcaacaacatctccagcctcttgtgtgcagcctggaaattccatccaggcagtaaggtgggagtgctcttagggccaatccncatttggntttccnttctttcagggatcaatat

SEQ ID NO: 380516 - DNA, 473 bp, Homo Sapiens
  misc_feature (13)..(13): n is a, c, g, or t
  misc_feature (22)..(22): n is a, c, g, or t
  misc_feature (53)..(53): n is a, c, g, or t
  misc_feature (69)..(69): n is a, c, g, or t
  misc_feature (77)..(77): n is a, c, g, or t
  misc_feature (92)..(92): n is a, c, g, or t
  misc_feature (117)..(117): n is a, c, g, or t
  misc_feature (124)..(124): n is a, c, g, or t
  misc_feature (219)..(230): n is a, c, g, or t
cttaatggtaatnttttaaaanccattattttccggaacccattccttccggnccctcagaaggtgggncctggatncctacctattgcttnggtgtgagaaaagtggtggtgaganccttagngccagtggagatttgctacctggtctgtgttttgagaagtgccccttagaaagttaaaagaatgtagaaaagatactcagtcttaatcctatgcnnnnnnnnnnnntcaagtaattgttttcctatgaggaaaataaccatgagctgtatcatgctacttagcttttatgtaaatatttcttatgtctcctctattaagagtatttaaaatcatatttaaatatgaatctattcatgctaacattatttttcaaaacatacatggaaatttagcccagattgtctacatataaggtttttatttgaattgtaaaatatttaaaagtatgaataaaatatatttataggt

SEQ ID NO: 380517 - DNA, 320 bp, Homo Sapiens
gcatgttaacataagcacatctatttctaattagaaatcattattatacggtgtcagaacatggttgcgaaatacaagttaacgtgctaaatctacacattgatcctcaagaagtaactaactttgcattttcacaacattccttattgtctgcatgttatagccacatctattaaacttacagtgttttttcacgcaggctaggaactgaaaatctattacagaagtcaaactaaaaaagcgcgatggcctgctttatttaatgacatccaatttaagaaggctgttgaagttctgatgccatcacttctgcgattgtc

SEQ ID NO: 380518 - DNA, 380 bp, Homo Sapiens
  misc_feature (13)..(13): n is a, c, g, or t
  misc_feature (27)..(27): n is a, c, g, or t
  misc_feature (36)..(36): n is a, c, g, or t
  misc_feature (58)..(58): n is a, c, g, or t
  misc_feature (80)..(80): n is a, c, g, or t
  misc_feature (89)..(89): n is a, c, g, or t
  misc_feature (98)..(98): n is a, c, g, or t
  misc_feature (167)..(167): n is a, c, g, or t
acataggagtttntataatgcattcangtaacccangaatgtaaacatttattagccncccaagtaattaggagatagcnatcaattanattgaaagnagatgagtttagatgcttatagccaagggagttaattgaaattgaaagctattgtaggtggttactacntattattatcaaacctgaaagttggaacatgtgaacttgatcctttgcacacataaaagttcacaaagctgcttttaatttgcctttgttctgtagtactgcttggtgaatcatgcactagtttgttgtaaaattcatgtaaacttttatgtatacaaatgtcagatcaagcacaggttttattaattatatatattttaaactgccaacagc

SEQ ID NO: 380519 - DNA, 402 bp, Homo Sapiens
ttttttcatcataattattttattattattatttgctatcacagagtagtgtacaactaacagaaccaattatattgggtaagctgcatgaaaaacaattgaagagggaaaaataatatctccatatatatgtaattgatttgtactatgcactaataaagcctgccttagatttctgttcttagtttaaaccccggaaacagtaccaggcaagggttagtggctattgaaaatatcattaaggacagggttatctaaagacacactggatactacattaattttgcaaaaataaaaagacagtatacagtgttcagtttaaaaacaaatcatatgatcttacatttcagctttttttctttgaaatcagtggtgtaatgggggagttaaatacttttaggc

SEQ ID NO: 380520 - DNA, 432 bp, Homo Sapiens
  misc_feature (112)..(112): n is a, c, g, or t
tgtccctgacctctcacggttcactcagctttacacaaagcttcaaaccccaccgagagaggcctcacatcatgccattacactcaaaactgaaagaggctacctcaggacnagctgcctctgcccttctgagtaaactgtagggacatcactattcagaaatgcaaagcattcttcccctgaaagtcagatccgtgccaagctgtcattctggaagcttgcacaggttaggggacttggcattcaaagctcaaatgaacttggcttcaaagtcacccaatttctgagaagacaaacatgaactctacatcctggatgggtctgcagagtccaaaatgaaggccgtcaaccacaagccaattcattcagtagtgtagttaggtccaggattagccaaattgtcagcaatgattcagtaaaagtcatgataag

SEQ ID NO: 380521 - DNA, 507 bp, Homo Sapiens
aattcggcatgaggccagaacaaaatttagtaactattctgtggtattggttttaatcagtaatcctcatttgtgtcctccacctgtaaatataataaatttccctttttccttttatatcaataagttattgctacaatgattaccatccacagcttcgtatctgcagagtaatgatctaagatatttatttctggccagataattctttgcaatctattatgtttggctgcaaatgaagatactgaattatacaaggcagaaccttaagttcgtctggtgctctgtaccaacatggaaatagtgaatatgtaaatgtattaaaatgagatcactctaggaacctgtctgcattcagaaagaattttgactaagcttatatttaattaatcatgtgcatatatacttttcaatatcaagtcttattacttgattcaaaacaagtgaccaattctagtatgaagtttttgtgactacttaataagaagtaattttatggcttttgtc

SEQ ID NO: 380522 - DNA, 465 bp, Homo Sapiens
  misc_feature (375)..(390): n is a, c, g, or t
  misc_feature (436)..(436): n is a, c, g, or t
cgtgatctttgtcggatcttaaaactaattctcatggcagctacagaaatggctgccacaaagtcagtattaatgttagtgtttaattgccaaaactattttagaaacaaagaagacaaaaagtagtatacacctaggaagaatgcgaaaatgtataactttggttctagatatatcttctgaatcaaaattgcaaataaaggctaagtaacatcgttttatcaatatatgtgaacaacatatcaacatatatgatcaacatgtgaacaaatttaaaataagctatctaggatcacttgcaccatcttcatttgataaagagttcaatttagtaaacatgtttaggcatgtccattaatccatagaataggaccnnnnnnnnnnnnnnnngaaagagagtctcactctcttggctcaggctgggagtacatgggcncaggctggagtccaatgggcacgaccccg

SEQ ID NO: 380523 - DNA, 460 bp, Homo Sapiens
  misc_feature (374)..(389): n is a, c, g, or t
  misc_feature (408)..(408): n is a, c, g, or t
  misc_feature (425)..(425): n is a, c, g, or t
  misc_feature (442)..(442): n is a, c, g, or t
gtgatctttgtggatcttaaaactaattctcatcggcagctacagaaatggctgccacaaagtcagtattaatgttagtgtttaattgccaaaactattttagaaacaaagaagacaaaaagtagtatacacctaggaagaatgcgaaaatgtataactttggttctagatatatcttctgaatcaaaattgcaaataaaggctaagtaacatcgttttatcaatatatgtgaacaacatatcaacatatatgatcaacatgtgaacaaatttaaaataagctatctaggatcacttgcaccatcttcatttgataaagagttcaatttagtaaacatgtttaggcatgtctattaatccatagaataggaccnnnnnnnnnnnnnnnnggaaagagagtcccactcncctggctcaggctgggngtacaatggcccaggcngggggtacaatgggccgg

SEQ ID NO: 380524 - DNA, 384 bp, Homo Sapiens
  misc_feature (47)..(47): n is a, c, g, or t
ccccggaaggaaaagtgattccacttatatgtagaatatatataaangaaaaagctcaaaaacacagagaataaaacatggcgaccatggtagggaacaggaggaggaaacagagatataggtcaaaggatacaaaatagcagatatgcagaatgaacaagtgtagagagttaatgtataacatgaggactaaggttaataaaattgtattagggattttgttaactaagtagattttagctgcttttgtcacaaaaagtagttgtgtgagaatgatagatatgtaaatctgcttccctacagtaaccattttattatttctatgcatcccaaactaccatgttgtaaacctcaaatatacacaataaaatgtatttaaaaaac

SEQ ID NO: 380525 - DNA, 125 bp, Homo Sapiens
  misc_feature (50)..(50): n is a, c, g, or t
aacatcatcaacagacttcttaattaagctgccaatacatactgccaatnacactgtgtgctgtctgagaaatgcattgtgtaagtgctatttccatcttattaaataaacgaatgttgctctgt

SEQ ID NO: 380526 - DNA, 571 bp, Homo Sapiens
  misc_feature (249)..(265): n is a, c, g, or t
  misc_feature (269)..(269): n is a, c, g, or t
  misc_feature (483)..(483): n is a, c, g, or t
  misc_feature (508)..(508): n is a, c, g, or t
  misc_feature (541)..(541): n is a, c, g, or t
  misc_feature (550)..(550): n is a, c, g, or t
ggcagatgttagccttaaatattcagctctcattgaaccctaattaaacaccccaatttccagggaaacattttcattttccctttatttttaaaatattctatttattatttctgatataccaattactggtacaatgtttccatgaaaaactatatatgttccaactgtacccattaaaaggcatttgtattggaagaataaatgttatagtaccaataccattgatctcttaagcaacattatttnnnnnnnnnnnnnnnnntcangtttaaaaatgtggaaaaactccctattttttacgacacatcatgtttttcacggcctgttacaatgggctaagattccataatcttaaaaatgttaaatatgggcaattggtagcattatatactttttatacttactgtctgggtattcttgaggaagagtctgctctgcacccaggttacatacttggcctagctcttttcataagttccntggcatttctggcaataatctctgnctattttcatccaattcaaggaatgttgcccgnaagacggantgtgaagatgcggccatataa

SEQ ID NO: 380527 - DNA, 493 bp, Homo Sapiens
  misc_feature (36)..(36): n is a, c, g, or t
  misc_feature (41)..(41): n is a, c, g, or t
  misc_feature (439)..(439): n is a, c, g, or t
  misc_feature (477)..(477): n is a, c, g, or t
gaaaggtaagagagtctttaaggaggccgaaaagcngtttngatcatgtcacagtgaccttgaaatgtaaagacccagaatgctttaatgtcctttttagcttgatcccctttctttagttatagagattctgtaggaagaatttcctttcaatttatcttggctgctgcttttgatcctctgggggtagaggtctatttgggtacagttgtttagtcttctgctgagccagagctaggcaatgacggatgtggtcctttcttccatgctgtaatggaaatagagaaggctggctacactgttcctcatgggacgacttgctattttcctcaaggtacaggcagctccagttcatctctcaacttgggcagtgtaaatctgtgggctcgtgggatggattggtggagcagttgttgccaactctgtagagaacatttcntgttcccccttggggcagacacaagtggatggtttccntgcctgttgatggagt

SEQ ID NO: 380528 - DNA, 545 bp, Homo Sapiens
gacaatgtcagtgactcttgaccctttatcatcgtttttggtcagtttgtgtccttgctgtattgaaccaagaggtaagacaccaaactatgaccctcagaagaatataggaactttcttaaaggcatacatgcaggtttgtgaatgaaacccttccaaaattctgttcagcctgcaattaaggtgaggttgtttttagatgcagtatttagagggtgtatcacttcacccacaatcagaatgctatactgtaccatgataaaagacacataaaattaactaagtcacaggaaggtctcacttaagcagattatgatcaatccaaaatttcttctatgtacgtcagctttagtgagatttactccattagtataattatgacctattaataacatactataaataggaaagtgttatttataaatgtcagttatatatctacatagcaattaagtgataatactggaaataaaagtatacatataaaagcaaacacacaggtatacagtactcctctcctcgtgccgaattcctgggctcgaggg

SEQ ID NO: 380529 - DNA, 440 bp, Homo Sapiens
gaatcaactggatatgatgaacatcagtagactgctacatgtaacagcagcagaatacacattcttctcaagctcacatggaacactcaccaagataaattatattctggcgaatagaacacaccttaaccaatttaaaagactagaaatcatatggtgtgtgctttggaattcaactagaagtcactaacgaaagctggaaaatccccgatacttggagattaaacagcacacttctaaataactctgggtcaaagaagaaatctcaagataaattttttaatattttgaactaaataaaagtgcaaacacaacttatcagaatttgtgggatacagttaaagcagtgattagagagaatttttatagcattggatgcatgtattagaaaacgagaaggttctaaaatcaatcatctaagcctccaccttacaaaacta

SEQ ID NO: 380530 - DNA, 698 bp, Homo Sapiens
  misc_feature (403)..(403): n is a, c, g, or t
  misc_feature (443)..(443): n is a, c, g, or t
  misc_feature (640)..(640): n is a, c, g, or t
  misc_feature (658)..(658): n is a, c, g, or t
  misc_feature (682)..(682): n is a, c, g, or t
gcagactacagacacatttaataaaatgttacattgttgggtaattatacattgtgaaagtaatttttgtctcctttaatctgtcatttgtttgttgcatagtcagtctttatctttggactgggtccagaaatggccagaaatgtattttaatgatcctggaagtggctagtagcatgtgctgtcggatgtggaattggtatgactggatgcaccagggtctgcagaagctgcaccaagattgtgattgtacacagagatcttcagcctgaaagaaatcaagtttcagtttgatgaatttgatctgggccatctccaacacactttatgtaccttatgtactgtgatgtactgttcctcagacaccgtgggcaatcttctgcattgggtcctaaaatagctnggagatatccgcagctccttcttgggggccctgctgacangtggaggccagttgctaagcccatcagctgcatcgtagctgcagcagtccaggcgcggtcacccagaccatgcgtggaccagaaagagcccatcttctgcatcactccaggagcagctgaacaattccttttggaagcagtgggacgaaaccaagtagctggcagcttccccgggctctcttccactgtagcagaancttgagaaagtctgcttnccaccacggctgctgcttgagtgnatgggtctggtgcctc

SEQ ID NO: 380531 - DNA, 572 bp, Homo Sapiens
  misc_feature (437)..(437): n is a, c, g, or t
cagcctcctgagtagctgggactacaggcacacgccacctcgcccggcccgatctttctaaaatacagttctgaatatgctgctcatccccacctgtcttcaacagctccccattaccctcaggacaatgtctgaactctccagcttcgcgtgagaagtccccttccatcccagaggtgggcttcagggcgcacagcatgagaggctctgtgcccccatcacccttcggtttccagtgaattagtgtcatgtcagcattcagctcagggcttcatcgtggggcttctcagttccgatttcccaggctgaattgggagtgagatgcctgcatgctgggttctgcacagctggcctcccgcgttgggcaacattgctggctggaagggaggagcgccctctagggagggacatggccccggtgcggctgcagctcaccncagcccaggggcagaagagacccaaccacttctattttttgaggctatgaatatagtacctggaaaaatgccaagacatgattatttttttaaaaagcgtactttaaatgtttgtgttaataaattaaaacatgc

SEQ ID NO: 380532 - DNA, 707 bp, Homo Sapiens
  misc_feature (544)..(544): n is a, c, g, or t
  misc_feature (546)..(546): n is a, c, g, or t
  misc_feature (666)..(666): n is a, c, g, or t
  misc_feature (688)..(688): n is a, c, g, or t
ccctcaggaccccaaacagaaggaggatgaactgacggccttgaatgtaaaacaaggtttcaataaccagcctgctgtctctggggatgagcatggcagtgccaagaacgtcagcttcaatcctgccaagatcagttccaacttcagcagcattattgcagagaaattacgttgtaatacccttcctgacactggtcgcaggaagccccaagtgaaccagaaggataacttctggctggtgactgcacgatcccagagtgccattaacacttggttcactgacttggctggcaccaagccactcacgcaactagcccaaaaaggtccccattttcagtaagaaggaagaggtgtttgggtacttagccaaattacacagtgcctgtggatgcgggcttgcctggctcattaagatgacctgtgcctactatgcagcaatctctgagaccaaggttaagaagagacatgttgaccctttcatggaatggactcagatcatcaccaagtacttatgggagcagttacagaagatggctgaatactnancgccagggcctgcaggaagtgggggctgtggttccacggataggcccttgccccatgatgtagaggtggcaatccggcagtgggattacaccgagaagctggccatgttcatgtttcagnatggaatgctggacagacatgnacatggccgctcccacgcc

SEQ ID NO: 380533 - DNA, 301 bp, Homo Sapiens
ggcacggaggaatgctgcaatcaataactttatacacatgtcatttcatgtgattgtgattatatatgtaggaaaaattccacaaaagtgaaatagcagaatactaagggcatatgcatttgttgttttgatagacgctgaatggcccttcatgatgctcttgtcaatgtattctcctacaatgcggagagtgcctttttcctcaggccctccccaacacagccagttactaatgttgtctttgagtgtttaatagttgtgaggtggtatctcaatgttttaaaatttaaactacagaaat

SEQ ID NO: 380534 - DNA, 416 bp, Homo Sapiens
  misc_feature (243)..(252): n is a, c, g, or t
  misc_feature (381)..(381): n is a, c, g, or t
atacatgtgagccaccacacctatcatatcattgttttttagtactttgttttgttttcaaatacatgtgtttacggattatagatttcccccaccccagagttagtcacatcccacaagttttctacttttgtaaaattgtattgaagtataatatacctgagagaaagtgtgccatcttaaatgtacagggtggatgaattatcacaatgtaaatgaatctctgtaactagcaccaagatnnnnnnnnnnctactagttatttaaacctaagtttgataatattaccaattactttaaagttcatgtctgataattctaatacctgaagcacttgtgggtttgtttcttttttctgttgtttattttgttcatagtttncagtcacttgatcatagatcctggcattcctggcc

SEQ ID NO: 380535 - DNA, 378 bp, Homo Sapiens
atatatttggttaaacaggaaaactgtggtatgtctgtgtgtaatggtaaaatatatatcctgggcggaagacgggaaaatggagaagccacagacactattctctgttatgatcctgcaacaagtatcatcacaggggtagctgcaatgcccaggccagtgtcctatcatggctgtgtgactattcatagatacaatgagaaatgctttaaactctgaagacaggatacctcaccgaagaagccacactgatccaagatgggaggttttaaaaactctacagtgggaacttcacatatctcctttgtgccatatgcaaaaaatagtaaaaataataatttggtgcctttctcctcaaaatatcaatctttcaaacta

SEQ ID NO: 380536 - DNA, 531 bp, Homo Sapiens
  misc_feature (355)..(355): n is a, c, g, or t
tcctaagagttattgtttctggcaacgaccacactccagcaggctcaggcctgagctgatgaatgggacaacctgatgaccaccacaaagttgcgtctgctcccatccagctaatccgagggctctcagacagactgtgactaatggggacatctgagggcagaacgttcgaaggccaaggaggaacaagtccagacaaagtgtgagcacacacatctggagggctggggagcccatgtcacattcctggctggactttggactccaggaggaaggcttcaggttgggcttgctcaggctgaggcagtttgggagagtgggagtgcagggaacttggccatctgaatgcccgggntttgaaattccacaatctgttgctttttggctctgagagctctggcaagttatgtagcctccctgggccttggtttctgcttctttaaaatggggttaacaatgaagattggtgtaagaatcacatataaaggtgctgtcaagaaatctggttgaaggctggacatgatggctcat

SEQ ID NO: 380537 - DNA, 706 bp, Homo Sapiens
  misc_feature (27)..(27): n is a, c, g, or t
  misc_feature (36)..(36): n is a, c, g, or t
  misc_feature (51)..(51): n is a, c, g, or t
  misc_feature (156)..(156): n is a, c, g, or t
ggggtggaagctcgggaggctcacgcnggacacatngctgcacactctggntcccctgtggctgcagctgcacccacctacccagcattctccccacgacctgtccagcccaagcccacggactcccaggggagcccaggacaccctcaacttttnagtggattactagagtatcagaccacccatttatctctcagttcctcactcccaccccctgcacccagcaagtcaccaagtccccccaggtgagtaaactggagctaacagcagttggtacttacggcatatactggatttggctcactcacacgtggtattcctatcttcaatctactgtatcttcctggactacataagctgcaaagttaaaaactgcatttctcagattcccttgagctaggttccagacgtgatttattatcagtcaatcaaacacattcgcatgagttttgtatagggaacaatgttaagtcggaagaaaggcagaatgcaagacacggttctggaggccagaagctttattggtagcatcctgactcaataggcagctttcctgataatagcaggaacatcagcctccttggtggcccactcattgtgtggctctggaaatcattcctggatattccacctagtctgtttctttagctttcccaacaactctgtgagccatgtaacattctgtaataaatttctttctgcttaa

SEQ ID NO: 380538 - DNA, 687 bp, Homo Sapiens
  misc_feature (500)..(500): n is a, c, g, or t
gcttatttaactaagctgttattatttgcagccctctattatcacatagtattctgcatgcaatcatatacaattaggaagatgtgagaaaacataccaaaaatgctatatttaaaatattcatgtgcatgaggttataaatatgacaaatatcgtaggaattgtagaatcctaatattatgtcactaagaataaaaacgagctcagttattaaaacatttgggcctctggagcaccaataaatgtcaatgtgcttagcaaaatttggaatcatgagcaaagtgtggcagtgcgtgttccatgtaacaggcactcaaaaatttatgcccagtgaaactgctaagagcagttccacacatgatccattttaaatttggttctaatggaaccccgaggaactggatcctttgaagtggcccctggtgagactccacttggctcttaacagcatcctgaaaggatttataggggtgcaaaatgaggacctggtttaatttaanggaagtgggatttgcaccttctctatgttaggtgaaaaatagcaatcccctgcttctcccccatagacctatatgacccatttagaatgactacaaagccaatgcctgctacgttacaatgttactaaggtctgtattttatatttcagatggatggaccaatgtaaagcaaaattcagcttgttgt

SEQ ID NO: 380539 - DNA, 483 bp, Homo Sapiens
  misc_feature (321)..(330): n is a, c, g, or t
  misc_feature (366)..(412): n is a, c, g, or t
ggcaaatacattagatttgccaaattttccttccccccttgcccacccacttgagcaagaacatttgctacccagatccccagggagttctcatatcctttcacccagccccatgggagcccttgtcttctctcttccagaaagccattatttctattagcatcccaatcttcatcaccaaacaccgtcaagaactgagaagagtctgaaattttactctactttggaagctaacaagttagcctcccacagttttatagatacaggttgagtatcccttatctgaagtgctggggatcggaagtatttcgggtttaagannnnnnnnnngattttggaatatttttattatatatactttccaannnnnnnnnnnnnnnnnnnnnnnnnnnnnnnnnnnnnnnnnnnnnnngcatttccttcacacatgtcagtgcttaaaaagcctcaccagcttgggcaacataggaaaatcttgttact

SEQ ID NO: 380540 - DNA, 512 bp, Homo Sapiens
  misc_feature (12)..(12): n is a, c, g, or t
  misc_feature (25)..(25): n is a, c, g, or t
  misc_feature (32)..(32): n is a, c, g, or t
  misc_feature (41)..(41): n is a, c, g, or t
  misc_feature (88)..(88): n is a, c, g, or t
  misc_feature (98)..(98): n is a, c, g, or t
cccgttggggancaagattgggggnccatccncttaatttnaaaaccaaatttgtaccccattctggggaatcgggacctcttggccntgtagattgnggttccggggaaagccggatgtaaagtgtgaaggccaacagccccagtgttgctgaagtgcccgggcacagcatgtgcccatcatttcacagcaactaaaatgctgaccttacaggttcatggtttcatttttggtcttcatgaaaagcttgaattctcgtttagcttcagtttgcaacacaaataaagaatatatttgagactgattgtcacagaattttctaattacccacatgtggagcgatttcctaatgtgaaatacttttcttgatggtatgagatcagtaccattggacatacacagtttattcagttggcctttggtaaaaagaagttctttggtatgcaaaaattttccaagtcacttcttgcaatattataaaatgtattacttgaataaaatgttgaactcat

SEQ ID NO: 380541 - DNA, 593 bp, Homo Sapiens
  misc_feature (176)..(176): n is a, c, g, or t
  misc_feature (523)..(532): n is a, c, g, or t
  misc_feature (547)..(547): n is a, c, g, or t
  misc_feature (573)..(573): n is a, c, g, or t
ttcgtgcacagcgagccagtttgcaggcactcaaacctcttctcccctcatgccactgagtctgtcagttgaatctgatagcaaatgagcaaatttaagaaagaaaaatcagtactacaacttacttaacctaactctttcaacttcaaactttctcacctgcaaaatggagggcnaaaactaattacatacctcatgaagtgcttgtgaggagtaacttagagcagattgaaagtttccttaagaggagtccagagcatttgttaaaagtactatgcccgtttaaggatcagtgttagatctgacagagtagtaatggccccagtcccccaaatggggtcacggagaagacaaatcattggccaaagcttagttttcagccttagtaatctaaaagaaaggagagacgtaaaacgtttagctcaactccttcatgtttaaataaaatcctgagtgacatagcatataagacctggaattggttttggaagtattgggggcatttggaagagttttccctccnnnnnnnnnnaactggaataatggnggcccaaagcttattcccttagtganggggtaaatttagcttggga

SEQ ID NO: 380542 - DNA, 477 bp, Homo Sapiens
gggttcagctttaattaccactcccaaccccgcctcccaaaaaactgaatgaataagaggtctcttggctaaatgcctttttcaagtagtgcttttgttgtgtctctgctgaaaagatcttgtcttccatattgcccagtagcaagatgctgttttgataaggtgggtaggtccaatctgtcttgtcttccttacaaaattattgtttgtatatctatgttcagtctgagtgttaataatttctttctgcaaatgataaccctcttgaacagccagaacttgagctagacctcagggtagattcctagcccatcgattagggcctgtgtctatggaggaggcacagtacacagtgggagaccactgtggagttgatgcagagatcctagtgctcccttcagcctgaagagaaagtgtgaacgctttccacggggaaacagggacctcaccaagaagtactccccaagagaaaaaaaa

SEQ ID NO: 380543 - DNA, 446 bp, Homo Sapiens
  misc_feature (17)..(17): n is a, c, g, or t
  misc_feature (54)..(54): n is a, c, g, or t
atttaggcccttttcanaatttaggtcctgggtgtgggtgtccgggaaatgttncaaccggttttaatatattgtctgattggggtaaatgtgattgacccacttgctgtctctgttgtattttggtatgagttttgatagctctataaaatgttttggaaatctttccatcttgttgcattatctagaaaagaatatagcatatagcgtatagatataggcttttccttgaaagcttgaaaaaaattcgccagtaaaataatctagcttaaagtgataaactaacaaacaaatataacgaacaactgaaaaggcactctaaattgtggctggcttccctttctgtctgctattgtatgaagaatactgatgtttacctgtatttgctttgctgtactaaaatgtaatgaaaaataaaagattaataaatgaaacataatgctaaa

SEQ ID NO: 380544 - DNA, 243 bp, Homo Sapiens
gttctaacagatagaattgtgttgcttaactgatctaacagacagaattgtgttgggcctgtgagctattccctgggccatttactggtggtgggggtgggggagtcaccaaaatgaagtagcaatataaacctgtctctgagcctccctcttgtctgtttcctcatgaactgtgttttcgggcacagagagtcttgcactcctaatttctttctgttagtccagcacagaacaggaatggga

SEQ ID NO: 380545 - DNA, 517 bp, Homo Sapiens
  misc_feature (24)..(24): n is a, c, g, or t
  misc_feature (33)..(33): n is a, c, g, or t
  misc_feature (63)..(63): n is a, c, g, or t
  misc_feature (94)..(94): n is a, c, g, or t
  misc_feature (390)..(424): n is a, c, g, or t
tagcaagccagccacatttctagnaaaattttncgggtttagcaaggccggcccttacacacngaggaaagccccccttccaacttctctgatnttgctgctttcctcgatgggaaaccctctgtaactgggtagaatgcaacccctgatgacccaggaccacaagtacttgaagaatattcacagtccactctgtcagcacgctgtcacccacgagggcatggcactccctgcacgaaggagagcagggtctcagaggacgtcaaaggcagatactggtgattgtaaggctaagggattagagctgaaattgattcttaagctgtagctcccataatggggatgaggggaaaaaatgctggaaatagaatgccactttcctccttaggnnnnnnnnnnnnnnnnnnnnnnnnnnnnnnnnnnnctgagacacggtctcgctctgtcggccaggctgggtgcttttcttgtactaactcacttatgaggtagatacttacgatttatgctcattttt

SEQ ID NO: 380546 - DNA, 423 bp, Homo Sapiens
gatttaactaaagggggcccattctggaaagaatgttctttgaaataaatgatggcagatcaagtgcatatcccatatggaaaaataaatgagtctcatattcttcctcacaaaatacaaaataatttatttgagattcatcatagaactactgtaacatataaaataatgttgcagcaaaaaacatactaaaatgcattttgatgttacagttgtcaaagattttctgaaggatacaaaaatcactacgcagcaaagtacatattcattattttgttctgattacaataaaaagtttatgtttatagagggtcagagatcaggaaagaaggatttataaagcacatagactacaagtaacgtctacacatagtatagagaatatggttgatgaatgagtaaaacgtttgaaggagcatttca

SEQ ID NO: 380547 - DNA, 446 bp, Homo Sapiens
  misc_feature (19)..(19): n is a, c, g, or t
  misc_feature (30)..(30): n is a, c, g, or t
  misc_feature (54)..(54): n is a, c, g, or t
  misc_feature (384)..(384): n is a, c, g, or t
gggagataggttatgaaanaagctatgtcncagggtgaatgtaactcaaaatantcacacatttaacaagatacttcaactgaatcttattttagaattattgtagttagaatttccttttaaagttgtaagtaggtaacattttatttgaagataaatttatatgatttttatattgtataatcgagtaaagaactaggatacaatgaagtctacctctatttaaaggaatgatgttgacaaatatataccgtgcatgtattttgaagatttcattaaccaaaatagaagaataagaattttctatcagcactgtttttgtttggaattaaacatttccatactaatataaatgccaaaaaataaatcaacttttacatttcnttcagttttaatagtgtaaggtcctaggtggaaagggtaagggatatgtatattaataaatt

SEQ ID NO: 380548 - DNA, 400 bp, Homo Sapiens
  misc_feature (232)..(232): n is a, c, g, or t
  misc_feature (244)..(246): n is a, c, g, or t
  misc_feature (259)..(259): n is a, c, g, or t
  misc_feature (261)..(261): n is a, c, g, or t
atctgattatgtacccatttatgaaaacaaacgcttacccatgggaattctgttctaaaatccagttaatgtagttcagttgttacattgcctttttagtgtgttaccaagaaaaaggaaaagaaataaaaataactgaaatattaggtgcaggctggctctaataattagaaagggtgctctagcatgttgcgtctcagtgtggttatccagtgaccaaggtatgtcagcncccccctgggannnctattaggaaatncncgaatcctcagggctgcaacccagacctcctgagtctgaatctacattcaacaaaaactgcaggtgactggtgtgcacatttaagtttcagaatagccaagtgcatgtcaaaacattaaaataaaaatcaggagatctg

SEQ ID NO: 380549 - DNA, 359 bp, Homo Sapiens
ggacaagcaatttgcatgtataagattacattacaaatacattattataagcttacattacattgtatacattatacatataatgtataaatattttttgtataagaagcaatctaacaattacttacacaattttaatgctttcataagattcttgtactaaatttggagaaatggagaaatctgaatattttatctatctcagtcagagtttaaaaaatgaatggtacagtgacctaatactttgagctcaaattaaattcaaggtttgctataaaattttttgcattttagcccagaggacatttaaccactttcaattaactacacatattttctcttctatagtacatactatg

SEQ ID NO: 380550 - DNA, 431 bp, Homo Sapiens
  misc_feature (290)..(290): n is a, c, g, or t
  misc_feature (337)..(337): n is a, c, g, or t
  misc_feature (373)..(373): n is a, c, g, or t
attgcaaaacatttgttacagaaatttcagaaagtttttcccgtggtatctgccaacttctgctctgaattgtatatctaaacaatcaaactcaaagtgcattgtgaatccaataatagacctttaaaaaagaacaattcttctaaggatttatatatatttatagtgtcgatagatatgcataccgtggtctatccatacacaaagaacggaaaagatgtatatatattcagcaaacccaatttttaaaaccattgtatttgtaggaattcatttaaaaatgatatctnaataatttccccccattataaactagggttaagaacgtttacaaatngagagtctagggtcctatattatgaaaagggctatngagtacagtatactggcacggtactggtttttacacagcggtacaggcaaatataaag

SEQ ID NO: 380551 - DNA, 437 bp, Homo Sapiens
  misc_feature (243)..(243): n is a, c, g, or t
ttcccatggttaaattatcctaaaggttattccaatctcctgagccctaaccagccaatgtagaaacggaacttttggcttttccaaaaggtaggaaaatttctcctcttatactatattcttgtttgattatttttaagttattgcggattattttccctttcttggttcccttttacagctttataactaattattttttgcctcctactatcatttgttaagatgctcacacatagaccntaaaatttctctaattcttgataatgtcttatttacaaaagcaaaaatgggagaagagaattaaagagctaaagagattatggtaactcatattataatgtactaccatttctggctctcttttctaaaataaagcaataatgtaggttgtgcttattcatccttcccaggtattaaaggtcactctgcaagag

SEQ ID NO: 380552 - DNA, 732 bp, Homo Sapiens
  misc_feature (21)..(21): n is a, c, g, or t
  misc_feature (55)..(55): n is a, c, g, or t
  misc_feature (70)..(70): n is a, c, g, or t
  misc_feature (138)..(138): n is a, c, g, or t
  misc_feature (180)..(180): n is a, c, g, or t
  misc_feature (328)..(329): n is a, c, g, or t
  misc_feature (365)..(365): n is a, c, g, or t
ggaacacaaccactttgatcncccaatcggaaaggtcaaggattctgggaatgcnaaattaggacccccntaactttctagcagatttcatcagtagctccaccatcctaggaatgactgtgttacaaattcaaccangaaatctgacattctaggttgtcaactaagaacccagtattnctggcagacccaaattgagaacccacttccttaacaaatcttgaagggctaaccaaggagttcagcattctggaagaataaacagaatcacaatattccagataatgggtgagacttaaagttctaaaatgtcaaccccaacactcannatgccaaaccagaaaatgagcatttaagaccatganaccttggcctcagcactctggaatgacaagcacaaagctctcccctccagaatgctgctttcctgcccctcagagctctgtggatggtcgctccacagcaggcccatcatcctgactggcatccggcacacggaaggaaacgtagggacaggtcttggtgttgaggcagaccagcttcttcagtgtggccgtcttgacaatgttaaagcccacctcgccgccaaatgtgctcggcttccagtactccggagaacagatgggattccctaggagacccttgagggaaaagggagccccaatctctatcatactctccccaaagatagagtttggatggcacttttcaagaagcagtaccaggtagaac

SEQ ID NO: 380553 - DNA, 449 bp, Homo Sapiens
  misc_feature (387)..(387): n is a, c, g, or t
  misc_feature (402)..(402): n is a, c, g, or t
  misc_feature (421)..(421): n is a, c, g, or t
  misc_feature (430)..(430): n is a, c, g, or t
ggcgacctgccccatccttggctctcagcttgccatgtgacgtgctttggtgtagggaataaggtggaagggatgatgtcctggttttaggcccggagtgggcctgggctcctgtgtttctgtatcattatgagagcatggctgggttcacctgcttttccagggggaggagccagtgggaacactgagatagccatggacttcttctctattacactatacccttttctaatctgtattttgactttgttgacaggtcctcaggtcaataaatattcttccataatatattttttggagatcttgccactacacttctgggaaacaaatgaacaaattacatttctatgtattattttctgcttattacattaaattaaaaaaatnacaaaccaaggaatngctattcagagtgggtagnagtggaatnctttctaaaatcaatgtta

SEQ ID NO: 380554 - DNA, 180 bp, Homo Sapiens
gtgatatttactcgtgtatttacgatttctgatgcccttattttctttacatacatccgtgtatccacctgttaccattttccttctgcccaaagtatttatcatctataccagtgaagaactgttggttcaactgttgtatgtctgaaaatgtgactctttttctgcctccattctgtg

SEQ ID NO: 380555 - DNA, 696 bp, Homo Sapiens
  misc_feature (401)..(650): n is a, c, g, or t
gctgacgacgggaacctcggctctgtgtacatttatgtgctcctaatcgtgggaacccttgtctgtggcatcgtcctcggcttcctctttaaaaggttccttaggatacagcggctgttcccgccagttccacagatcaaagacaaactgaatgataaccatgaggtggaagacgagatcatctgggaggaattcaccccagaggaagggaaaggctaccgcgaagaggtcttgaccgtgaaggaaattacctgagacccagaggtggtaaggaatggcatggacatctccgcctccgcgacacgggggaactgttttcttgatgatgctgtgaaccttttatatcattttctatgtttttatttaaaaacatgacatttggggccaggcgcgggttgcannnnnnnnnnnnnnnnnnnnnnnnnnnnnnnnnnnnnnnnnnnnnnnnnnnnnnnnnnnnnnnnnnnnnnnnnnnnnnnnnnnnnnnnnnnnnnnnnnnnnnnnnnnnnnnnnnnnnnnnnnnnnnnnnnnnnnnnnnnnnnnnnnnnnnnnnnnnnnnnnnnnnnnnnnnnnnnnnnnnnnnnnnnnnnnnnnnnnnnnnnnnnnnnnnnnnnnnnnnnnnnnnnnnnnnnnnnnnnnnnnnnnnnnnnagattgcatctcaaaacaaacaataataataaataataaaaacctg

SEQ ID NO: 380556 - DNA, 312 bp, Homo Sapiens
ccccagcccatggggttgtagctgattcaggaagttattaccttggtgttacttcaattttccaatttgcaattcaggttctccagcaatctgctttataaattccctatacatcattttctttactgaagtatctagtgtggattctatttaatatcttagcaacttggcatacctacctatcttcaggaggtcattgttacaggctaaattttgctccctgaaaaattcatatggtgaagccctaattcctcaatgtgactctatttggagagaaggcctttaacagaggtaattgaggttaaatagatc

SEQ ID NO: 380557 - DNA, 441 bp, Homo Sapiens
  misc_feature (274)..(274): n is a, c, g, or t
  misc_feature (290)..(290): n is a, c, g, or t
  misc_feature (414)..(414): n is a, c, g, or t
  misc_feature (427)..(427): n is a, c, g, or t
tcagtaatttagaaaactggcaagactttctaggtagctgcctgtgacatggagtccgacgaggcatggtcttcttgaagccaccgtggctggtgaaccttgggcctgtttcccaacttcctttgaaaggatttataaaagtgtggggtgaagaccaagggtgtcagactcccccatagttcttgtttaaaatgtactgaatacaccagactctgggggatgacggtaggtaatggagcgtacttcaggaacctataatttaaaaagctccacnaatggattccacctgncctgtgaagtttgaagaacacttataaaataccagctggccacaagcaaagggacctttttcaaactttcctggccctggcctttcaagtcacttgggtggttcctgtctcaagcaccaaaggnaccgggaaggatncaagtggttggctc

SEQ ID NO: 380558 - DNA, 405 bp, Homo Sapiens
  misc_feature (304)..(304): n is a, c, g, or t
gccctttggatgtggaggaaaacttgactgctgggaaggcagaaatctgtccctgggaggtgggtgctggagcaggggaggaaagggctttgggagctgaggccattaggaaatctccaaatgatacagtcaagggagctcttccttccagacatccttgtgtgcctcttgctagttttttagggggtctccccctcttcctgccctatctctcaccagtctccagagctcgtctcactggctcatttccttccccctagcttttcagcgctgccatcaacaggacctctctcttttgtcaagncaactggagtcaaggggaatctctggttctgatgcaagatccatccaccctcccccacccctccccgcccaagaatcattgctcagtaacaagaggcacat

SEQ ID NO: 380559 - DNA, 414 bp, Homo Sapiens
ttcaggttctaaagtcaaggctagggggcaatattagaagtcttttttggtcaacattaagccatagtttctaaatcagctttaggaggaataatgtatttggatattgatctgaccttttctttttatttctaagttggtttggcactgaaaaaggagaggtttgttatcagtccacacccctaatgccctgacatccatgaatccgttttagtggaatccagatctctaagaaagagatataaaatatttgttcctatccaactgtgattactgtatttccaactatgttgctgtcggtaaagtaagagtctgcatacatgtttctggttcatatatgcctaggggttccagagcattacatttcccatcaaaatgtagatcccgagaatgccagagagggtcaggccgagg

SEQ ID NO: 380560 - DNA, 549 bp, Homo Sapiens
  misc_feature (183)..(208): n is a, c, g, or t
gcagtggcatgatcatggttcactgctgtctcagactcctgggctcaggtgatcctcaggggccactgttttgaactgggctcctgcgctgggtcctagaagaccagacccaaccagaatggagtcactggtgctaatgaaaccaagggggttcactgatcaggtcagcctgccctgattgcnnnnnnnnnnnnnnnnnnnnnnnnnnccatgaagctgaaggctgtgctctcgaatgctgacgcccacccttcactggctctttatagataatattcacaggtcaccatgggactggtcgcttcaggaatgtggggcagctcctgtccaagcttgaaaccaagttggagaccatctgcccttcaagttggacctggtcccaagttggccgaggtggcctttttgatgttgaaaagggccaaaacttccaacctcagatcatgctaaggctggcggtttctgggtacctgtgtcctggtgaaatggccatgcaaccccggacgacaactgcacagaatggggcctgctgggaccaacctggctccggag

SEQ ID NO: 380561 - DNA, 705 bp, Homo Sapiens
ctgaggagtagtggtatttgatgtacgtacatcgctcaatttctcctttccgaatgagggcggcgatctcggggtcgaagccctgccggtggcacttcctccagaggcccatgttggtggagttgtactgccggctgcactcgtccgcggggctcatggcgaacagctgccggcgattccgggcccggaggagtttgccctcccagcggtccaaggcgcgagcggctcgcccggagcggcaagttgttgttattgttgtaaatgaagccggggtcgacccggcgggtgttgaaggccttgcacctgtccctgtgcttcctggcgtccgtctcgtaccagtggtccgagcagatgtgccacggccagcatgccgagggcgcagagcgctagcgagaggccagtgtagagcagtaaccttccggcagccatgcctccgcttggcggctacaccatgggcatgatccgccgcagcctcgccttccctcgccgcacccggaacaaagcggcgggcggccgagctgggggagggggcaggagagggactcgccgcgcgccccctcggcccccgctaccggagcacggcccggggactgcggggatgggggcgggcggcctaaaaagttctgatccggagaggtcccgcgggctcctggtcatcctctgaggcaggtgccatccggcggcggcgaacaccagcgcggtccc

SEQ ID NO: 380562 - DNA, 972 bp, Homo Sapiens
  misc_feature (303)..(342): n is a, c, g, or t
tttccagccagacagagcaggccaaagggaaatacaggcccatcctcctctgaaactcacatctgagcatgaagcatggatctcctccttccttcccagcagactatgccttacatttctcaccccacccaccccatcatctctgcagtggttttcccgggacagatgtgagaccaagaccacggagacagagctgagaggatacccaccccaaagctgcacatcacgctcagccttcaatcgcctacccttagtggtgtctctgacctaactcctttctcttttcctaaggactgagtgacnnnnnnnnnnnnnnnnnnnnnnnnnnnnnnnnnnnnnnnncgtgacaaaacgggaagtattaggtattccgttttctttcccatcacacatcatagcctgcttttggctgcttccaaacaaaacgggaagacaaaacccacaaggtttttgatttatcgtattttgccaaatcaagcatgtttcattaagcagttcttatccctgatgtgtcatggccatattttctaaatgctaggttctaaattatattaatgttttttaggggcgggtgggcaagacgacccaaaccatcttagcttgccagttcagacattttttaaaaagcatgcactttgttaaactggtatgcgctatcaacaaaaaaactagaaatggaataatccaaagccaataacattaacttataaaagacatttttaattttgtcacctccagttccaacaatttaccatgcaactggaattgtcaggggaaacgggaaaattggtggaaccccagagtatctatttccctcttattgatgattttgtgcagcacctaccctgcataaataagaattatagtgttggaatgcttgggtgagaatgggtattagtatgtggctgtggttccttttcctcatgaaaattgacagggcattcctcattaaaaatacatatctatttcaag

SEQ ID NO: 380563 - DNA, 501 bp, Homo Sapiens
tgaaacctcactcctaccggccgctcatgctgaggagagcggaccgggacacagcagcggacccgaaagagcgcagactcgggacgaaccggccgctctgccccggacacagcgacctcgggccctccccgcaaacactcctttggactcccagattcgcgtctccttccgccggcgcggcggggcagcagcgcgagagggtcagcgggagacgaaaaaatgaagagggccgcgggaaagtaggcgacacgtattcaaagcttttgggggtctacctttgtattcgttgctccctcagaggtggaggtgaggggaaagtgaagtgtagtggttccactctgatcacaaaataaactcctgggttgacgcctcacccgcggtttgatgttcagagcacacagcgcccgccgcctgagttagcctgaattagcagtcccgcagtaacagcagcagagcaggacaacacttctactgaaaactaagccccaaagtcacagcaga

SEQ ID NO: 380564 - DNA, 644 bp, Homo Sapiens
taagtccaacgggccacatgcagacttcactgtaggcaggttgctctcctgctttgattcctgttttgtgtgtaaaattggcataaacttcttgattgcagtgaaatcacaaaattctatatcggggtggtcaacctgagaacatttatttgaacctcttagccacatttccagcagggcaaaccaactgatgccctggaagagtcttccgcaccctctccaggtgcactcggcccagtcctgccgccgtgtccaggcgcccctcacccccacacctgctgcatggctggccacaccactcagtgcatggcggccgatgggcagccaacccaaacccgcgcctttccttgttccactgcagactcagatacagatgcgaaaaattccttcttccaccgcccttctcgttctgtaaagaaagaagtgttaccgttttcacgtcctattaatgtcctctggttgttaaattacagcagcacattacagtgcactgggttccctcctggagtgaatacaaacggagggcatctacttgtatttttagaagttttgggagaatttagtgatttgtggctttgatcaatcctgttgactggtgtatgtctgcgcaaacctgtttcaaataaatcttttgttaaagtaaa

SEQ ID NO: 380565 - DNA, 248 bp, Homo Sapiens
  misc_feature (203)..(203): n is a, c, g, or t
ccatgatttgtagatgtgtgcaagacacagtactgctatggctaataatggtaagatgaccctaataatgtcctctccttgaatttttatataataatattttctgagtcataactaattttttaaataatgatttccaatctaattattaattagaattttgttgttgttgtttgagacagagtcactctgtcacccaagantcgtgccactgcactccagcctaggtgacagagtgaatccgtctc

SEQ ID NO: 380566 - DNA, 354 bp, Homo Sapiens
  misc_feature (38)..(38): n is a, c, g, or t
gtaacacttttcttttgaacagacaagtgaagtgagtnctataaaagcccggtctcctccctcatgtgacctgcaccaagaaccacccaggggactggagtcactgagtcacaggagcctctggaaggttctcatgaccaagcccttgagactaagaatctgggtggcctaagctggattggattaatcacccaacgccccatcatgggaccactgactgcaaaaccctcaaagctctacactcttggggtgtgagcagaaacagacacgtgcttaccactgctaacaggcatcagtaaatactatttaaatacatgcttgatcatcataagacattaaagatgttaaagaagt

SEQ ID NO: 380567 - DNA, 629 bp, Homo Sapiens
  misc_feature (127)..(184): n is a, c, g, or t
ccagcctgggtgacaagagtgagactctgtctcagaaaaataaataaataaaatatatatttttttaaattgaattaccacctttggtgggtattctaacagaacttgctgcagcaagtccaaagcnnnnnnnnnnnnnnnnnnnnnnnnnnnnnnnnnnnnnnnnnnnnnnnnnnnnnnnnnntttttccctcaatacaggaagactttagtggagtcaaaatttcctttgtgttaaccaggtttctgcaagtgaaattttctctttatgttaagcgaaagcttagcctgaaaacagaaatgtgaagaggcttttttagacaagttcaaaacatttgcctcagttgaaagagtcagtgtcatgaaacctcagcagtggtcctgggaggtgccacgttatggtttggaacttaatgaaggcagcagcattgatagaaatttctgtcaaatatcaccaaagtcataaatgccgtcactctaagaagaggggtttatttaactttagcatggatgtatccagcctctgaaatgggacaaataagccccgccccttctaggtactttgacaaaaacaggaacacaataaaagagcagacctctggaggctgaggcaggagaatcacttgaac

SEQ ID NO: 380568 - DNA, 420 bp, Homo Sapiens
gccactgccctctaatagatccagaatcctatatccaaaacccttaagggccatgtgtgtttcagaattcagtattttttaaatactaaaaagttagtgtagtatgctgaacattatacattatttaagactctaatagcatcccagagttaaaaccactagtgtttctgcagcagaatgcaaataatcacattaacagctaaatgaagattataagatgcttcatcggttcaggttttactaccatattagtttgtttcaaacataaaaaacacacttaacattttcagcactttttaggttttggaaatgaggatagaggaatgtggacctgtccatttattatcttcattttaacagaacaggaaatatgagatctagagagaccctgggccacagagcaagctctgtctcctaagg

SEQ ID NO: 380569 - DNA, 379 bp, Homo Sapiens
aaaaaatgattatcagaaaggtaattgagctttgtttaatgtaatagttgggaatctcagggatgaaagaaaacaagattagaggctaccatgaatatctaatgataaaaccctgtaatagtaattgagtttccattcttttgaattgtaagactattcattaaaagagtatgcaaagattacttctatggtgttggccatcagtatttccttacttgtgtctgtatgtaagtcctgctatatgatgttcatttcagtcaagggtatggtaggtctaactctctgtattaacgtttttttcccgtatctgccagttttgaagcctgagaacagcaatagaaattgccatctttttcttgcttttatctcttggttaaaa

SEQ ID NO: 380570 - DNA, 501 bp, Homo Sapiens
  misc_feature (1)..(1): n is a, c, g, or t
ntgtactggttcagctgaagtgctgttaaaagattgaacttcttccataccaattcgtaaataggcactgccctgagttaccctctgacaccctctgactacccaggcccctcttctagagatacctcccacaaaaccttcccatgattcagcagcaaaagtcccccttacacaatatggcgattccaggaccctgttccagcacagccatctgcatctattctgactggcaagtgttcatgcggtgcttgttatttaaatattctgaatatcacctctgccacagccattaaagaaatggaaaaaatgagttaaaaactacctacagtactaataaaagagcaggtctgtcagttttacaggtgacttctaccaaatattgcaaataagagagaacattctaattttattaaactgatcagattattgaaaaagggaattcttacatcatgtataaaattagtatgaccttgatacccgaacttaacaaagataatatta

SEQ ID NO: 380571 - DNA, 701 bp, Homo Sapiens
ttactctgtcttgttctctagcagatgagtttgtctcatgcttttcactttttaaatgtcttttaaaatagttactctctctcattctgtagcagatgagtttgtgtcatgcttttgtgtctcttacccattagctgactttgggtgtgataagtgactaagactcctcaaactttgaacaaggaatataccatttatttatgctgtatgcatgaagggaaaagagacgaatatcaagtttttctggccaaccaagaaataaaactttaaaagtgtttattttttcaggaaaaaaaatcacagatactacttaaatattattaccaggacaacaaattagcaaataaggcaagttagaaagcagcattttcaaggttaaaggttgcactttaaagctttaaccatgacttctgaagggatcacacaaacatctttaaagacttctttgttaatcagaaaacattttacatgcaaatttccacactggagagccgaccgagatcaatactttcatgattattcccaatttactgctttatcagaaagaactttactacgaagcaagaagtgtctactcttctgtgaaggagtaagttttctccttgtttctgaaattctttattctagctgaattctcaagactgagcagtgaacttccattggttagcaccaaatagagcaagcctgagtaagctgcttat

SEQ ID NO: 380572 - DNA, 681 bp, Homo Sapiens
tagtctccgagtctctgcgaggacccactgcacggcaggagctagtctcagactgaggtgagttctcggcagcagaaggcaccaccgcactcccaagggctaaaggtttaccctgcacctctcctactgaagcttgcagagggttggcatggcagccttcttcatcataggagactctaagactgctacttttggctcctctgggttgtgcagcttgagtggaagagcagatcctctcacagcctagacctcctggccagccgtttcttgccctagactccactccgagtggcagtctcccaagctgtctaataggcgtatgggagaagtatcagcaagtatgctacttctaatgtcccaggtggtgcacccagcactgtgcctcttccctagtgcagctgaaggaaagctgccactgcctgtgccttcctttacaagggttgtcctggcatgtgtcagaccactgggtcccctaacaaccttgccaatgtgccagtcctctgaatgtttctggctttagcccctgcccttggcttgcacgtgtcttcttcctaggacatccggggtgcttgtgtcatatgctggtagcataatgtcatcaacagtgcaccagtgtgctgtgcaaactatcccgagacagcctgtatgcatgcaaaatatgctcaaaagtacccaaggccg

SEQ ID NO: 380573 - DNA, 807 bp, Homo Sapiens
  misc_feature (229)..(531): n is a, c, g, or t
ccacgcagcattctgttctgaggggtacacaacagaggtgtaagagggggtgtggctttcagtcgccataggaagggggccgcacctggagtcagctgagcgctgctagtggacccacgcgagatggtttagtccaggaagctcataggagagagcgtactggagaaagctgcagggacataggtgagactcactttgcagttttactttctgctatatgttttctttnnnnnnnnnnnnnnnnnnnnnnnnnnnnnnnnnnnnnnnnnnnnnnnnnnnnnnnnnnnnnnnnnnnnnnnnnnnnnnnnnnnnnnnnnnnnnnnnnnnnnnnnnnnnnnnnnnnnnnnnnnnnnnnnnnnnnnnnnnnnnnnnnnnnnnnnnnnnnnnnnnnnnnnnnnnnnnnnnnnnnnnnnnnnnnnnnnnnnnnnnnnnnnnnnnnnnnnnnnnnnnnnnnnnnnnnnnnnnnnnnnnnnnnnnnnnnnnnnnnnnnnnnnnnnnnnnnnnnnnnnnnnnnnnnnnnnnnnnnnnnnngaaaagagaaaagaaaacaacatgacatttctataacttaaaaacaacaaattatatttgtatgggttctcttatacatattgatgttctctgcccagtgagaacacagggtgtgtggtagattgatgtcaaaaatatggttggatcagtcttatcaggcagaattggaagtttctgtgtcagaccatgggaaataccataggccattgagcagggaagctatggtgagagtgctgatagaaatgatttggcaagccgggtgcggtggcttcactc

SEQ ID NO: 380574 - DNA, 408 bp, Homo Sapiens
  misc_feature (292)..(292): n is a, c, g, or t
  misc_feature (306)..(306): n is a, c, g, or t
  misc_feature (326)..(326): n is a, c, g, or t
cctttgctatggtaacattatgaaagctgtcttcacactgattgagccactgtttaattgaaggtgacatagcctatggactagagacagcactattgcattacaggaaaaaggttattcacagagagtctctctggacttcttgctgagtctactgtcatatgggaaccaagaaatcgaattttgaaatatatgaaaacagctacaatagcatagcaggatgataggtataagtataatgtcaaacatccttctttttaccatccattcactttttgctgtactaatttanaagcaatctcatgngctaaaaagctaaaactcantactgaagccctaactaggaaggactgcccaacgttgagtatttctgagatcagaaaatttctgtactaatctatcaaagac

SEQ ID NO: 380575 - DNA, 717 bp, Homo Sapiens
  misc_feature (668)..(668): n is a, c, g, or t
agaaaaacctcttcacaacgagctcctgtatagttttcaacgcaccttcccaggcttcaggtctcaacaaccttctaatgcagggaaaatctcatgcccaacttggaataagacaaagagaagccagcatcagttcacttcctacaaaatgggctgggaatagtaggtatcacataacaaagccccccattcaggcaaaacgacttgtgactgggaccacagggctcttcgtgatctgttggcatcttaatttgtaaatagtttcattcttggtcaagagagtagggttgaaaaacagtaccaagaaatctcttgattataatttgggtttcccatctaggtccaccacctgatctgtccttggatgaaaatttttcctctaaattgcagaatagagaggaaactggttatcttttatggttcaccactatttcttctgctttaatagaatttgtggccacttcaaatttgatgctggttctttatttttctgattcacttttagtgtgaggcagtgaggcaccagcgttgaatttaaagtctctgaatcacactgcccaagtttgaatcttggttccttactagctgtgtgatcttgagcaggctacttaatccctctgtgcctcagtttcttcatccacgccacgaaacccgctctgcgtggcagnccccggagacagccgagcccccgcctccgccccctgcccagctcaggcc

SEQ ID NO: 380576 - DNA, 640 bp, Homo Sapiens
catccaagaaggctcattcacgtggctgataattgaaactaacttctttctcactcaggtgtagtaactctgttttgggggcttatttccttgcttgcttccatagatgggcctatctttcttgccagtgattggttcaggcctaagccaattagtgcatagttttcccattggtcatggtagattgagatatggtttaataaaagtgactttgaatacttcatttgatggttgcagcaaacaagctttctctgtctttactcggaggaaccttgtttggctgatcatgaacacctcaaaatcatgagggaaagccagcctaagtagggaagccaaaaaagagacaagtgtggagctgaaggaattgtagggaaatagagctggagccctagacaaagaatgcccgaatctcccctacttccaaatacttcaggaactgagccactacatccacttaattgtttaagttagtatgggttaggttttctgataattacaggagaaagcattctaaccgatcgacgcagctaatataaatgaccaaaaaaagggtgaaataaaaggatgagattaacagttgctacttatgaaataaaagagaaatagacaaatcttcaaaaatgtaaatcaatgaatcaac

SEQ ID NO: 380577 - DNA, 726 bp, Homo Sapiens
  misc_feature (224)..(331): n is a, c, g, or t
  misc_feature (359)..(424): n is a, c, g, or t
gtagcattaagttcaatgcatagtgtatcttttcatttacatctgtttagtaatgtacaggtactggtaaatctgtttaggttcatttacactgactgtatgttgtgtttataggagtcatctggctggaatctggcaggcatgttctctacacttctgccatggagtaacaattctattttattgttctaaaactctccaggagccaggcacagtggctgatnnnnnnnnnnnnnnnnnnnnnnnnnnnnnnnnnnnnnnnnnnnnnnnnnnnnnnnnnnnnnnnnnnnnnnnnnnnnnnnnnnnnnnnnnnnnnnnnnnnnnnnnnnnnataaaattagcagggtgtggtggcatgnnnnnnnnnnnnnnnnnnnnnnnnnnnnnnnnnnnnnnnnnnnnnnnnnnnnnnnnnnnnnnnnnntgcagtgcgccatgactgtatcaccacactccagcctgggtgacagtgcaacatcctgtctcaaaaattaaaataaaaccctccaggagaaatacccagcattccttacagggcaggcggttctctgggttcttcacctaaaccgctaatattccatctgaccctgtctgctatggttttcctgcttatattttctctggattttttcccctattctttactgattttagttactcttagaagagctttgcaagttttctacaacaaatccaaattcaacattactttaatagaattatgtg

SEQ ID NO: 380578 - DNA, 540 bp, Homo Sapiens
gaggttgacattttaacaataaacattggatgagtgaataaacttgtccttaagccgtaaatctgctgagtggatgtattccgtaaactaaaccatagatagcatcagatgctgtttgaatctgaaattatgtgtgtcatctcaacatgcaactagatagtagattcactgccatatccctgctctttctttccctttacagttttatactgggtctatttcagagacctaatggtggtaaataaatagtaaactctcagtgttacagctcatggttttccttccctgtagaacttgtaaacaaaaggaaaatggcaaggatctattgaagggcgaagttactgttaagatctactgtgctgtgtcaaatgtgtagcactccacagtgattaaacaggattgacaattatttttagctcagatttgttcacagcactccatagaagcaaaagttgcttttctccattgtcttccaaaacgcttagcacaaaagtcgcattctagtggagaaacaaactgtaattttcttacttgaagtag

SEQ ID NO: 380579 - DNA, 251 bp, Homo Sapiens
accacatctggccttgttccaattttatttaagtctagtcccaccaaaaacagtccaaaatgtctccaggccagacattaagtttgtcagatatgttccatcttgttaatttaataataatcttctagtcaacttcaatttagtagtacattataaatgaaaatatcagattaatctttttctcctcctaagaattaatttgctctaagaacatcaagctggtgtcaatgcattacaatccaacacttgca

SEQ ID NO: 380580 - DNA, 371 bp, Homo Sapiens
ctgtgcgttgtctcatttaatcctcagggcaccctgtgaagtgtgttactatcatctccactctgcagataaggaaactaaggctttgagaaaccagcccaaggttacagagaaaggcagtcgggccttgaacccaggtggtctgcttccaagtctattgaacttctcaggaatatatttctggtagacacaggagacattaaatttagaaaatcattaaagtattaataatgtcaacatgaggacactcctctaatctattggtcttccctggacatgaaggaagcggtggattttagcttggtgtatttgtatcactttccccactttactgcactccagcctgggtgacaagagcgagattccgcctc

SEQ ID NO: 380581 - DNA, 766 bp, Homo Sapiens
  misc_feature (154)..(176): n is a, c, g, or t
  misc_feature (270)..(640): n is a, c, g, or t
gaaccttctggggacaccaccactctcactttcttaagtacaggattatcaacaatgttgctacttactagtttggtctagtccttatgccatagagcattcattgcccaaagcaggaggtaccataaggtcaataaaaaacatggctggtctnnnnnnnnnnnnnnnnnnnnnnnggaaggcagatatgcagtttgtaagccatgtgactagtagatctctataattatgattacaattaagatcattttaatagggaagtaaagaagnnnnnnnnnnnnnnnnnnnnnnnnnnnnnnnnnnnnnnnnnnnnnnnnnnnnnnnnnnnnnnnnnnnnnnnnnnnnnnnnnnnnnnnnnnnnnnnnnnnnnnnnnnnnnnnnnnnnnnnnnnnnnnnnnnnnnnnnnnnnnnnnnnnnnnnnnnnnnnnnnnnnnnnnnnnnnnnnnnnnnnnnnnnnnnnnnnnnnnnnnnnnnnnnnnnnnnnnnnnnnnnnnnnnnnnnnnnnnnnnnnnnnnnnnnnnnnnnnnnnnnnnnnnnnnnnnnnnnnnnnnnnnnnnnnnnnnnnnnnnnnnnnnnnnnnnnnnnnnnnnnnnnnnnnnnnnnnnnnnnnnnnnnnnnnnnnnnnnnnnnnnnnnnnnnnaaagaaggtttcatcttacagtgtagtagtgaaggctcttattttgggctcacctctggctggtagggaattagtatccacacaagcaggtcaggcttattaaatcttaagcaagacatcttgggc

SEQ ID NO: 380582 - DNA, 393 bp, Homo Sapiens
agcaaatatagagggctgtaggtggcattgctttgtttagcatgctcccagcccaccctacttggaattggggaagaactggattcccatgtcaggcaccatgggtaccacggagctgtagtcgcctatcaactgggcagctgattctggactgggtgtcttatatcaacgacaagtttaagaacagtgattaattaaactgcccctccatggttccctttggtatctggtggtattggctcctcccaattcactacctgctgtatctggaaccatagaagacctcaggatagacatctaggatatccacagttcaacttgagagtatatttctctgaaaaaaagctttgatgttttgatgcatatagtattaaacctcacactgaaacctga

SEQ ID NO: 380583 - DNA, 507 bp, Homo Sapiens
  misc_feature (128)..(154): n is a, c, g, or t
tagaaatgttcaattcatcatgcaaaaatttttacataggtagacctcttcactatcccaagtttattttatttccatctacgcacactcattcaaaacatgcatgcaatgtatgtaggcatgcatgnnnnnnnnnnnnnnnnnnnnnnnnnnntcctcagtacatgaaaattaaagctaagtagtcataattggtcaccttttgccttataatttggattttaggaaaaataaccctctcctattttcctccttttgagaaaactgtagagaaatatattagcattctcaaatgtattggcctcatgtattttctttcttcccttgcatgtaaaccttgtagtcttgccaaggttttctaatatttgcatgtcaaacacagattacaacccccctgggctggattcacactggcctcttggctttttacaaaacgttgcatagccttgtcactagcttgatgttaaagcaaataatgctagcatccttagtaaggcctttgccctg

SEQ ID NO: 380584 - DNA, 340 bp, Homo Sapiens
gggagcgatggctagagagatgatcagaggaagtatttgtggggcccagagacctagctctgggggcacctcaaggtgggaccagcccaaagccttgttttaaagcatccctccagaaatctctgcttatgccaggtgccaggtcattgcaaaatccacacctgacccaaagaagttcaagatcttcttcccactgtacaggaaaaaggggggtagtttataagaaagcagaacaaaattcagaaactctggtcccctatctgtgggcagtctcctgctgcactttcaacccagcacctgtatttccttcttacaacaccagctcgaagcctgaaaaaaa

SEQ ID NO: 380585 - DNA, 553 bp, Homo Sapiens
tcaaaactactcattgtacagatacagtgcagggtttagttcgtatggtttgcgctgggtattttctggcaaatctgtgcattgttacatttctatagtccaaggatggcaattgatttttaaaacacatgctgcaactttatttggtctgtaattacatggactttatttggaggtcagtgaaggaacaactaaataggaaaatgtagtcttcctcccttgtgcaatgaaaccataaaagttggcagacagaaaggaatgctaaactttttcccagagctctgagtttggtttccactggtccatgttccattgggtgattagagaaagcttttttaaacccttacttcagaatgatcttaattggtgcaaggttgagccctttctaggaggggagggaaaaggttgaatagccttttcaagtcacatgaaagtttctaggatgaatgtacgataattagattaataagtagcttaatttatcacagctgaggatttcaacagccacacattagagcaagaaaaaaagattagtgtgattctagtttgtaaa

SEQ ID NO: 380586 - DNA, 608 bp, Homo Sapiens
tgaagggcttagaataacatgtggcataaggacacattcaatatgtgttatggtctcttactaaaggcataccgatgttaagacttagttcaatgctttcctcttaaaatttccttgactatccatttctataggtagaattaactgctctctcttttgtagccccatttaagagagcatctgctgctatgataacatagttcacatcttatgacacttgaaaattgcctgctttttccttctatataactgcatatcctagagagcaaatatcacacattcattggtggatcttcaacgtttgatcgtcgagtatccactaggtgcttactaagagctgtgtagtgcttaagagtgagactgtggagtcagactgtgttggtttaaatacaggtatcgcttcctactgaccatgtgattatagccaaaatatttaatctgcctgtgtctcagtctcccatttgataaaataagaataattatgtatctgcatcacagggttgttataaaaatgaaattaatacatacacatacagtgattagaacaggatatggtctatgatgagcactcaataaatactagtttttaaaacgatgctgtaaaattg

SEQ ID NO: 380587 - DNA, 730 bp, Homo Sapiens
  misc_feature (518)..(589): n is a, c, g, or t
gagtggtttggcgtgagtgtcatgttgttaactaagaaatggtaaatgacagtggtgactgatgaacggaaggaaagagcatgatatggtggcaagaataatatgtatacaagtataaacaagaaaaatattaaatcatgttatatcaagtattttccagaaatacaaatatgaaaaggaagaattcatcattgtgatctttaattttgtggtcttcattgtttggggacaatataattgtaactcaaattatgctgcgtcaaatcattaaattaatacatttgtatatgcatgctcatatatgcacaaattgaaatatataaaaattcaaaacacacttgggtaataataaaaatctttaaggttgccataaacacaaacacacatacacacaactaagcaatcaaaaaacactagagccaggcacagtggcacatgctcatagttccagccgaaaggagaggttgagcccaggagctcgaatgaagcctggacagcataacaaaattccatttacnnnnnnnnnnnnnnnnnnnnnnnnnnnnnnnnnnnnnnnnnnnnnnnnnnnnnnnnnnnnnnnnnnnnnnnntctattaagactttgataaaatttaaaaatgctataaagacacaagtgttatacattaaggatgtaataatttgcatataggttaaaatgcaatgttttaaagaagataattcaaatagctagttctttgaaaagatcaat

SEQ ID NO: 380588 - DNA, 373 bp, Homo Sapiens
cataaatacagagggttttcagaaccacctcagagaagatgtttaaatcgctgacaaaagtcaacaaggtgaagcctataggagagaacaatgagaatgaacaaagttctcgtcggaatgaagaaggctctcacccaagtaatcagtctcagcaaaccacagcacaggaagaaaacaaaggtgaagagaaatctctcaaaaccaagtcaactccagtcacgtctgaagagccacacaccaacatacaagacaaactctccaagaaaaattcctctggagatctgaccacaaaccctgaccctcaaaatgcagcagaaccaactggaacagtgccagagcagaaggaaatggaccccgggaaagaaggtccaaa

SEQ ID NO: 380589 - DNA, 761 bp, Homo Sapiens
cagaccctgggggatgtgagggaggctttctcacgcagaccctaaaacggtgagcgccagggagccccgcctgcttgtcccctccccagatccctcgggctctggagaccttgcgggccccctgtccgtgaccacctgaaacaggtcctggagctgctactgctggttaggctggttggtggaaaggatccagggctgttgtgaaggccttggggagtccagaagccgcctggcaccttctgggtccagacgctgcccttcagccctgccatttcagccagcctcagcgtcgctgtagaggcaggccgccgtttctgccactgtctggctgggctgggccgtgggagtgctgcccaacgtgccaggcagggaggacctgaattcctgaaggtggtggtggcagctgttagggtccacaggttaatgatctccaacgtcacacagaagagaatgtgctgaggtgtgacctccctcaccctgccttggctgcgtggggcaccgtctctccaggactcaccctgccccccaatagactgaagtctgaagatcagcccagtcttccttcaggcctcaatgccctctcacttccccagcccgagggactcctggctcttctcggaggctgctctgtggggtccctcccttgggcctttgctaatgctgtgccctctgcctgtgccagaggtcgcctgggcccgtttctcagggagctcctgaacaccaagaaattgaattgctttgtaaataaacaaaaagtgcca

SEQ ID NO: 380590 - DNA, 398 bp, Homo Sapiens
tgttaccaatctgaagtgggtcaaattattgtttttagtatgatttaaagtgtttgtcaaaaatataaaagttttgaaaacaagctggggaagtgaatttcaatatcgcattaactaagatcaaagtgcaattcatcaacctttgttccccatccagcaccctgtgctttctctactcagttactcactacaccctgctggactaaaagggtcctccagcattttctttcttacacagtgaaagacattctcttggcattaataaatgttcacttaataaataaaaagggccgggctctgtggttcctgcctgcaatcccagcagtttgggagccaaggcaagaggatcgcttgagcctaggagttccagcctaggcaacgtggcgaaacccagtctc

SEQ ID NO: 380591 - DNA, 488 bp, Homo Sapiens
cgccctgtgtccctgggttctgtgctcttgtgtgtggtttgacactattccagtgcgtggagaccctgcctcctcactgagaccttgcaagaaaaagaacctgcagtcaccccaaggaagaggagtctcggctgttccctggaggctgacccagccctggcccaaaggctgacccagacccaaggtaaaggcccacccagacccaaggcccaaaggcccagctctaaggtccaaaggggctccaccctgttctctagccggactcagtctctggcaaggaccccggctgccagctgcactccctagacgcacgtggcccaccccctccttccagtaccggagccctaactggcggcacccgggcacccttttgactcagagccacgctccacgagggggaccgatctgctcacttgccccgtcctgggggtaccagagtagccagcgcgacgccttccgcacctcgcctaggctgcccttgtgcggcc

SEQ ID NO: 380592 - DNA, 673 bp, Homo Sapiens
tttttccttgtgatttcagcaacaagcctcctcctgggctctgcctgaattttgtccctttccccccacagtccccatggaaacgggagttacgcagacaccaagacacctggtcatgggaatgacaaataagaagtctttgaaatgtgaacaacatctgggtcataacgctatgtattggtacaagcaaagtgctaagaagccactggagctcatgtttgtctacagtcttgaagaacgggttgaaaacaacagtgtgccaagtcgcttctcacctgaatgccccaacagctctcacttattccttcacctacacaccctgcagccagaagactcggccctgtatctctgcgccagcagccaagacacagccttgcagagtcaccgctttcctgtgcagaaaccttaggggccctccaggaagctgtgggggccaccaaagccttcggtgaacatttcctgcaagagccccgacagaagattcagaacatcatagcacctgctcattcatccatgtggcaacgttacatcctatgctcatatttagagtgtgggttttctttagcgtgtgactctgccctgttaactgatttgaaaaatgataaacacattcagatctagtctttttaaaatccctttttaaattgtaaaataaagcaagcatgctataagg

SEQ ID NO: 380593 - DNA, 577 bp, Homo Sapiens
attcggcacaggcttcccgtgtgccaatgcgattttctaaaagaaagaatacgtggattaagtaatgaaggtatcatttcttctgtgtgtaaaatgaacttatgtggctaaaatatttgaagttgaagtataataatagtctttagtctaaatctttccaataagtattttaaaacatatacttatactaaaaagatacatattctactgaggatgactgcaaatatcagtatgtggatggttaaagggaaaggatctcatatagcgttcttgaatgctgtggccattgaatgtttcaggtcagatttttgtttgccaaaagcattcctattcaatttgtattttttgtaaatgcacttactttaaaaggtacccaattcctgtcttatttactgtttcagcatattaagctctgaaatatagcattttcccaaactttctcgtggttttctattttctcgaagtaaatgacatatttaatcttctttaatattacttgggaaaacttattagaaaacaaaaaatcattttctacttcaaaacgtatctccaaagtgtacactgttaactttgcact

SEQ ID NO: 380594 - DNA, 546 bp, Homo Sapiens
cttcaacatacctctttggagaagacacaattgaacccactcccaggatttagggcaatgggttgaacattgaaggaacagggtaaactcttaagttaaatggctgacaaccaagccctgtcctgctcctcatgtcattatgctaaaataatgttatagtctgagcttgcttgactagtagaccatgtcctaccttctcctcataaatacacagtctatgaaaatctaacaaaagcatatatagtagatattaaattgctcctaattctactcctgtatttacattatttctgggttatgtggatacactttagctaacatagtattgctttgtctaaagaaaataatttggttgtgtttgctttgtcttcttaaaaactttgaaagatgcttcagctgcctcgggttatacttcatagcaaaaatagagtgcatgttattatatgaatatattgtggaaaattttgaatgcacaaacttagtgtgttcaacatttattttgagtgaatatttgacatattaaataaaactctctggtgcacaaca

SEQ ID NO: 380595 - DNA, 459 bp, Homo Sapiens
gtggggagcattgcagggaaggtgtgaatgtggaaatgggaaaaaccaagacaggtgcccctcctctttcaccatattgctaagcagactaaggggacattcctaatctcaacttttctccctgaagaaaagtttctataatttccatcctgcccacataagggggaaaattaagggtctagcctggggagaggacaggggtggttgtgttccctgagtcttgtctggggcccatctccccattccaggctaaggtctccagtccctttctcacccctccatgcaacttctctcccatccctctgatttctgagaccctagaaacccctgtcccatgcaggcacttcctcctctctccatttccccaggacccaggcaagtggggtggggagacactggccttctctgctctgtaatactccactgtgaccatgaataaaatgcccttgcaaactgtca

SEQ ID NO: 380596 - DNA, 147 bp, Homo Sapiens
aacacaatcctgaaatgaccattgcccagtcaatgagaaaggttgttttctagttgtttattaggtgagaaagcctggtaccagttactgtgttcatggctatgatataacaatttaattttgtatctgcttctgtaagtagatttt

SEQ ID NO: 380597 - DNA, 850 bp, Homo Sapiens
ggaattctgtgcagcacagcccaggtgcaaggagatgagatccacatcagccaagtgcctaaaagcctcattcctacaagagccattatctgttggggtgacagcaacgtaggcataatttccagggtcttcacaaaggccatggcagttacaaattcaccacactcaggaagaccccaagtgtgacttcctatcaaatatatacagcttatgtataggccttccagtgttaatcatgggatttgtgttaccataaacaacactggttagcagcatagccaacctttaacaggggaaacccagcgtggaaatttaaatgaaggttcaaattctcatgcagaagggaaaaggctatcttaactctttactcataaatatgttagaagttgtccacttccatgcataacactgcattattaacaatgttgtcattgttattcatagcttctgtttttgaagatgaacatttatgtaaagctttgtgctttatccgcactggcatgttatataaatcttatggagaaggtataattaatgctatcttttccataaggacactgagatttcagagaggttgagccaaatttcttaaagtcttttagccaagtgagaggcaggatagatatttggaccccactctccctggttcttatacctactctcttaatcagtttgctgtcttcatcctcctggttgctaaagccaagctgtagcccttgtcatgggtacattgtctgcatttaggaggactaggctccctcaggacttgggtagctttcttggtctatcatagtccacatagccagtttcattagctaaagagggcatttgctctgtaataaatgtgccc

SEQ ID NO: 380598 - DNA, 494 bp, Homo Sapiens
ggacagaatgagtgtaggaaggaagagaaatgatgctacatctcagaaacttcaagcttaagtttcttttaggtccccttttaagctgcatccttttgagggattggaaccccactggggtctctccaccccagagtctcaggcaccgcgagcattcccatgtaccctggggcaccctcttgtacttcaccatcatttctgactttgaccagctgtaagagaaatgcagtcaggagcacagcatcccctacttactatcactacaagaaaactgagtcacttgcagtggggctgccacagtctcagcagatgcaaattaagttacaaggctgaatggtgcagccgctggacctgatagtaaggtgcaaaggtccaaacctgggcttgtctccacttcacgtcacaaaaacgtttggagctaaatgcagataaccatcattttatgaaagttcagatttaaaataataaaataaatggacacattctttataaag

SEQ ID NO: 380599 - DNA, 586 bp, Homo Sapiens
  misc_feature (344)..(378): n is a, c, g, or t
atggattagtggtctcctactggtttattcatgtttggccttgcgcttctcaaattcctttttatacctcatcagcaagtgaacttattccactgccctcatggctagctgtggcctgtgaaatcgtccagattccttgggcagacactcagggtgctttgtatttttgttcggggctgtgttttcagccttactgcttgccgttcccatatgtggactcttgcctgtcgcactgatttctgtcttcccaatccaatgctcatagagatcactaaggataatcctgcttattaagtgatgagttggtttgaattgtctctggtggtagtctaggaaagtgggannnnnnnnnnnnnnnnnnnnnnnnnnnnnnnnnnntggtaccaatgaggattttatttgagacagtgtaatgggggccagatgagagaaccattttctttgtaagcttagcatggctgggctctagccagctccagatgaaattttggctaattatccctttagaaaagtcaggcttaagcagaactgggctctaggtcaattaaccaaaagccagttcacccaatgaccagttcatttattt

SEQ ID NO: 380600 - DNA, 281 bp, Homo Sapiens
aaatctgtctagtactgatgataaagaataaatcttcatcacatttattttcaggctttaaagacctttccccttgctataaaggttcatgttatgtaccactggtggaccacataagagtatctatttatacaatgactttatttccctttaggaatcaaattgtaatcaaagaataaatttatttctatattcaacaaaattcaggataactgctgatatgttacatgcaggcagtttctgcatcgtaagctaaatacaattaaacagttggcacagac

SEQ ID NO: 380601 - DNA, 495 bp, Homo Sapiens
gatccagaggtcaagctttggagaaatgggacagaaagtcaaggagagttttaactttaaactcagcagccttttttgaaggtgtcgctgtggaagccaagatcatgtctgggattgaccctaaggttgatggaaggtttctgagcatagttcagcatcatcccaccagggggcagtaggaagctgtgtgcacaaaccatttcatcttgaccaaagtcaaatccgaaccatacaacttttctgtccttgaaccggagcttcattaaaacccttgggcaacatttcaaactttaaaactgtagaaacttttagtgaatatggaagcattgttaagcgtaggttggattttctcttcataaccaatacaggattcaattttgctgggagcatgtcatcatttattttcttgtctgaaatggctgtttttcactggtttcaagatctgaaatatgaatgcattatttacaattatgtaatacccttaccctgagctgt

SEQ ID NO: 380602 - DNA, 463 bp, Homo Sapiens
gtagacacgtggtttcaccgtgttagccaggatggtctcgatctcctgaccttgtgatctgcccgcctcagcctcccaaagtgctggtaacacaggcgtgacgaccgtgcctggccccatagttgtattctttatttttctataaataatttaaaacatgtctactgaatgcttgatatatgccaggcactgtactttctctagtttcatccatattcaccagccacctactgaataatggctaacattgatagagatataatatatgccagatactgttctgaacacttcacaaataatgttttcttttcttcattttattaataatacagagtctcactttgctgttcacgctagtctcaaaatcctgggattaaaatcctccagcctaggcctaccaaagtgctagggttacaggtgtgagtcactgccaggtccaccttacaaataatagtgaatcctc

SEQ ID NO: 380603 - DNA, 667 bp, Homo Sapiens
aaattgcttccactggcagtgaataaactctgatgctgtatcccagaactgaggtttttcaacttaaacttctacttttggaaaaacctaaaaatctcatttccaccgttgcaactgcctcttattcatgactggtaggaatgtatccatgatgattttagagatccctaagaaggtgtttttcttcctggtagctttatattacagaaataataggtctctcccccacattttttcaaatataaattcatatgtaatattgaattccttcctcctcagacagatactttatctcattttttaaatttaaaaactagggataatgatagacatacttcacagggttcctgtgagaattcaatgaattaatacattaaggagacttagaagagtccctgatgttttctgagcattccataaatgtcagtattactgttactcccctgaggttcctgtctgtgcccccaacggctaattctttctccaccagtcattcccagtcccagcctgtatacagcctagatcttttcttctctttttaggacctttattttttcgttacttgggatacatgaaacttctgtttgcccttatacttctcctaacttctgtctttacttcttcctcttattataggatcaaacccaacaataatactgtctgcttt

SEQ ID NO: 380604 - DNA, 778 bp, Homo Sapiens
agcatttctctgaacccatttcaaaacggtttcaaagagaacctcttcagaatcaactgtaatttccaaatctgaaagccagtctctaatgagatggaaaggtaacgtataaaattcttcatcctgaatcactttgtggaaatttctccgtatcatatcagcagccttcagagcaagttggctcagggtgtacatgtgtgctaagctatgaattgccacacaatttgagagatgaagttttttcttgagaaattctccacaaaattcttttaaacgaatgagtaggaacctgtcggccaactccagcacctcgtgcacgctgcccgtgctgacgcggatgcgcccggtgtacatgtactcgattacggcttccactgtgtcgggttcgggccccggctcggagctccacttgcgcatctccacccgtcccgagcgggactcggaaaactggcccgagagcaggggcgtgaagtactcggtggcggcagccagtaccgagcggtgggcccggaactcgcggcctccagccccgccgaagcacagggtaatgtcgcagaagaggccctggcgccgctgctcgttctgccgccaggacagctctgagcagtgagagctgcactcgaaatcctcggcttctgggcccggatcgcccccgctcgcctccattgcagagatcccacgcccaggcccgaagtccaccgtgccgctgcctcggacctcggcggccagtcctgccgagccgcggcggccgtctccatgctctccatctccagtacct

SEQ ID NO: 380605 - DNA, 644 bp, Homo Sapiens
  misc_feature (271)..(312): n is a, c, g, or t
ataaatggttcacgaaagttgaaatgaaatattaaagccacaattttggttctacttatcattgcatggaaaagactggacctgactcgtcgggtagacgtgagccttctttggagatttaatatttctttgcatcacaagtcattgagtcctcattttaagagtgatgttgagggctaggaccctctttggtggtcaaattagaattcaaccccagttaaatcctgactctcaatccagtattcttcctcctatttcatgaaatccctgnnnnnnnnnnnnnnnnnnnnnnnnnnnnnnnnnnnnnnnnnnacccacctctctctctagaattgaggctgtagtctccaaacagaatttccaaaaatttgattccagtgtgcccctattagaattccaaaacagcaatcttcccagcacaatcaagggacacaattcctgctatctgggatgatatttttggcagctttgcagtgcagtcccctgtatggcactgctgctgaagaagcgggcaggcagctactctgtattgtcataggcttttgctgtgttggtgaatggcttttttcaggtgctataatttccttcacttgctatatgggccacctgcctctaccttctcattcctccaatccatccaccaa

SEQ ID NO: 380606 - DNA, 257 bp, Homo Sapiens
tgggactttccctctccctccacctctttgcccttcccttgcttctccctgctcccttcctctatttctgtcatctagatgtttctaccctatggtgtcttctactgaatatttgggaaatgttaatgctagtcatctaactgttaaaatcaaactcttttaccctatgtagttctcattaaatgatgttgatgattttatacaaatgtgttgacattttaccatattatgtttttaacagggtataaacttcagac

SEQ ID NO: 380607 - DNA, 725 bp, Homo Sapiens
ttagtccctaattctagaccttacccattttacacacactattagctaaatcgtgttcctgaggcatggctctgattactttactctggctttagccttggcctcatccgttaaattgaaactgttcaccagacctgtatgcattaaaaatttttttattagaaaaatcagtgtcttgctagccatgtatgatagctatcaaattgatcattctgtaaatggtagcaataagtgtatcaacactttgacctcctctgtgtctagtaacatttgcatatagtacaactgagcacatagcaccagaatattggaacagatgcttctccaaagccaagggttgccttacatttagagtgggaaaagaggaaaatgagttagcagaggagcagcggggaggggggtaaattacaggacataatttgcttctaaaaatttgtgtttcgtgttgtagttatataattaacttttctattgtactgattgacagatttggcacagacatcctctcattgtgaatatatatgaatatatcagagttttggactctggggtatatttacataaacacaagtattctgaaagcattgataaccacactggtgtctcttaattttgtctataagatgaccttataaaatccttcaagaattatttaaatcaagtgtacgaagctctgcagttttttgttatgtctgaaatattcattaaaaagtttattaaacctg

SEQ ID NO: 380608 - DNA, 426 bp, Homo Sapiens
  misc_feature (352)..(352): n is a, c, g, or t
  misc_feature (367)..(367): n is a, c, g, or t
  misc_feature (376)..(376): n is a, c, g, or t
  misc_feature (416)..(416): n is a, c, g, or t
gacgatattactgtacttctctgaaacttgaaataactctgagatgcttagtctataggttggcattcaagatcctttacttaccaatattctgctttctcttcaaagaggaatttagaaacctcttcttccttacagacccctcccatcactttctacgggccactttaaaccagaaatgtgcactagaatcctatgtaaagcttctgcaacagtttctccgaccacattccaggcttaacagcatcagtgtccacagtgattcttagccttagacaaaagcaattcttactgctttgtattatagttattttggaatgatgatatcttctctggatttgaaaacccctgnaattaattaattccntgtttttantatatctggtattcctccataatgccttgatacagctccnttggtatggt

SEQ ID NO: 380609 - DNA, 619 bp, Homo Sapiens
  misc_feature (567)..(575): n is a, c, g, or t
caaaacatcccccttcctggagatgatgatgccatcgaagcccgggccagggcctgacctggcaggcacacacctggccagtggctctgaggtccccggggaccgagtcccctgcgagggcaggctgcccgaggccacacctgcccaccttccctactccaggccaccagctggtgtcagattgggccaccgggagagaacaggcctaggagggaatggaaggctggcggggaggctgtcatccagaagcctcctccccagaggtctccaggaggaacctggctcaactggggggcagtggtttacttttcccttttttcttcctttcttttgtcctctcagctgcccacagccagaaagccaggaccacccgaactggacagggagcagggagggaggagtggtcgcacggagcgtacctgattcaacaggaaatcagttattttctaaaacagcccctaccagagcctcctgaactctgtgggcaccacgtgctgctgtgagcatctgcccagacagtgacccgccacaggccccgggcgtctgtggaaggagttttgtaaaggnnnnnnnnncacacacacacaaacattttttcaatgtagcaaaatcaaactta

SEQ ID NO: 380610 - DNA, 935 bp, Homo Sapiens
  misc_feature (21)..(21): n is a, c, g, or t
  misc_feature (29)..(29): n is a, c, g, or t
  misc_feature (407)..(407): n is a, c, g, or t
accactttgtgagaacaaggncttccagnattctgtctaaactaaggggcaattaaaaatgaaaaatagaacattagagattttaagaatgtgggatttagaacagttaatataaaaatttgataagaaattagaaaaactaaaattattaaattgtactaatgtgtttggtatgggttaatcctaaaacttgagattttccttggatgttggattgtttctgaaaagatttaattttctttttaaaattatattgtgatgcatgaagagttttaaaaacttttattttttatgcttgtgaaaatcataaacgacacaaaagcatatctactcttagtgtaaatgttgcttatgtcagagctatgtaggaatgaactgttgggcaacaggatattttacagcagaanaatgtaggaagctaccacccggtatgtaagttttttgaggcatttgttttagtcaccttgcatgaatagtgggtaaactaattaaaatttggagaacaataagaatattaattgctattttatttttcatgtggaaattgaatttaagaaagagtttataggacaaaacttgttattaccttaacatatgattatgagatatgtgtctacagataaatgttaccaatgtttattaagagtaacagtatttaaagcaaagtaagaaagtgagaatatcccatatcttttagaagaaataaagcggttaaaatgatttaaaacagactaaagacatgggaaaatattttaatggtacataataataataatattaaaaatatatccatttttgtgaactcaccatttctgtgattgttaatatatctttagacacatacaaacatggaattagataacatctaaaatttcaaaaattttaaataaatttaaacataattaaccttaaaagtatattaaataagacaatgt

SEQ ID NO: 380611 - DNA, 892 bp, Homo Sapiens
  misc_feature (795)..(850): n is a, c, g, or t
cctcgtgccgcatttattttgtagttcactgtcttgacagagacacaaaaaatgtatctcacatggtgtcctatatatcatccagtgtctttttcagtctcaggtatcagcaggagtcaaaagtgattgattagagccacaaaagcgcttgtattcttctttcacaaaattaatctttttctttgcatgtgcaaactctgacttatattattaatacatccttactactacgtgaaggaaaaaaaggcagccaaacaagactagttaaaataccatatgctgtggaccagggcaagaaagcttatgcctttcagtttgggctgtttattatgaagatagcaaaatgtagcagccattcacaaagaaagcacaatggaaaaaagatcatttaaatttaacatgcttggaattgactgcttttgcatacaaatagaaaaaggagtattgtctacttctaaataaaactattactacatcttcattgccacagtccttcagattttgtttactggtagctgttggagatattctgacttcctgtaaatagaattccaagtattctgagagacaaaatagaatgaaagtgcactgctaaagatgtggatttatttccttaacacattaaattcatagtcagcagtaatgtatatccaggtgttttatctcaaacacaatatggcaaatatttaaacgccttccaatttttgaaaatttctccttttcataaggtttggtagattattttggccttcagaattccctatttcatggtacctggtcaaaaatgtcatagcnnnnnnnnnnnnnnnnnnnnnnnnnnnnnnnnnnnnnnnnnnnnnnnnnnnnnnnnaacaaaaataaataagaaaaaactctgtcactcaaggtgttc

SEQ ID NO: 380612 - DNA, 568 bp, Homo Sapiens
tgcatcctattctccctcctccaaagcattttactgtgtacaactctctgtagctctggacttttctaggggtgcaatgactattttaaatttaaagtccacatcagggcaaggcctccgtataataggaaaactgaacaggatctttgaaactgagtctgtcccagaacatttctgatgaaaacagtgcccgtaacgcaaagctaggacagggcaataaaccttgtaagtctggccacatataacatttttcagttaatacagatagaatctgaatctcagaagctgaggcaggaggatcccttgagttacctgtttttttctgtgcccccagtttctttctttctagaaccaagctggcttcctgccttcaggtccaacttctgctccttcctgctgcccgccactatgaaaatccctttccataccctggagtctcttgtcctcctccttcagacagagctgccaagagcaatagctttatacgcagaagcccatccacttctggtggctttatgtactggggcccaccctcttctgcagccgatgacatttgaaatcccatcca

SEQ ID NO: 380613 - DNA, 426 bp, Homo Sapiens
gagagagactggctcaatgttacagtgaataagagggacaatgagttagaaaaccaaagagttagaagcaactctgaagctagaacacaatctagagctctttccaaggcattaagctgccttgcaagggaatctggaaacaatgaaatacaactactatttataaatgtgaacacaatggggacagacacagaaatgttttagggcagtttagaaaagttagcattacgttttacaacggaatttgtgaatctcattatttaagtagggaaactgaggcctagaaactcacaaggccacagttatcaagtggcaacactgatcaggaagtgaatccatgtctgtctgtacttgttctcctaaccacatatactgtctggaaacatactcagctagagggaatatagctgtgttttacaaagtatg

SEQ ID NO: 380614 - DNA, 377 bp, Homo Sapiens
ctatagggaatttgccctcgaggcccaagaattcggcacgaggctgaagtgggagcggcagtgaagagtacactatatttcgccaagggggtcttctcatctcttgagtcttggctttctcatatcctttaaaattgctgcagttctcagtgggaaagtggaggtggcaaactctaacagcgattggtatggggccatctgcagaatgaactggactggctactatggcttttataacctgctttcctttctttagtctagacaagcttatttcttcatctttccacctacgtcctgctagttctaacataagatttaaaaggactatgggaagataaaacttctcactttctaggctggaatgatgaaaaacagca

SEQ ID NO: 380615 - DNA, 652 bp, Homo Sapiens
  misc_feature (255)..(255): n is a, c, g, or t
cctcgtgccgcagccccaccctttctggaagtgggcagcttgggaagcaggcaaggcaggcttcttagtctcgggggctgttttgcatgataattagcacttcttcatccggcttctgatgaataatttgatccaataaggtcgggaaaatcacttcctatctatgcaggtgaccatatctataaagtagccattgagatgcttgcctctttctcacgtgtaattagtgaggttggaaggggctatgtgctctgnggtagccccacaagaacctacactttggtcttcactggcctgggctcaaaacccatctcttctgatgcccagctgtgtgccgggtgcagacaagtggtttcacttctgtacccttcaattctcatcagtaaacatgaggcttttagtctcttaagaagttcttgaacaaaaatgaggcaatgggctaatattttctcatacccaggccaatgcttagcacacaataggtattcaataaaagccatttttactgtgtttcttctttcattgaataaagcgtatggttgtatatctatacattgtggtaattactattatcatcacaactaataataataccccaggatttgttggccttcatacaatcataggtaggctaagccaaaaaataaatgta

SEQ ID NO: 380616 - DNA, 724 bp, Homo Sapiens
cccacgttttccctgaagtcgagtttgtggtctaaggatgtcttgggccctgtgtgccccaccattcatgacctctgtattctctagttagatccctgaccataagcctgagcccctccctcccagccccatattcacacacatcccagcccctggacttgccctcttcctttaggcatgtgagaaaatcagcctagcagtttaaaacccactttcctccacttagcaccataggcaagggggcagatcccagagcccctctcaccccccccaccacaggcctgctccttccttagccttggctaagatggtccttctgtgtcttgcaaagactccccaagtgggacagggagcccctgggagggcagccagtgagggtggggtgggactgaagcgttgtgtgcaaaatccagcttccatcccctccccaacctggcaggattctccatgtgtaaacttcacccccaggacccaggatcttctcctttctgggcatccctttgtgggtgggcagagccctgacccacagctgtgttactgcttggagaagcatatgtaggggcaaaccctgtggtgttgtgctgtgtctggctgtgggataaatgtgtgtgggaatattgaaacatcgcctaggaattgtggtttgtatataaccctctaagcccctatcccttgtcgatgacagtcatcctaatgataataaaacctgcatccagataatcaa

SEQ ID NO: 380617 - DNA, 499 bp, Homo Sapiens
  misc_feature (118)..(126): n is a, c, g, or t
  misc_feature (226)..(326): n is a, c, g, or t
  misc_feature (363)..(374): n is a, c, g, or t
  misc_feature (413)..(428): n is a, c, g, or t
gtgtgagccaccgcgcccagccaagttctgtgaggttctgacaaggaaaatctggtcatataattacagataatcccagtaagaataggaggaagtcagtatgattttatgggacttnnnnnnnnnttaactcagtatgtatgaaagtggaaggaaacaggaaatacaaacaagaatgaatataaaacagtagtagactaaaacagatgatgaactgagtctgaannnnnnnnnnnnnnnnnnnnnnnnnnnnnnnnnnnnnnnnnnnnnnnnnnnnnnnnnnnnnnnnnnnnnnnnnnnnnnnnnnnnnnnnnnnnnnnnnnnnnaccacacagcaaagaccctatctctgttaaaaaaaannnnnnnnnnnnaaagcagcatgggtaacataaggagaccacatatctacnnnnnnnnnnnnnnnnttgactgggtgtggtggtgcgtgcctgtgtcccgggtacttgggaaacagaggcaggaggatcgcttgagc

SEQ ID NO: 380618 - DNA, 549 bp, Homo Sapiens
aactgcgataatgattgattttgcaaattccctttaaaagcacacactgacaagacaagaagctcaggaaaaggcagaaaaattactcctttataatcaagtattatatataagtcagtgctcataattttgctcaagaaaatattgacttacattcaaaatatatctgttctggcatagagagattatgttgttaaaatcatgttattgaaaaaagttatttcagtggggaaagaggttagttaacaaagagattcacagtaacaaatcctcctttctggaggggactcttcctgaccctgagctgcacaactttgcaacaaattaaagcctaaccgaagatgacctcacaatggcaatttagaactcatgggagtcaacttacataaacggtatttgatttctgataagatagtggaattattggttatagatgacaaaataagtatgtttaaagtgatgatggacataaaaaagttttaaatataaaacatgagaaaagaaggagatactattcaaaaagactggcaaatttgaaaaactagaaat

SEQ ID NO: 380619 - DNA, 172 bp, Homo Sapiens
agcatatagagttttgacccagggcagaggatgcagtgcccagcttctcagtggttaacagctgttcagcctagtgcatatcagaatttatgtgggtgttgaatgatttttttaaactagtgtaggaacacttgataccttctcagtagttatgtgcatgtttctgtagttt

SEQ ID NO: 380620 - DNA, 442 bp, Homo Sapiens
  misc_feature (181)..(392): n is a, c, g, or t
gagtatttcggtagaaatataagaattgttgacaaaactaaaattgagctaaagattaacaaactattctcagtctgaacgaacaaaatacaaaagaaacaggatttaaataacagaattaataaatgttagataatagatacatagcaagaaatataagcctggtgccctggctcacacnnnnnnnnnnnnnnnnnnnnnnnnnnnnnnnnnnnnnnnnnnnnnnnnnnnnnnnnnnnnnnnnnnnnnnnnnnnnnnnnnnnnnnnnnnnnnnnnnnnnnnnnnnnnnnnnnnnnnnnnnnnnnnnnnnnnnnnnnnnnnnnnnnnnnnnnnnnnnnnnnnnnnnnnnnnnnnnnnnnnnnnnnnnnnnnnnnnnnnnnnnnnnnnnnnnnatgcactaccactgcactctagccagggtgacagaacaagaccttgtctc

SEQ ID NO: 380621 - DNA, 755 bp, Homo Sapiens
  misc_feature (506)..(523): n is a, c, g, or t
gaagttacaaaaactagtaagagctcaaactagcaataaaattatagtatgtttttcccttgccttcactataatgcttaatggttgtgtagtcttatacgtgactcctgacttcaaggatcctggtctgtacctctttaggtcaacacgttttgagtgaactggtgttggttatttggaattagatataaagtcatatattctttggtgaggaatggcttcatataggagttcacattcaaaacaagctttgacaaaataatagagtgaaaattggtagatcagagttgagctgattggaggaccaaattaaaagactggctgagccaccacgcctggccctctgttaatgtattaattataactctttgttttgttatttgagggattactttagggttttacaactcattaagtaaaaggggatcatcataaatgtattggaggaggaagggttggtcttgctgtgtcaggggtagcagaggtacatcttgacttaccacagnnnnnnnnnnnnnnnnnnattttattctttactcctggcaagctgtgacacagttattttcaagagatgtaatatactacttcatgcgtaagaactgtacaattatataccttttttgccagtcccaattttatgcagttgttttcatacattttatgttcatatatgtaataaaattaataatacgttgttatttttatttaaatgaccacttaggttttaatgtgtacttaataaacagtaagcagtc

SEQ ID NO: 380622 - DNA, 333 bp, Homo Sapiens
  misc_feature (78)..(107): n is a, c, g, or t
  misc_feature (233)..(279): n is a, c, g, or t
cggtagagatggcggtggtggggtggtctcactatgttgcacaggctagtctcgaactcctgggctcaggtgatgctnnnnnnnnnnnnnnnnnnnnnnnnnnnnnngcatgaaccaccgtgcccagtgaggaattattcagttaaacccaaagccatgagatgtgttcagtaaaactgaacactggaaggatatttatttcggaccagtttttgactatgtccctagagaannnnnnnnnnnnnnnnnnnnnnnnnnnnnnnnnnnnnnnnnnnnnnnagacagggcccttctctgtccctcaggctggaatgcagtgagactttgtcccag

SEQ ID NO: 380623 - DNA, 896 bp, Homo Sapiens
catatttctcttctacctagcctccctgcccctccccaggaatcagttatccagctgcattgcttccactgctccctccttctcatggtcaataaagactcatgctcagaacctcaatgacaattttgcagcttcatatgttaggtagaagtgatgctggctccactcacatggccaggacagctcctgtggtgtatgccggagtgaaaacttgtttgttttctgatggagtcagcagatctaagaggcacattagaacagggctactggcagatttgtgccaagtttagtctctgggtaacccacacacccacctggctccccagagtgttcatactgctgtgccagacaacccctgattcacaaccagctcaggctgggagggaggctcagagggactttcaagatactttatttcagttcctcttttgggctctgacccctcaacaatgcagctgcagtggtcctccagcctctatctccagtgataggaacttgcatctcttcagaagtccattgcatctgtcagatttcaggaagacaggaggatgggaagaagaggcaggggaagaggaaggagaaggagattctgccttcttatagaatccagccacatgtcctatatctggagagtgattataacgtagcggctcctaacacagcggctccaggaccagattgccttgagccaaacctgggtctgcctctttctggtttgaggtctgtggcaattgaatcaacctctgtacaactcagctcctcttcaataagatagagataattataggacttaccttgtaaggttattataaggaataaataagttaatgcaaataaagtgtttgaatactgccttgtacataggaagctctcaataaatattacctaattctaca

SEQ ID NO: 380624 - DNA, 493 bp, Homo Sapiens
  misc_feature (343)..(351): n is a, c, g, or t
gtgtatttagcaatctgtgattttttaacaaaggtttaattatattttcacatggcctcagtcatgcccctgtgtaactggctcagtaagagataagggtgcacgtagctcaggccgtagcaggtgctaatgaagagtccccgttgagagagggcttcttaaaccactgagggaagggctctcccactggagaagaaacactgaagtatattcttctccatcctcctcccaaagtgttgacagagaaaaaaaccagagtgaccttgtttcctgccctgcctgacagtgagttaaacagaattccaaactagaggactggacatttattcacctgcaaaaacannnnnnnnngcagcatttcaaatgtacttgtgtctagatatggtttcaattacatggaattggcctttgtctttaagctcttattttctctcctgagtgtcccttgaacctctttatgttcacaaaaatcctactgtgtggtttttaaagc

SEQ ID NO: 380625 - DNA, 660 bp, Homo Sapiens
  misc_feature (118)..(135): n is a, c, g, or t
  misc_feature (218)..(229): n is a, c, g, or t
ctgaaaatgaggaataaaatgtactggactctgttcacatatatacagtgttccaagttgttgttcataaaatatgatcacatgactataggtacagcagtcacttgcttgcatgttnnnnnnnnnnnnnnnnnncggcggctgaggaagtaaatcctttaccaatttattcttaaagaaaggtaccggtagaactggtatgttttaatctttctgannnnnnnnnnnnggggtctctgcccaaaaatatctgtaggaaagagaaaggacaaagtaatcagagcaagagatcccttctacatagaatttcttctaaaagaagaggatgggaaaagtcaacaatttcaagaaacaatctagattatatattagctgttcactttaactggtagggatctgacagaaaataaacaatgaagagcattcctaatgcgttccttacaaatgtatatattttaaagtctctcatacttgatttaggctattctttggtatacgacttttcaagtgctattttttattccatgtatactgaaaaacagatgtaataaaaataattcagccagtggttttacttatgtctgcatattagaatcgtttgggaaaactttgaaacaaacaaacaaaaccaataaagctctgacactaacccagagcaat

SEQ ID NO: 380626 - DNA, 862 bp, Homo Sapiens
  misc_feature (329)..(329): n is a, c, g, or t
taagtttattaagctggtacacttaaatttaaaagactaaatttgcaagtttgggtttcctgagaaaatataattcaagtaaataaagtggcaatttattagaatgcagctgcagatttagatgtcaacaatcttgtattccctgaaaactcctgaaaggattctccactgactaaataattttatactatatccaacaaaaaattatatgagtggggctttaaaaccactgaaaagttaaaactaattatcaagctgaattacttaatcactggctttgtgagtgctcagaatgaaagatatatatcataacactaacaatccagatngtatggaataaaagggtaaagtttagggaacagatgtaatataagaatttgaactctttttaggtcattaggcatttcttttatctaaaacttctctctctataatatttattagatcaatatgagagctaattttgcaaaaacagtctatactcaaattagaagttgatgtgaaaggtgaagaaagatcataggatgaaacagaatgttaaagaataaaactaaaacctaaaaatatctttaaaacagcaaaaagatgtgtcaactgacattatccctgccaagcttcaaggcaaaaatcttgtcacatcagtgactggtatatcttcatcagtgacaggtatatctttctagccttggctacctgaagctcaagggaatatgaaaaaacaaggctggacattaaagtggcaaacagggatcacgctggagctactagctagccaatctgaacagtactttctggtgccttaaggtgtcactatgctatgttcagcagtgccagagcaaaatctaattctttatatggtttc

SEQ ID NO: 380627 - DNA, 493 bp, Homo Sapiens
  misc_feature (74)..(74): n is a, c, g, or t
  misc_feature (113)..(113): n is a, c, g, or t
  misc_feature (271)..(271): n is a, c, g, or t
tttcgcaactagggccgcccagcttccccttgccaggcaggcggatggactaaacggcactgctgggaccctgncttggccatgggggaaaggacaacacacagcctgggtgnagtcccccgaatcactgtaccgagtggaagatgtcaagaggaaaccacgtacgcactgcaggaggccattatgcaaagctctagaagatgcaaattaacctacagtgactgaaggcaagaaagaaaacaaaaagcagcccaaggcgaaaaagtcgaancctgtgccctgagcacaggcagtcctgaggtgctgagcggtttcccaccaggctcttcttggcctttcgagaacttcagcccctctctgctgtttcctgttgctggcatccactttcccatctcacaatattttctcctgtctggtctcctgtatctgaaacccactgctaacgggatctcccctctttctggaaaatgttcattaaacaggaaacaaaccc

SEQ ID NO: 380628 - DNA, 475 bp, Homo Sapiens
  misc_feature (73)..(89): n is a, c, g, or t
  misc_feature (110)..(122): n is a, c, g, or t
acatttctaacaattcccagtaggaaggctggccccacccattcctactgggaattgttagaaatgttttagnnnnnnnnnnnnnnnnncaacccgtttggggtttgtgnnnnnnnnnnnnngctaaaacatctcaatttaatagttattctacttcattagctctttcattatggaataaatatgttgtcttctcttccgttgcaaaatgaaaattcaattcagagacagaaagatgtcaaagtacccattgctgaaaacagaaataacataaagctaccaaaaaaatcatgaaatggaagtcaaacttataaaacaagcatacaaatgaataattagttcaggtatcatacttcagccaacctacttttagagcctacaaagaatatttgtgcagtttccagctttttgttagaggtaatattaagtcagagttgttcaaacacattacaatttagtgtgggcaaaaagagag

SEQ ID NO: 380629 - DNA, 918 bp, Homo Sapiens
catacatgggaatttttctgaatgtaagcagttttgatgtgtctgtatatcaatctgtatctacatttgatggactgagtaagaatgttgcatgtgagagaagggatgtgactgtggactcagattgacacacacagattggtggaagaatagcttcagtcctcttccttcatcccatatgtaggtagccttgcttgacaaatgtttcttctaactctccttcttctgaattgtgcagagactctgttaacttccctttttgcacttagataacttcctacttcaaccccctcctttatcttggatttctaaagtttttccccaatattgggaatggtgagggtggggatgagagactctctgaacaattcttgcagaaccagtgacaatcttatgaatataatgaataagtaagcatatagtagggtgatagaatacagatagtagaaacaaagagaggacagcaaaccttttcagcacttctctcagagcaaatggaaacacacagtaagtagctttctgactacattattttctggtcacttttaaagaaagtttacaacctgttctgaaactatttgtcttttcactggttgtaagtgtaccccaatctcagggagtatatctgtagtgccacaggcaaaagatctactccttcccacactcatttgcctgaacttactcgaagggctgcatttctctgagtttacgaaattgtgtcattatggtccccatacagtggtatttaacttttaaagcaacttttaagaaaactcgacttgttttttgttcattttaagtgtgtggtactaaaaagacatgttagactttttttaaaaaagcacttatgttttgaaaatagaataaataataagaatttccaattaaatcatgtctggtgccaatgtgcaaaacttc

SEQ ID NO: 380630 - DNA, 421 bp, Homo Sapiens
ccagggtaaaaaagacagtacctggggcatctgagcccaggtgtaaaagagtccggacgctgggcttcgctaagccacaaggctatggaaagtgccctcgccacctgaccagcatccagtccctcttacctcttctttaataacataatcctgattttgtttggggcagtcacgtgtccaggtaaaactgctcactatcccagccccccttttgcagctagaggtggccctgcgacacagttctgccaacgagaatcccagggaagagtgtccctcccacacccatataaaataataaaacttcactagaacaaggctctcagcccttccttcttcctgactggaaaattgatgtgatggctgaaggcacagcagccctctgccaccacgaggagagctgcactgaggactgccagtcaaa

SEQ ID NO: 380631 - DNA, 992 bp, Homo Sapiens
caaaatcacattgcaggaacatattggaaaaattgtaccctttactaaagaaataaacttcaatattttctcttctaaccaacttaaaagacaccaatctacctaactcatctggctcaagggacttggactggaggatacaggctaaagtgacacttatcagaatcttcctcaagcacttgctggaaaagatatcagattggaacttcttgtttaaaattaagctttagtaaaacaaagtgatgaggttaggaaggcagactctacacatgtcagattgacatatccccacaatttccggaacctacatgtatagctgtttacaaaatctccaagttaattaagggcactttaggaagttgtcctcatgaattagctagcattagcataattaccgacgttgcatgctgtgaggaggctacaaaggccaggctggtgtcggaagtaataatacatatagaattccattctaataaatgccattagtgtataacatcaagttctgtgtaatgaggctatttccaagtctccaaagatggtcactgtaacagcactttgcttagagggttttaacaaatcatattagccaaaaagcctacaacatagatgcatttagcaaaccatgtacaaatcaatcactataataaactgcatcatttgatagagtcaccgtttttgcatgtagtgttagagtatcacaaaatataacaagttttactaaaggatggttggttttttcaggatttaagggaatatggacaaattgttaaatagtatttatttgataaatgggagtttgtatgcagaaagagtgaattgcgtataaaaagggtgatttaaaaacccagaaacaaaaggtagaatagggctgaagcatctgataataggaaaagaaaaggacaaaagtcctcaacttgtgagcaatatgctttccctttacaccctgtaatttattcaaatgatattaaaatacaagaccattgcaaaaaaaa

SEQ ID NO: 380632 - DNA, 689 bp, Homo Sapiens
  misc_feature (252)..(266): n is a, c, g, or t
  misc_feature (548)..(565): n is a, c, g, or t
cagatattaaccattttacctctttcaatgacttgtcttcagacctgaaactgattcagtgaccatggggcacagaaacccaatcagagtaaaatatgtgcattgagtagacctgtagacgtgagaatccagttctctctccctcctcatgctataatgcccacaaatattcagataccacctgctgctactttacccatgcaggacctgaatttgcagctccaaattctaaatctaggtctcgagaattgnnnnnnnnnnnnnnngtttttatctgaggaatgcaagtccttttagttatcaaagtcagagagccattaaaatgagcacagttatgtttttctcccttttcttcagctatgtatttatctcttgaaactgttcactattgccacaagtagctttaaattagaccaataattccactctggacactaaattccatacccttaaccttgatgtatatgcaatcaattattaaagttatttctttacataagtaaaatttctcacaaccaatttcgtatcagctcattcactgtacctcnnnnnnnnnnnnnnnnnngcctttacaaatccacttgtaagtgctgctaatgaaagtgtagattccagagcaacttgaatattttgtcacaagtaaaaatccataagcttgacacacaaaataaacagtctgaaaatataaa

SEQ ID NO: 380633 - DNA, 736 bp, Homo Sapiens
  misc_feature (29)..(29): n is a, c, g, or t
  misc_feature (31)..(31): n is a, c, g, or t
  misc_feature (66)..(125): n is a, c, g, or t
attattaataatagccttattcctagttnanagtaaaacaaagtgctggcttgatggtatgggagnnnnnnnnnnnnnnnnnnnnnnnnnnnnnnnnnnnnnnnnnnnnnnnnnnnnnnnnnnnnatttgtactccaaaagaatttatatttacaaatagagaaactaacaatgatttaaccacagtgataagggaagcagacttttgggcctaaggaatagacacaatataatttggtagcatagcgggaacaaaggattaaataattaaggcaaatacttacagtgaatggtctcctttacttctggtctcaataacaaaattatgggaaaaatataaaatcaatatatccatgctctaaactaattacagaaaaccagacaatggttgtaaacccaaatgtaatatagagcaatggctcttaagtccagattccgatttaattaatttcagggagccctgtggcgctggtagtatgcagaagattcccaggtgttgaaaatgacctggagccaggaattaaaaccaccaatctggggttaacacccaaagcaaaaatcaggcatcctataggctcagttaaaatcagtttttatacaacgagtttaacaaacacatgacatgactgaccagagttaaagatgaagtggcagatttaacttggagtaagaccagtaagttaaggatataaaaaacaactgtgaaccacaagtcatatatgatgaaagggggaag

SEQ ID NO: 380634 - DNA, 729 bp, Homo Sapiens
  misc_feature (410)..(440): n is a, c, g, or t
cctaataccactggttatattgtacaagtttctttattgcaggacttctgagtacctttagtttcctaccactgtaaatcctcaggaagagatacagtatctagcatttcccaacgtattgactgtgaaaacttttttcatacaccatctgaggagccacaacattccgtagaaaactgctttaaggcaccacatcagctctcagaactcatcttcttgctcattgtaatggccatcctggtttatcagacccagcttgcctctaagttgaagcaaatatggtgttttctatgacccttgctattttcacttgggataaaaatgtgaagaagatacattgtgaaactatcggaattcaaatttctatgacttgagtcacaactcttgccctattagcattgatgcctttnnnnnnnnnnnnnnnnnnnnnnnnnnnnnnngattcccagatgagcactaggagaaacagcagcttctgcagttgagttgggccacataggattgagggtgaaggtttcttcagtgaatgtgaacacctgtctctcttctgttttgatgtaggtattaacaatcttttctgcctccaactactatgaagttggcagcaacagaggggcctatgtcaaactgggccagccctgaccccacatatcgtgcagtatcaagctaacaaggtgacccacacactcaccatgaggcaaaggcaagacttttcaatgagtgattttc

SEQ ID NO: 380635 - DNA, 353 bp, Homo Sapiens
  misc_feature (184)..(216): n is a, c, g, or t
tggaaagatatggacattggggattcctaaataagtggccagatgagccactgagaatttcatagtcaacagattccatccatatctatacagtttccaattcaatttttagtgctcctctcttcaatgagcaaccaggcaaggatgatttcaggaactggtctaacaataaagactaagattnnnnnnnnnnnnnnnnnnnnnnnnnnnnnnnnnctatacagagaaataaaactttttcaaaagtttttaagaagtgttttaaaaatatattattactatcagagctgtaagagaagataattattatgaagcaagaatataccattaggcctggcgcagttggttacgcg

SEQ ID NO: 380636 - DNA, 569 bp, Homo Sapiens
  misc_feature (24)..(24): n is a, c, g, or t
ggcacgaggcaatcatcaaacagnaagccccagtcccgatgcagaaagagggggccggggagaaggagaatacaggtggctcccagctgcattctgagaactctgtgattggcaaggccctcccctgccccaccagcccccacccgcctggagacacaccctcccccacaatctttctagacaggtgcttcaggacagaggacaggcatggcttccccttgggcctcctcagtaggcggtctggcctgacccccaacaaagaagcctggaggtcagagaagcaaatgcggagcctgctccctcctaagaagatcccaagaatccaatggctcagtccttggtgatctaagacagcaaagaagtgtgcaaggagggccctgttagctcccactgtcctggtttctcctcctggagtctaatttccttggccctctgagccttttgagtctgggccctggtccaatgctgctgttgtctgaggaatggtttggtgagaacagatgttagaacttgtttgttgattcttgtctggctaataaatcatcaccaactgccttctcctacaggga

SEQ ID NO: 380637 - DNA, 179 bp, Homo Sapiens
caaaatccccttgacgaagaaaaagaaaggcagtgagcttgaatgggaagagggcgggctttagtcacaacttctctgagcctcagctttctcatctccagaatggctactgtgatgcctatctagtagatttgttgtaagaattacacttattatgaaggctgggcatggtggctcat

SEQ ID NO: 380638 - DNA, 394 bp, Homo Sapiens
cccatgtactctgccaactaaattgatttctacagctgggagtagtggacctatcaaaaagtttctaatctctcctgaatttagataaacctgtgcattatatctttttttaaaaagttcaatttaaaagaatttgatcttaagatcttaaagtagaaaattaaacaatttttatttttctgacgaggtcacaaaagatcatcctgtgaacaaagcaaatgtatacctgaactactttcagaaagaagaatattcctattttacttctaaacttcagagacatttagtaagaaaggccatgagctctcctgaataagaagttccaccctcaccaggaggacctagcaattataaatacatacatctgacatcagagcacccaaatatataaagc

SEQ ID NO: 380639 - DNA, 680 bp, Homo Sapiens
  misc_feature (65)..(65): n is a, c, g, or t
cccaggaaggatggagggaattattcctggagcataacctgcctctcagatcgaggtgtgtgttnggggagaagatgaccgagtcaggcttcatagctgatgactaaaagcctcccccaggaaatgtgaagactggcagctttcaatggcaaagatgattttacgccattctttttctgacctgtactgggagatcatgaaacatctgccttcctcccaagaaacagcagctcaaacagtggagattcaaattcggatcattcaccacaagaacgagaactttgatccttatataataggcctcagcaaccttgggatgttatacttgggaactaataaactcgtgtgcaatagactcaatgtttatgttcccccagattttatatgttgaaacctaatccccaatgtgatggtatttggaggtggggcttttgggaggtgattaggtttagatcatatcatgaggatggggcccaaatgatgggattagtgccctcatgaaaggtggccccagagagctccttcaccccttcaatgcttgaggatgcagcaagaaatcagctgcccatgaaccgagaagcaggccctcaccagaaccctacgcatgctggcacccagatctcagacttccagcctccagaactgggagaaataaataaatgtctgttgtttctaagcca

SEQ ID NO: 380640 - DNA, 412 bp, Homo Sapiens
tgctatttcatcattctttttcttaaagtaaaattcaaagttaaaactttcttacattgggttgtttcacctaatccctgaaggcatttgagttttcaactcctgtcttaacctctaagcctgacttctcatctgtcaaatcttctcatctgtcaaatgcaaaaaaataacatttatctataattctgaaaaaaagccctgcagggtaaagcatgcatagagaacactgcctggcacatggaaagtgtttgaaaacggttaatataaggagctcaaaaaccatttacaaaatgaatgaatagaccaggcatagtggctcatgcctgtaatcccaacaccttgagacgccgaaagatcgcttagtccaggagtctgggaacagcctagccaacataacaagacccagtctgta

SEQ ID NO: 380641 - DNA, 420 bp, Homo Sapiens
ccctctccctttcaagaggcaccaagctgcttgtggtcttgtctattcccactccctgcctgactgaacattttctccacctcctgatcatcagcagcagaaactggctgctcttcctcctgggtagacagccagactgtatttcccagctgcccctgcagtgagatgtggccatcggagccagcattggccaatggactctgcatgggagtgacgcatgctgcctccaggcttgtccctaaaacctcccacgtgtcctccgcctgctcttcccacctccaaggagcacggcaattgtggaagacccagattagtgatggcagaaccatagatgggaggaacctgggtccctgacttaaagtatcatggatttggatgttcccttagtgagaaataaacttccattgtgtttaagccttt

SEQ ID NO: 380642 - DNA, 449 bp, Homo Sapiens
  misc_feature (39)..(39): n is a, c, g, or t
  misc_feature (371)..(371): n is a, c, g, or t
ttccatttaactgtcgcctccttggcaggctttgctgangcatcctagataaataagcccctctccaggcattctatgacattatcctgttttattttctttattatacttaatagtatctgaatttacttaatttgtgtatttacctcttctccccaacacacagttgaggaacatttggccttgttcattcatgtagtagggcccaggaatgtaatagacaataaatgtgaactcacagatgaactgactccttgttctttcccttccataaatagaattctctgtgtgtgtctataaagcaaacaaagtgttttacactgtagtgtttcatttctaaaaccctctattttaggaaacctgtaacattngagggcgaaagtcacatgggggagaggagtagtacaacaacgattaaaaaaccttatcttggccagatgtggctgtca

SEQ ID NO: 380643 - DNA, 137 bp, Homo Sapiens
tagtgatgggggtctcactatgttgcccaggctagtcttgaattcctggcgtcaagaattctcccaccttggcctctcaaagccctgggattattctacatgtgagccatgatgctcggccctgatttatgattgcc

SEQ ID NO: 380644 - DNA, 486 bp, Homo Sapiens
aaacaagcctagaaacttgaagagcagactgaagtcacacacctgattagtgaaagtcagcagaaagctgactgtgtttctgatgatgttgtgagtaggggtgtgtgagaggatggtttcaggaagcctcaaagagtgacatttgggcttggtggagaatgtcccaggcaggcagaagaaaatcagggcttttaggatgaggaatggtgttgcttccttctaacatcttggcctcccttcagttctggggttttctagaaatgatgaaaatctttcttgctgttggtaacttgagaagttttcttaacaaggaaaagttaagcaactctgaagagggaaaaaaaaggcctctcaagatgggctcaaaggaatacatttagacctaggtttatacagattacaggagctacatcccctatcatgtaatgcccggaggcctagtgggttgaatggtgatccccaactcgaaaacacatattcaggtcc

SEQ ID NO: 380645 - DNA, 400 bp, Homo Sapiens
  misc_feature (32)..(32): n is a, c, g, or t
  misc_feature (48)..(48): n is a, c, g, or t
  misc_feature (50)..(181): n is a, c, g, or t
ggtggctgcgaattgacaggcgtccaaccatncacgccccaactaaantnnnnnnnnnnnnnnnnnnnnnnnnnnnnnnnnnnnnnnnnnnnnnnnnnnnnnnnnnnnnnnnnnnnnnnnnnnnnnnnnnnnnnnnnnnnnnnnnnnnnnnnnnnnnnnnnnnnnnnnnnnnnnnnnnnnnacaagtggatttttaaaagggggacagatacaaaaagagtggggctgatacaaagttgttttccaggaattctcattcatttacagaaataacattgattagcgattgactatatattcttaagctacagtgtcagggttatagtggccagtgtggaattattagtttagtttttagctaattgtggcaatagcaagcagtgtcaacagatgattgcat

SEQ ID NO: 380646 - DNA, 449 bp, Homo Sapiens
tgggctgtggaccctgtgccaggaaaggaagggcgcctcctgcaatgcggaagcacagggcagtgggcaccaggctttactccctttctcaccctacagagggcaggcccttcagctccattctcctccaaggctgcagagggggcaggaattgggggtgacaggagagctgtaaggtctccagtgggtcattctgggcccagagatgggtgctgaagctcccacgcctgcctgtgaaaatggagtcctctctcacctgggagagccaggtgctgccccgagaaggatgcatttatggcttcgtgaagtctttcctgacccccgatgctgctgactatagagacaaagtctcactatgttggctcaggctggtcttggaactcctgggcctcaagcggatcctcccacctcagcctcccaaagtggttgggattattagacatgagcca

SEQ ID NO: 380647 - DNA, 448 bp, Homo Sapiens
tgagacactgtggccagccagcttctttttattcagttagtcaaccatataatttaccttccaaaccaggccactttggagaaaggaagagaatgctattaatcaataagccaagacaatagggaactacctggggtagaccaagatgggcagtcaccatacaccatcattcctgccacagaacctttgcacatgctgccctccctactccgcactcacctgtctaattgggacctgaagcttcagcatcccttctttagggaagcctcttccaatacaccaatttagtcagatcccttgttaagcattctgctacaacttgtttcattaggggcactaatttagatttctaaatacatactcaattgtgtctgtatttgattaactctctgttttgaacaggatataaactccatgaagttagagactgtgtctctttttgttcacc

SEQ ID NO: 380648 - DNA, 222 bp, Homo Sapiens
taactccctacccactagtttaactcataggcaggcaattacgatacgcttctgagtctttcttcagaggaaacaaaaatgaaaacaaagtatggttctgtaaaagataattaagtcagccatatatttttataggcaaatatgaatagctctcaattaccagttgtaatggaagtcagagatatcaaaattcataagtaattcataaactgtatttcagct

SEQ ID NO: 380649 - DNA, 549 bp, Homo Sapiens
  misc_feature (28)..(28): n is a, c, g, or t
  misc_feature (59)..(59): n is a, c, g, or t
  misc_feature (63)..(63): n is a, c, g, or t
  misc_feature (65)..(65): n is a, c, g, or t
  misc_feature (67)..(67): n is a, c, g, or t
  misc_feature (70)..(70): n is a, c, g, or t
  misc_feature (133)..(133): n is a, c, g, or t
ttcggcactaggtgggagcggcagaggngtaacgatgaacagcgggaggctctcagcgncacngntntgntagcagaccacggcgtccagcacctgcagggagacctctatgtccacagaggacgcggtccgnacgcacagcagacagatcatctgaaacccatccttgcgaatgtaactcgtcgaggtaaacagctattgaaatttgacccaagttcacccagcacccagaaggaattccgaggacaagcccaacatccatcccactgcaggacaaagtcagccagctcttcctcccaagtaggtgatgtgtctcccattgtctgtgagggccttgaaaacctccagccttttcgtgaaggtctttcgttggaagggtaattccttggatgaccttaaaagaagagggctctgaggacccccaaacgctcgcccgaggcaggagttccaaacacgggcccagcagggacaggacagtcagtgggcagcctgacgtcacccatcccagcgtcgccctgggccttacctgcccctgcacgatggcctaat

SEQ ID NO: 380650 - DNA, 404 bp, Homo Sapiens
  misc_feature (30)..(30): n is a, c, g, or t
  misc_feature (209)..(325): n is a, c, g, or t
ccctaatctattcccattggtcaaatatgnctgacttaatgcccaatactgttattaaactttcttatggtatcctttaccattaaaaggtcttaatttttgtaaaattaaatatgcctcttgtaatagcttctgagtttcttatcttcacatttcctttaccctagcttgtataactaaacctggagaataaccttaagtatttctannnnnnnnnnnnnnnnnnnnnnnnnnnnnnnnnnnnnnnnnnnnnnnnnnnnnnnnnnnnnnnnnnnnnnnnnnnnnnnnnnnnnnnnnnnnnnnnnnnnnnnnnnnnnnnnnnnnnaactgtaatactacctttatcttttattaaatctgcacatatactggatttctggattctctattttcctgtgccgaat

SEQ ID NO: 380651 - DNA, 160 bp, Homo Sapiens
ataaggcatgagccactgcaccaagcctattcctaatctattccattgggtcaatatgtctgtcttaatgccaatactgttattaactttcttatggggatcctttaccattaaaagggcttaatttttgtaaaattaaatatggccccttgtaaatagg

SEQ ID NO: 380652 - DNA, 479 bp, Homo Sapiens
  misc_feature (373)..(373): n is a, c, g, or t
cttccatccaaagtcaagactgagacaggcagtgttccttctttagacagggcatttcctagtttatccattgatggtattatcctgaagagtcccaactctgcatttgagtctctaattcagtcttccaggctgctgtagccccatgcattatccctgtgtcccacagccttgtggatcattgaaacccagctatagtcattaggaattatcaaatgacctgagagcaaacactatttcaagctttcatcattgtagaatcttcctttcttatttcttgtctcttatattttccctatcactttactttcatttcagccatgacttattaggatattttattcatcactcttaaggtgttctctactggganggaaattttctgtacatctactatgctaggtagaatagaagtccctattattgttttctataaaaattgtgtaatataaaaagcaaatgaaatgtagaacacaaag

SEQ ID NO: 380653 - DNA, 503 bp, Homo Sapiens
actgggtaccactatccctggattttcttccttctctgccatctgtgagacagcaacacgatctctcctcttcttgctcctcctcagcctactcaacatgaggacaactggatgcagacctttctgatgatccacttccacttaggcaatagtaaatatatggtctcttctttatgattttaataacattttctcttctctggcttgctttattgtaagaatgcagtatgtaacatgtataacatgaaatatgtacccatccatatgaacaagtaaggcttctggccaacagtaggctattagtagttaagtttgggaggagtcaaaagtcatatgcaattttcagctacacaggaggtctagtgcccctaacctctacatcatttatgggccaactgtaatttgcaataaattttgactgctagaaataataagaaatattagtttttatgatatttattctttcttatagtgtaatttacatgtccacaatagtaaatttg

SEQ ID NO: 380654 - DNA, 659 bp, Homo Sapiens
acattgtagagaggtctgcattctcattggaaatgtctgtttagctttataaaacaaacactttgctgaaataggaaaatgagccttattgacaattaagtgcttcttgcagcaggtggtcaaagaaaagcatgactaatacgacctattagagtaatctacatctggaccattccttaagtttttcctcaccgacagtaccatcatgccttgagtgttcttttctcccaagtgctattccttaaacacgagagtttaccagttgcctaataatgcaataaaaaatgctttgaggataggctaactgcccataaaaacaaactcaaattgcttataaagtttcttcccatgttcccatttgatgaaaagtcttacatcacatataactgggaagcaggggtccctcctcaattttcagacattttgaaaggatgacagttctgtttgttagacgagtaaacctctatattcataagttctaaaatccttcattatgagggattcaaagtatttataaaaacactgccctctaaaaatttcctcagatctgaagtatggtcttggtcctgaatatacagtgttatcctatgtttaaaagggtgatccagacatgagacgcaactagttggtgcataagaaggccccacttcagattggtc

SEQ ID NO: 380655 - DNA, 472 bp, Homo Sapiens
  misc_feature (100)..(100): n is a, c, g, or t
  misc_feature (307)..(307): n is a, c, g, or t
ggagtggtatgttttggggagaatgtggccaaatttgcatggggaactagaagctttggggaaaacgtagagatttataattcctacccttttggggttncagattctgtatatgggactgaaaatggtctgcaaggagaatctggcccaagaagaaaagggtgaactggccctagactccctaagctcaatatcaaggtctagattattgagagctggttccagcagagtgcatggcttactctgacaaggaagatgtgcttttggggaactgtggccaaacagagtggaaacctggggcccatgncacaaaagccacagcctcaggaaaatgccgaaatctaccagtgaactagtcagctttcccaggctcccttggcaagatatttggaagcaggactggcctggctggactctgtaacctcttagtgttcttgggagaagccctcaagagagaaagcagaattctgcc

SEQ ID NO: 380656 - DNA, 424 bp, Homo Sapiens
  misc_feature (293)..(304): n is a, c, g, or t
  misc_feature (383)..(383): n is a, c, g, or t
caataaaacaacccagggaaaatcattctaattttaggagaaaaattaacacctacctaccctacaacctcacaattaaaatctggtggaattctataaccttccacatggtttgcctcttgtgtggtgggaaagtgagagggagcttttattgacttctttgagagaatgaagaggaaagaagacaacactgttgaagaatcttctataatctagatgtcagaagaagccacccactctttgattctaagattgccttgctccatcccccattctatgttctgttctgttgnnnnnnnnnnnnccctgaacatttctacaaatactttcttctagtatttgtgggaatacttcattgctataactaatgggcgatttgtttnatctccaatccagcattgacccaaagttcagacatgactct

SEQ ID NO: 380657 - DNA, 534 bp, Homo Sapiens
  misc_feature (383)..(383): n is a, c, g, or t
gaaagatttgcctaaagtgttgatattgaactacgcctgtttacctttaatcttcttttcttcccttgcagtatctcatcagggttgcccccagatgggaactaagaatgaattttggtaacttcctagggatggttgcatgaccttgtttttttctatgtgttctttaagcagtgagttctaggatgtatattcaggggtatcatagtatgtttccccttttgtggaaaaagtaaaccccttcctaggcatagacctcagacacaagaaaacagcctagtacgactgtttacatgatgtctgccttctactgagcagttgtcacctttcccattgcagtgttgccttaacccatctggtgagtgccattggtgttcccaaantcttaaagaccttgtttggactttggcctttaaaagtggccagttctactcttcttagactgattatgcaatttttaaaattgcttttcactctgtactttttccctgtctctaacttgatgcttactcttggctttttaacaattagggg

SEQ ID NO: 380658 - DNA, 253 bp, Homo Sapiens
cctcagaatggcaaagatcaaagtttgataacatggttggaaagtatgcagaccgatactctcatattcagtgatgaagtgtaaattgatacatcctttgtcagtacggacaggtttcccaactctaggggtgaaatttatacagactacagtgtgaatgacaaccacttcaaattgggtgatatgatgactttgactctgtggagggtcatttggcaaaatatctcaaaataaaaatgtacatacaatttga

SEQ ID NO: 380659 - DNA, 262 bp, Homo Sapiens
tggagaggcagggtctcactctgtcacccgggctgaagtaaactggtatgatcatagctcattgtagcctcaaattcctggactcaaccgatcctcttgtttcagccttttaagtggctaggactgcatggtggcatgcacctgtggtcctggctactcaggtgggagggctcacttggtccaggaagtctaggttgtagtgtagtgagctgtgattatgctactatactccaacctgggctacacagggagaccctgtccc

SEQ ID NO: 380660 - DNA, 441 bp, Homo Sapiens
taaattcctagttaagtaaagtgccacatgtcagagaacagggaaaacaaaggtttctgaattccatcctggataaaaagcaatctgcttgcatattgtcactacctgtttcagtgaaatattgctagtcgctccactgaggaggtttagtccatagtatttaatgaaagatttacccattccttgaatcttgtttactgattcctcccatcccttcttttcttccggtagattgtcacagtctgtttacaatgctcagttcagcctggcttccctcatcagcaaggcgtggtccctagctattgaaaaatattactatttcacaggacagcagttttttgttttatttctcctagcactttcctgtgcattggggactcatctacactggatatgacttttgaaagaacaggaagggatctatcaggaccaacagttttc

SEQ ID NO: 380661 - DNA, 518 bp, Homo Sapiens
taaaaaacaaaaatcacaagatcctctcaaataacacaggaaatccacttaacaaaatccaacactctttcatgataaaaaacactcgagagactaagaatggaaggaaactccctcaacctgttatagggcatctgcccaaaaatccacagttaatgtcatacttaatggtgaaagacagtatgctttcccctaagatcaggaaccagacaaggatttctgctttcaatacttctattcaacattgtactggagtttttcgccagggcattagatgtaaaagaaatagaaaacattcagaatggaaatgaaaaagtaaagctacctctatgcacagatgacatgatcttgtatacagaaaatcctaaggaattcactaaaaagctattaaaatgaataaatgaattcagcaagttgcaggacataagatcaatacataaaaatcaatttgtgttgcacttgtaaagaacaatttaataaatgacattttaaaaacaattgtattaacaacagcacca

SEQ ID NO: 380662 - DNA, 484 bp, Homo Sapiens
  misc_feature (156)..(180): n is a, c, g, or t
atctaaccaaattacaaagtttagacaaaaacagtctctatcacaagaaaatgacttaacgaaagttacaaagtatctcaacaagtcagaagtatgctttggatttccagactcagatctaggtactcccagcactggtgctgctgctgcctctcnnnnnnnnnnnnnnnnnnnnnnnnnaacccatttctgcaggatgctgcctctttctacgctaattcttcccagaggagtttcatactacaaacgacaaagacattgtctaaagcattacagaaattccttcagtcttgcctctgacttatcacctaaatttgtatcgttaggatgaaaggattatccgctataccttaatcatgacgctatgacaacaaaaagttatggtggatccaaggttccaattcagctggtcccacacagtaaaaccaatgcacacttccagtctctttgttgctgttctgataaagcaattaaaaaccattca

SEQ ID NO: 380663 - DNA, 462 bp, Homo Sapiens
tggattaacccttccacgttaagttcctggtaaacagattcgggacagttatttgtgaacagaaagtttactggaaggaagcaaaattaagcagaggaagaaactaaactgtgatatagtcacaactatggtctcggctatgaagctgtgattgcctttcagatttgtcctgaattaaggaaaagcacttcaggtcattctgctagagatgcttgggaacaataccttgaaaaacatgaatccagtggacccatttgaggaggcccgctgtcaactctaaagccattgtaccactccatagcttggactgccgagcaactaaccatgaagtatgaagagaatctcaaagcaggttttcttgaaaaatgaaatgtgaacgaaaacttatctattccatttagtcacttcttattgatagagaagtttccatctgaatatctgaattaaacattcattaacaga

SEQ ID NO: 380664 - DNA, 515 bp, Homo Sapiens
acttaattattaatagttctgagtggatacaaacaattaactctcttacatttgccttttggaagcctaagaataagttaaagcaaataaaatatatccagtgttctgataacagattcttagtagttaatttatttctgtcttctaactataaatggatgtcttgaagtttgccagtattttcagtagtatccttcctaattcacatttgtgcttccgttttcctcagtgatcccttctcttatgctttgctacaaggatcatctctcataaactgcctgagatgtgtgtactttagccagttagttctcaagccatttcttcttttcattttctcatttagttccctagcccccagtcatccctctgttttcctgttattcccagaatttgccagttatcatttctactatggcaccacattagttaacaagaatgttttaaatctttttttcccccattctgagttatgcttgctttaagtttcagaatttggaagtacttacaaataacaa

SEQ ID NO: 380665 - DNA, 498 bp, Homo Sapiens
  misc_feature (47)..(263): n is a, c, g, or t
  misc_feature (297)..(343): n is a, c, g, or t
agatagaatccccctccgttaacccagcctgaattgcattggcatgnnnnnnnnnnnnnnnnnnnnnnnnnnnnnnnnnnnnnnnnnnnnnnnnnnnnnnnnnnnnnnnnnnnnnnnnnnnnnnnnnnnnnnnnnnnnnnnnnnnnnnnnnnnnnnnnnnnnnnnnnnnnnnnnnnnnnnnnnnnnnnnnnnnnnnnnnnnnnnnnnnnnnnnnnnnnnnnnnnnnnnnnnnnnnnnnnnnnnnnnnnnnnnnnnnnnnnnnnatgagccactgcgccagacctccatgttgggaannnnnnnnnnnnnnnnnnnnnnnnnnnnnnnnnnnnnnnnnnnnnnntccagtcctgggccagggtaaagctggcccgagtagttaacaggtggcctataccagctaatgccctttagatctcgagcggccatacagagtggggtcactagaaaagcccactcaggctgctgtggctgaacagtgggttctttctgggttga

SEQ ID NO: 380666 - DNA, 404 bp, Homo Sapiens
  misc_feature (268)..(344): n is a, c, g, or t
tacatatttcccagactaaagttaatgttgtaatggtccattagttttcttcaccttctttaatattttcttggaagaaataataaaacacaagcaccctaaaaagttcattatatatggctcatttccttatacattatattagctctaacatatcatcaaagcaactgctttgtcgaatttacatttttgaagttgttacttcaaagggcaacgatttggcagggaaatatccatattttccccatgcaaagctaatgattttctnnnnnnnnnnnnnnnnnnnnnnnnnnnnnnnnnnnnnnnnnnnnnnnnnnnnnnnnnnnnnnnnnnnnnnnnnnnnnatttgagtccagcgttgggtaacatagtgagatcctgtttcaaaaataataataatgatg

SEQ ID NO: 380667 - DNA, 328 bp, Homo Sapiens
taaagacgtagcactgtcaaggatagaataggaattgtctggggcaaactgggtggttggttatcatctatatagtgaggataaaagactgtagacaagttaaaaatcaaaaacagtgaaagctatcaagatgataaggcacacaagcaaagatgggctgctagctgtccaagaaattatttcctggagagttgtgttacctagattttcacagagggtccaagacaacaggccaagggatgatactgtacttagaagtacaaccttttctacttagcatctgacacttgtgataaattaaatactgttaagatattttagtttcttt

SEQ ID NO: 380668 - DNA, 325 bp, Homo Sapiens
gggatttatataacgtacacattgtatccaaggatctcaaatacttgcagtcacgtctccagatctgagaaatcacggttcaatggaagccagaaagctggacgaatgctgggcaggttgcatggggtgtaaaatcccttggctaagtctatgatcaaacaaggtcaaagttggttggctagagctgggctcaatttctcttctcaaatatatactaccagtcagtaagttttaccctttcttaaaccacacacccatctccaggctactgcggagagttaagaccaactgaagtagccatgtcctcatgataatgcatcaggat

SEQ ID NO: 380669 - DNA, 199 bp, Homo Sapiens
  misc_feature (146)..(156): n is a, c, g, or t
tgtacatcatctgagatttctctctgtcccccaagcctttctcattcaattatcactaaatcatattgacgatacctctcttctgcctccattttgtattcccactgccactgggaacatgaacatttacaaaatggcttttattnnnnnnnnnnnctgccaacaattaatgttatttcttacgggaaaaaaattaagc

SEQ ID NO: 380670 - DNA, 348 bp, Homo Sapiens
taaatagtcattccacatattgtgagatgcattgttacaggaagtcccttgccctcccaaaagccaccccacttctctcaggagaacggcccagttctctcctgagtccacaaaggggaggttacaggattgctttcatgtaaattatgtaatgcaacatttaaaaaaatcttcaccttaatactttttgttttattttgaataatcagctatcatggtccccatttttgtccctaccttgagatgtatgaaggcttttggtctccctgggagtgggtggaagtgtggaggcatccagggcatacctgtacactgacttgagaccagttcagtaaaagtgcacacctt

SEQ ID NO: 380671 - DNA, 468 bp, Homo Sapiens
agtaaaaatcctataaaaatactagtatttttctctgagtttaaaattcaacacatgcctactgatatggttaggctttgtatccccacctaaatctcatcttgaattgtaatccccatagcccccataatccccacatgtcaagggagagaccaggtggaggtaattgaatcatgggggcagtttcccccgtgctcttcttgtgatagtgagttctcacaagatttgatggttttataagggattatttcccctttgctcggcacttctccttcatgctgccttgtgaagaagctgccttgcttcccctttgtcttccgccatgattgtagatttcctgaggcctcccgagctgtactgaactgtgagccaattaaacttctttcctttataaattacccagtcttgggcagttctttatagcagtatgaaaacagacaaatacacctactatataaaacttaaaat

SEQ ID NO: 380672 - DNA, 214 bp, Homo Sapiens
acccacactcttctggttttccttctacatcagttcttctcagtctcttttgctggttcctcctcttcttgtgtggctctgaatgttgaacatcctaaagccagtccttcgatctcttccctatctacgttcaccacaaaactgccctcaagataatctcatcctgtctcatgtgttaaatacactaaggacagccgggcacactggctcaccc

SEQ ID NO: 380673 - DNA, 181 bp, Homo Sapiens
tgaaccactgatgggtaaattgaaaagcttagtgattataggacagtggttgcccagtcttgtatttcatgggtcagtaaaatttaaaagaaattttggggattgatgtaagatcatctgtttttcatgttgcaaagtaaggatgttttaaaacaaggtagctgggcgcagtggctcatac

SEQ ID NO: 380674 - DNA, 518 bp, Homo Sapiens
acttctaaaaagtagtgactgaaatctggcaggtaatttccctgttggcatccaaggatgagcctaagagaacaaaatggccaaagccaagtctctgaacttgcttactcactgagccagggacctataagtcatcccagctctgccaataagttaaaaaggagagctgcccctgagacagcagagccattaggatgtgggagatgggccagactgaaagggaagcctctgaaccttgaaggaaagcaccgtcatgcggcttgggagctgatggtccctagcagacacgtctgtcagcttaggaagtgaggcggcaaagacaagccatcccaacatcacatggtgacaaaccaagcaggacagagaggaccagactggacaggctctggggccgggacagatgggatgaaagagaccagggcagaagggggcccatgccacgtgagtttcccaggggccgggataacttcagaaggacccctagtgttgcgtataaaaacatcagaattggggactga

SEQ ID NO: 380675 - DNA, 130 bp, Homo Sapiens
  misc_feature (1)..(1): n is a, c, g, or t
nccacaagcatgagccaccgcacctggcctaactcactttactctttaatatggacaaatcgaggagtaaaacaacttgctcaagatcaatgtggttccaccaggttgcggtgggctcatggccaaaatt

SEQ ID NO: 380676 - DNA, 197 bp, Homo Sapiens
actgaaaggcataggaaagaagaaactgggaaaagagggtacatgagggaataaaaatttggaaaaccttctgcataataactggagaatctagaagtccacatgcatgcccagagatgtacacatactcagaaatgacccaagaaatcctaagctctcacctctggctgatgtttaggctcatgcaagcctatgtt

SEQ ID NO: 380677 - DNA, 587 bp, Homo Sapiens
  misc_feature (21)..(21): n is a, c, g, or t
  misc_feature (76)..(76): n is a, c, g, or t
  misc_feature (87)..(87): n is a, c, g, or t
ttaactgacctttattggtancatttggaccttttcaaaacccgtccctcaaatttaaaaaaaatctaagcatatntaattcacccngttctgaaaagaatgtgttaagggttactaaaagtgactgagagcaggaagaaatgatgccaagaagtgaagagcagagccatggagaagtgggggtaggggggcagctatttcagaatgtaccagcatttcctgaaggtgagagatatgcccaggagagcagatactagattctttgtttacgacactggatgtgggaacaggtttaagcagagatgctggcagaagctgtcacagaatgaatttggtagaggaaagcaggggacagggacctcatccagaattgtaccttcaacaaggtggctatagttaatgacgatatagtctcaaaaactgcagagagagtggataagtgttgtcaccacaacaatgataactatgtgaggtaataaatttgttagctagatgtaagcattccagaatgtctgtatacctcaaaacattaatgttgtacatgatcttacactgtcaatttttgaaacacattaaaacttaaattt

SEQ ID NO: 380678 - DNA, 401 bp, Homo Sapiens
atgagccactactcctggcccttgttttctaatctaatatttttattagtccaaagaatataaatttttcatcaccacaccctctacctcctggaattattcaaaaggaagcttctatccttcccttcaccttgtccctgtcttttctacaagagtggagaaatcacgtatctgataagaaaagattggaaagatgaaatctcagggtggagggcatcagtcccttggactttcttttggagctctgggcttgtccatggatgagggtgtcatacgtggcatcagcatgccatgggtcagggcttggtgctggccttgtagagagaggagcagacgtgcacttctttctgtctctactcctggggcccagactagctcctttgcagctgctcttctgctgt

SEQ ID NO: 380679 - DNA, 411 bp, Homo Sapiens
aaaactagtcttccaaagtgaaggtgaaaaaatggcattcccagataaaacttgagagaatttctccctgtcagactgtcttataagaaatattaaagcaaatcttcaggctgaaaggaagtaacactgtatattagtttgtatccataggaagaattgaagaatgctgggaatagtaaatatgtggtaaatataaagggagttttcaaccattgtttggtttggatttatagcatggtacatgaaatatatatatgataatagcacaaaggagttaggaaaaggacataaattatagtttctatttgactgatattaagtattattgtgatatagattgtgataaattaagacacattataatccctagagcagttgctaagttactaagaagataactccaaaaatgta

SEQ ID NO: 380680 - DNA, 454 bp, Homo Sapiens
ttcagtacatgtgtgtctttataggtgaggtatgtttcttgtaggcaacagatcactttatatggaaaatgcaattttcccccaaactaatataattactttctgttcatggtttacaaaatgaccgatatttcccttctatccctttgtacaatatgtgtatctagcagaaaagttcttagctctggctatgggcacagagaaacttctgatagatgattgcattcacatgtttatttaccttccccagaataaactgtgggactggagtacctgtattaatcacaggacagataatcaggaagctctgatcctcttgagcttcacatttatgatcaaaaaacgaacagagtggttttctaataaaatttttggtgaatctaaagatatggctcccatcactaacattgtaaaaggaaataaacctcatacctatatccaggaaaatttccac

SEQ ID NO: 380681 - DNA, 300 bp, Homo Sapiens
catttctacatgatacagtaaacaatctgaaaaagaaatctaaaaaatcccatttacaatagccacaaataaaattaaatatctaggaattaaccaaagaagcgaaagatgtctataataaaaattataaaatattgaagagaaattgaagaaattgaagagggcaccaaaaacatggaaagatatttcatcttcatggattgaaagaataaatattgttaaaatgtccacactagccaaaataatctacagattcaatgcaacccctatcaaaataccaatgacatacttcacagaaat

SEQ ID NO: 380682 - DNA, 464 bp, Homo Sapiens
  misc_feature (263)..(355): n is a, c, g, or t
ctgggcctcaagcagcacaactaacgctcatgggacactcaccgtgtgccaagcccttgcatgcacttcacctcgttgaatccgtacagccgtattttggggatcttcaagtgaccttgaaatggctgtggctgctcctttagaggactccatcctgaccctcttctagccatgcctctccctgtgggaaaggagtctacagggccaaggagacgtgactctgtgaagcccatggctcccttctaaaacattctctggatatnnnnnnnnnnnnnnnnnnnnnnnnnnnnnnnnnnnnnnnnnnnnnnnnnnnnnnnnnnnnnnnnnnnnnnnnnnnnnnnnnnnnnnnnnnnnncttacttcggtttgcactttcctcttccaacttatgctcatttcccccgacccaggcctctccctttaagatcaaatataataattcctggaattccccaaaacaaaaa

SEQ ID NO: 380683 - DNA, 363 bp, Homo Sapiens
aggatatcacatcttctaataattattccttcctataagaagctctcattcagtttgtcttcattcttctctgccccacttctttctctatgggctgctgatactactcaagtactttcctagtttctgtcatttataagcactaatcttcttaccttgctctccaaatgcctgagtggagatgaatgaggatgaatcaggaaggagattaagggtttaaggtaaaatacttgcagtgcttcaaaagtgatagaataatgagtgcctttacctgaatgatcactgtctatgatcctaaaaatggtctctaggttggatcggtttcgatacaatgtttccagcaaacttgattgtatgttctgc

SEQ ID NO: 380684 - DNA, 293 bp, Homo Sapiens
tgtatctattactaccaattgcttcaaggtcaggagccaactcatgtattagacatgtaaatcttgtgaaaatattcatattggaaacagcatgtagcaagtgcaaacagaactaaataaatccttaaatttatcacagtcccttcaaagtatgaattcttcttctagcattacatcaaatttgataaaatcaaaaatattttatctcaatgttttaaaagtgttgatgctgtatacattgagttgttgtacaattgaatggaacccacattcaaagtttttcctcaatgtta

SEQ ID NO: 380685 - DNA, 405 bp, Homo Sapiens
cacacattgtgagcctgaggcttaggacggctctgagcagtttctaccacctacttagttctgtattctccaaatgagtcatactgccgggtgttcctcagggcctgcttttaccccaccagtctggcttccttcctcaggaacctcgggaagcttccccttctcttccgccacctatcgaaggccatgtgcacaagttcctttagcagtttccacgttcccaccttgctacgtcacggctggcccctcagatacaactgatgtcatcagcctgaggattatggccacggatattgaggaataaacaccaagagctagaggggccttggaggaaacaacattttgtttctgttgctagagtgactggtgacaaatagaaaatggagggaagattgatgaatttta

SEQ ID NO: 380686 - DNA, 369 bp, Homo Sapiens
tttaaattggataatttccattgatatatcttaagttctttgattcgtctgtgttctcaaatcttctgttgaattaatcttgtgaattttgcattttgcttattggacttttctcctctagaatttcagtttggatgactgggtgtatggctcaggggtagagaatttgactagaatttcaatttggttctttagtatctatttcttcagtgatattccttatatgttgagtcattgtcataaattttccttttaatcttttaaatatggtttcctttagcttttgatcatatttgtaatagctactttgaagtctttgtctgctaactccaacatctacactcatttaaagtcttttcttttgacagc

SEQ ID NO: 380687 - DNA, 225 bp, Homo Sapiens
taatcgcagcactttggaaggctgaggccaagaatttgagaccagcctgggccatatagtgatggcttgtctctacaaatatttaaaaattagccaggcatggtccggctaagcagtcccagctacctgagaggatgagatgggaggactacttgagcccaggaggtcaaggccacagcgagctatgaaggtaccagtctgggcaacagagtaagaccttgtctt

SEQ ID NO: 380688 - DNA, 303 bp, Homo Sapiens
tttaagggagggcataatagtggcatattaccctagcacaccctgcccattggcctggcatcatggaaaggtgcctggtctattttatggaggcaatcataaaactgggtgtggtgatttttgttgttgtttaaggctttgattttaaaaaatcaaggttggaagcacctatttagattgtaaactagagaggacaaaggaaagaagcctgggagtgttatggtgagaaaagaggactagaatccctgtcagccacctatgtggctgctgccacccctaaaaagtgttgtgagtgcaccaagg

SEQ ID NO: 380689 - DNA, 363 bp, Homo Sapiens
cgtttcctccagaagagctatcggaagctggagaagaacccagagaaggaggaggagcactgggcccggcttcagaggtactccttgtcgctccagagagagaacttcaagaagtgaggctgccaccgccctgggatctctgaaaaggaggtttcagccacgaggcagctgctcccaggacactgaggccaagagaaatgtaacagagccacagctccacaggcctgcactcggagtctggggcctctgcagagccagcaaggggaaaagtataatctgggggaccttcaaccactaagcctcttgtcagagccctcaggcaggcagatgtgtcacccaaataaacagtgatatcgtctccag

SEQ ID NO: 380690 - DNA, 485 bp, Homo Sapiens
  misc_feature (46)..(75): n is a, c, g, or t
  misc_feature (224)..(316): n is a, c, g, or t
gctaaaagagcaccacgtccttccccagatgccccaaagagggttnnnnnnnnnnnnnnnnnnnnnnnnnnnnnncttgcaggctctcatggtaacaatgaagcgtcagagactaaaacccacaactccccaatctgttgaaatgaactaacaacgtctcatgctttactttatcctttctggcctgggctcaaagtaggtatcagataatacaagtttgtagnnnnnnnnnnnnnnnnnnnnnnnnnnnnnnnnnnnnnnnnnnnnnnnnnnnnnnnnnnnnnnnnnnnnnnnnnnnnnnnnnnnnnnnnnnnnnaatatacagtgggtaaaagtttgtgctaaaatgtatcatttatggctccaatttggtattattgaagggagatgtcccttcaatatgggagatgttcccttttactcctgactgatttgtttggttggggccttataatgtcatagaaaatgtgcattttgagtggtta

SEQ ID NO: 380691 - DNA, 421 bp, Homo Sapiens
  misc_feature (36)..(36): n is a, c, g, or t
  misc_feature (51)..(51): n is a, c, g, or t
  misc_feature (94)..(94): n is a, c, g, or t
taaatatctatgcatgagggggaaataattgggaanttttatctcctctgncaaaggggaaaaaggccaatttaaaaatattactttttccccnttcagacagagagcagaggtgagccacacgaaatctaagttcgcatgaaagagcgatgataaaaaatgcaggtgctgtgaaacatttatatggaccaagtgtaagacagtatgtaggcctgaatttgaaatgacattttggtataaaacagatctcccaaaggcaaatttgaaacttccagaaaagtcttaaaatgacatctttcaaaatgaagaatcatcaaataaatatgcccaagtcattacctcgaagtacttttctaatgagacaggctgaagaaacagctaaaaataattgaccccagttttacagctgaaagttataaaa

SEQ ID NO: 380692 - DNA, 461 bp, Homo Sapiens
agcatttgttttgattgagcttagtatttatggtcattaaattataagcttcagaaactctctaaggctttattcttagtaaagaaagctttattcagtagaagaaacagtaacaataacaacaactaacctccacaaaaaatattttaattttggcaacccaatcgactcaaacctattatgtacacctaagttgcatggatcctaagaaagagaaaacgggaaatatagcagttattttaatgttcacattctagtaagttttaatgagtatattcaaccctgtttgataactaggtgtgctgcattgtcatggttcacgctagtcttagtttcttaaaagaaaaagctgtcttcaaaagctttagattcctctgatcaagaatctcttctattcaattctaataaaattatttcatatacatgattaaggtgagtaggtagatgatagtgatggggga

SEQ ID NO: 380693 - DNA, 436 bp, Homo Sapiens
gagaaaccattcatcttccattcattcatcttccgttcccagatcttggaagaatagtcactgtaatgtgggggctagaagcattggcttatgaagtggacaggcaaaggtaggttttcagctccaccacatcctagctaggtaaacttggacaagttgcttaaactctccactactccaagaggttacagatcactgaaagtacagacattggcaagtattttttggaaacacattatgggtcctaaggactataatatagtctataaatctggaattttatgctggaaaatacaacttgttttcaaatggaaaatgattgtgttttgtataaaacaacagagtcacattttaagaccaggctggataacataacaagaccccttctctacaaaaaataataaaaataagccagttataaagagagctgaataat

SEQ ID NO: 380694 - DNA, 472 bp, Homo Sapiens
  misc_feature (103)..(103): n is a, c, g, or t
  misc_feature (118)..(118): n is a, c, g, or t
ctcccttcactctcacctgaggctgggctggagcctggtgtctgccccaccctgctggtcagccccctaggacctgagccccgtaaagcctggactggccaangccctggggccagcnagcaactgggtgcttggcagctcacgaccttcactgggcccctgggtccctcacttctcccttgtttctaccttcctggcttgtcagattcccacagctcttaaggagaaattcagtatttactgcagcatgtgttttcagtgtgatggttcatctaggtaccctagcctgtcattgctggagttggaaatctctgttgtctgctgttgttttgtgaaacaagcgtgtgaggttataagtttccctcaacgtaccacactaaccacatttccctaagttttgatgtgtagtgttttcactgccattcagttcaaaatattttctcatttcaagtatgatgtcttcttagaaaaa

SEQ ID NO: 380695 - DNA, 520 bp, Homo Sapiens
aaatgggaaagccagggcatagagaagttaggtaatttgtccaagctcacaaagtttagaagctgggggaaccaggtacaaattcagatggtctgactccacaattctcattcaaagaaaaggtcatgatttagtcatttgcagaatcttaggcaagatcaaacctctgggtgggaaacctgtacctctgaactctcatttcctgactttacttccatagtgttccctgcccagtggctggaggattctacttgatgagatttttgagattcctaaggaccccctaccgttctccaataatttaccttacccaactctcaagctgatagaaatccaactgataaggtgctccttcagctatgacagtggttcccacatggggatgcaagactaaaggcacagcttccctggcctctgagctgaagacttgaattcagtggcctggcctgtgccctgggagcccgtttttttgtttcggtttgagacaagagtctcgctctgtcgcctaggctggagtgca

SEQ ID NO: 380696 - DNA, 343 bp, Homo Sapiens
tcagtcatgcatgtgtaggaatctatgaatttcatttcaggtgagtaaaaggagtgttataaggtagtcattattcaaggggagtcctgggtccatcgggctgagactccacgtgctacggcaagaaactgccctcctaggaagagctgccctgctgttgcccagccctgcatgtgactagatggctcaactggtctccaattcctcttccttctcctgttgttctcattaccatctgattcactcatgtcttgtttctcagatgcttccatacctcgagatcaaaggaaagcgtgcaattcattatttcctcccaaatggccaacatcttctatggtccctt

SEQ ID NO: 380697 - DNA, 583 bp, Homo Sapiens
ggaaaataaatgcccaactccaacccactctagccattcagtccacctgtgcagggtgggaactgagacacatctgtgaagttcacagtccagaggcacaggctacctaaagaacagatacctaattgtgaaattatagaacacttccccaccccaacaccataccaccacattactaaaggctaatcaacagcagttccttttaaccagtgcctcatgtccagctataaagaaaaaattacaagacatattgaaaggcaaaaatgtagtttgaagagacagagaaagcctgagaaccagcctaaaatatgtcagggatggtggaattattaggctggaaatttaaaacaactattattaacatgcttagggctgtaatggataaagtagacagcatgcaagaacagatgggcaatgtaagcagagggatggaaatcccaagaaagaaccaaaaataaatgctagagctcaaaagcagtgtaatcagaatgaagaatgcgtctgatggcttattagcagactgcacacagccgaaaaagaatctgtaaacttgaagatacctcagtagaaacctcccagacta

SEQ ID NO: 380698 - DNA, 383 bp, Homo Sapiens
tctcacatgacctaatcctatttagccatttggggccccagatcttactaaaaccctacaggaaaaggcacccatataacaatcttataaatggctcttaatgagtaatgtgtgaaaaaacaaaaggacagtaagagttggtgagcaaaatgagctcagtggttatactctcattcacacagaaaatggagaaataacagtcagaaacagtcattcaaaaagttttaaaccagacatcaatcccaatttgtctgaagaaagatattcaactttctactcttctactgaactttctacattgcatgatggacaaaaatcataaatacaatttcaagaatgacaaaaatatcagcaggacagtgaacctcgcattaaaaagatga

SEQ ID NO: 380699 - DNA, 473 bp, Homo Sapiens
cactgtgaagttaggtagggggtctattgagaagttcaggaagatcttggtcagggaaatcatcttctccaactaacttgccaagcctgattcctgattttacctttcactatataacttacctacccactctttatacccaagtgtcttacccaggggtgaagaactgaaacatcttcctgaaccagcctctgtcaccactgtcctcctggcagcatcctgaattgcgaagagccaccccgccccccagacattcagtgacctagactcagacctctggggaaggacacagtctccaggctcagccagtagccaggggactgtgacagaaagggacatatggccaagtacctctggtgagatacaaacctggactcttggcaaacctggtgagaaagaggtttatctcaaatcaatctcgctcttcctttccaccccagctcctttcccactccctgcttctgctgtggttg

SEQ ID NO: 380700 - DNA, 418 bp, Homo Sapiens
gaaaaagatgatgctaaaaatatcaggaaaatggatttgtgcttccaggcaagatggagtatcagggatcagatttaacctcctgtcagaaacaactgaaaaactgttcaaaatatatgaaagaacagttttcaagacactgggcatcactcatgaaggacagtgatccctgggggatgggaaacaaacaaactcctacaacatactgtatgaagaaagtttttaggttatgacatagggagaagaaacccaggcacatgatggtgacctccctgaacagaggagatgaaactgggaatttagtaaagccaaagtggagagagctcaggatgcggagtatagcagtctccccttatgtgtggtttggctttccatggtgccagttacccagtcaaccatgatctgaaaatattaagtg

SEQ ID NO: 380701 - DNA, 426 bp, Homo Sapiens
aatgtccaaaagtgggggaaagtgctatttcctattttcaccaaaattggggaaggagtgccactttccagctccacttcaaattccttaaaatataactgagattgctgtggggaggggggagggcagaggctgcggtttgactttttaatttttcttttgttatttgtatttgctagtctctgatttcctcaaaacgaagtggaatttactactgttgtcagtatcggtgttttgaattggtgcctgcctatagagatatattcacagttcaaaagtcaggtgctgagagatggtttaaagacaaattcatgaaggtatattttgtgttatagttgttgatgggttctttggttttctgtatttttccccctcactttaaaacatcactgaaattacaataaatttttattgaaatgtcaaaaa

SEQ ID NO: 380702 - DNA, 560 bp, Homo Sapiens
  misc_feature (85)..(85): n is a, c, g, or t
ggcacgagcagttcctgtctgaggaatggtcactgccatcactgcttcttgctccagccccaccccagctgcccctctgtgatcncaggtgtctcccttccagctgacgtggacccgagggccccaggaggagggcagagctgggcttcctggttccaggggttttgagggcagatttctgatttcagcagcactgggtggctgcacagccctttcccttgggcggctttcccagctcacaccaacacaggacggggtcttggggtccttccttggctgtgcccttagtctgtggctcctgtagtctctggccaaccctgtcctccaaacactgctggagctcataagcccatagaatgctgcctcctggagttctgcaggacgagcagaatggaccacaaccctgggttcccagcgtcactcactttggtccatgtgaggccctctctgatttatttactcattcatccgttacattcatccagtaaatatttaaaaacatatagcaagtacctatgaagagaacccctggttcaagaataaaatcattaacaatttca

SEQ ID NO: 380703 - DNA, 370 bp, Homo Sapiens
  misc_feature (15)..(15): n is a, c, g, or t
  misc_feature (28)..(28): n is a, c, g, or t
  misc_feature (49)..(49): n is a, c, g, or t
  misc_feature (272)..(272): n is a, c, g, or t
  misc_feature (283)..(283): n is a, c, g, or t
  misc_feature (314)..(314): n is a, c, g, or t
  misc_feature (322)..(322): n is a, c, g, or t
gacgtgattggaacncccaggagaagangactggccctagagatgttgncccttcccaggcaggcttttccatttcaaaacctgcccaaccaattgagaagtttgtaacagatatcgatgaactaggcaaagacctacttctgaagtgtttgacatttaacccagccaaaagaatatctgcctacagtgccctgtctcacccatacttccaggacctggaaaggtgcaaagaaaacctggattcccacctgccgcccagccagaacacctcngagctgaatanagcctgaggcctcagcagccgccttaagctnaatctgcngagaacacccttggtggcttatgggtccccctcagcaagccctacaga

SEQ ID NO: 380704 - DNA, 454 bp, Homo Sapiens
  misc_feature (29)..(29): n is a, c, g, or t
  misc_feature (75)..(75): n is a, c, g, or t
  misc_feature (87)..(87): n is a, c, g, or t
ttccgatttaatccgactcccctttgggnaatttgccctcgggccccaggaattcggcacgaggtgcttatcacngccagtgggctnaagtattatacgtgtggttggcttcctcattacatgacaagccccactagggcagggacagcctcttattcttctgtttcccccgtgaccagtgcctgccacacaaatcatgagtaactattgcaggtttcacaaatggctggaaatgggagacacaaagatgaattagatataggcccagaccttaaagaatctataaggagtggaggaaataaaacatacacacaaagatattagagagtaaaaagtattaataatgcctacctgacaaaggggaaaaaatcactttaattagttcaagttttaatatggtgtccatattgtaccatgtaccccaaaatttaggacaaacaatgtctgtgattta

SEQ ID NO: 380705 - DNA, 374 bp, Homo Sapiens
agtaactctataagctgaagctctaagaatcactcaaagttcccagacatgtggcattatgatcacttccttggctgcattaaacctcacacccttaatttgttctgtgatatattcaatatgttcctagttttccacagggtcagcaggatagacagtttgctggtaaagattacagacattattctggaaccaccattgccgtggctttctgtcaagggaacagggaggcatttggaagagaagagcatgcaaccattaaagacagaggaacaaagaccatgtggtagctggtaagacaaaaatagcaattttattgtcaatattttgctttacagggagccaataaagcaactgaaacataaattagatgc

SEQ ID NO: 380706 - DNA, 456 bp, Homo Sapiens
  misc_feature (298)..(298): n is a, c, g, or t
  misc_feature (366)..(366): n is a, c, g, or t
  misc_feature (372)..(382): n is a, c, g, or t
  misc_feature (400)..(400): n is a, c, g, or t
  misc_feature (422)..(422): n is a, c, g, or t
  misc_feature (434)..(434): n is a, c, g, or t
cttatataagcactcctataaattctgaaaaattttatacatgcaacaaaacattcctacatttgaagacattaagaaaaatcacaggtgactcatctgatcattctatatattaataaatattatgacatatatgtgaacacatcacaaatcatattggtacaccaataggcaatttatgcctctcttaagtatgtactgacataacctaatatactaaaatgggaaggggcttttagtcactgaaatatgcatcgtgtaacaaagatgaagaaaatacatggcttgtgcccatcantaaaaaaagattcagactggaagggcttagctttgggttttttcaattaaattgttaaactgtgcacngtggannnnnnnnnnnagaacttggagacctttngtggaagttgggcggtttaaanccttggttaacnttcgccgtgaattggaattggt

SEQ ID NO: 380707 - DNA, 454 bp, Homo Sapiens
caaaaccaaaaactcctcatggaagttgtctgtgttacccaactagaggttgccctccagtttaactggtaacctttgtccctcgttgtgtgttaggaaaataatggttttaaaatcattccaaggaaaatacacttgtatgtctcatgagaacctggagcattttttattatattttgtgattacagttggagatgctgcttatcttatttcttgtaaaactcggagggaaggcttccaagtgctttactgctctaggggccctttgtaatcaaatatgcttcttcagcagtaattttagcatctattattggtgcttcagccctggcagttcggcagccctgcagctttgacaacacttgtgggtttgcagaagatcatgcagtgctgtctagtgctcctgataatagtttctaaatgcttagctgatttatgctgactggaattgtcccat

SEQ ID NO: 380708 - DNA, 486 bp, Homo Sapiens
  misc_feature (232)..(299): n is a, c, g, or t
cagaagggctctcccagggccaaggagatgctccagcacaaccagctgcgggtgaagcggagcccaggcctgcggaaccacctttgggaagggccccatagtcagagccccagggcagacagaacctctgggacacacaccaagggcactcctgcaggtggcccggcctggggttcccaggagcagcaaaggggcctgctgagctctggttaggttacagctggaggtgtgnnnnnnnnnnnnnnnnnnnnnnnnnnnnnnnnnnnnnnnnnnnnnnnnnnnnnnnnnnnnnnnnnnnngctttccaataaccacctaaattttaacaaaggttccttctaagtggtagaacttggggtggtatttttaccttccttcttcatactttgctctttttcttaaatactcattaatgtgcatatatcattattttcagatgcagctatcattattccaaaatacaaaataaagaagataaaataaatt

SEQ ID NO: 380709 - DNA, 391 bp, Homo Sapiens
aagcaactaatagactaaaatgaaaaaatatatttacgcgaataattatgtatggtagagaacaataaatgctatgagaagtaaaaacgagagtatattacatagaattagcactatctactatagcaaacaagtcccaaatttgtggtttaacatgataggggtggctttctagggtagcactcctccaaatgactcagaggtcctggctccttctgtcctttggctttctagagcttcattcacttcaacacaaaactaggaaaaaacagtttgtgtaaaatattatatggaatgatttgtagctaagcctgtatataaggctgcttattaatctggtagttatctgtttatgacaggtattaacatgatttagatgggatcaggaatt

SEQ ID NO: 380710 - DNA, 448 bp, Homo Sapiens
  misc_feature (19)..(19): n is a, c, g, or t
  misc_feature (309)..(309): n is a, c, g, or t
  misc_feature (329)..(329): n is a, c, g, or t
  misc_feature (375)..(375): n is a, c, g, or t
  misc_feature (380)..(380): n is a, c, g, or t
  misc_feature (389)..(389): n is a, c, g, or t
  misc_feature (399)..(399): n is a, c, g, or t
agatccttgaagacttggngcagagcctccagtcagtgctcagtggatgtataacatgaaagagaataaaatctttgttattataacctagtcaaatctgactgctacagttggtattaattaatgtcttctttaaaggaacatttatcaaataaacacatctcagataaaaacagttgttctcccatggtgtatgtatcttcatgtttgtccttagtggttataataatctgtataaattatggaagagaatctgcctgggaatgattagtaaggtgctttatttgtggggccaaatagtagccggtnttagatacgttggtgggccnagaaatgaagggaagccaagaatggagtgatacatcttacaaaagngaccnaatttcatncccgatgacntcaaattttatacctaatgatgtcaaatataggccatttgtttcaggaa

SEQ ID NO: 380711 - DNA, 468 bp, Homo Sapiens
ttcttgctttatgtgcaaaatttgaaataatccaaacccctctctattagaaaacacataacttcctattgccatagaacatacagctttaaaaagaaacactagctatcttttgtcagttttttgtgacccaccagcattctgaagtacaggatatctgtcagtgccattgcttgaaaacattccccagaagcattcactttagaatggaagttagatgttgtaaactcgggaagaaggccaaatgatgaccatgacacaacttgctacaaaatattaaagctgatgctgggggtgagggggcagaatttaaaagcacacttaaaatagttgaattgtgaaaaggcataaagaaagcgtggtgattaagtgtgggctgaggagccagatggctctagttcaaatcctgaatctaacacctattggatgactttgcccaaataattcaatctctcatgtttcctcatt

SEQ ID NO: 380712 - DNA, 331 bp, Homo Sapiens
  misc_feature (17)..(17): n is a, c, g, or t
  misc_feature (42)..(42): n is a, c, g, or t
  misc_feature (44)..(44): n is a, c, g, or t
  misc_feature (319)..(319): n is a, c, g, or t
ggtagcccctgaggganggccgtcatattagccttagttgtncnccattggtccagatactatttgattatgtaaagtcgtgaataccttctatccttaatattatgtgcatctgttcatgagcccattgaacaagtatcagctgactaacatctattatataacatgtcattgtatgcatacgattactcctcttcagtggattccctctaataagaatttacttgggctacaagtattttcatacttcgtgtctattttaagaagtcatcttcggctgggcttggtgggctcacacctggtaatcccaggcactttngaagggccaagg

SEQ ID NO: 380713 - DNA, 386 bp, Homo Sapiens
  misc_feature (159)..(159): n is a, c, g, or t
  misc_feature (165)..(165): n is a, c, g, or t
ctggaagcctagcccctgttatctgaaaccacaaagccctctctaccaaagcacccaagttctcactgcttccctactagttagattttaagaccagatctgtgtgtaactgtgccacacacggttgccatgaaaggggctttgagttctgatcccatnccctgnccaggcagtagccctgctgggctgggagggcagctggaggaagatcagtgcaaactgaaaataaagtttagttataggaactaaaggaagccatgtttcttacacacctgagcatgcagagactaaaattcatgcctgttacccatggtcacgtctgatcactgacaaagggcgacggcagaccgagggaaggaagcaagaacagagacatggaagggagg

SEQ ID NO: 380714 - DNA, 777 bp, Homo Sapiens
  misc_feature (49)..(49): n is a, c, g, or t
gggaaaaaacttgttccttgtttaaaaccctttgggagaacccgaggantaccctttttccttcctcctccccccttatccagatggttccctcccatatgaatatccagactgcccaagtcctcgagtcctacatgctttgtttctatttcaagaacctagaagccatagttacttcacaaaaaggttcaaccaatgcagcaccacaggagaggcatgagagcatgccagatgtattaaaaatagctcagtttttacaattttctttgattcagtgtcgaaaggaattcaaaaatataagcgccataaattttcattctgttgttgaaaagtatgtaagtgaattttttaagcgaggttttggttcaggtaaacgagagtttattatgtttccatatgattcacgattagatgataaaaaattcttatactcagctcccagaaataaatcccatattgatacttgtttgcatgcctatatttttcggcctgaagtgtatcagttacctatttgtaaattaaaagaactatttgaagaaaatagaaaacttcagcagtttagtccactttcagattatgaaggtcaagaagaagaaatgaatggtacaaaaatgaaatttggaaaacgaaataactcaagaggtgaagccattatatctggaaagcaaagatcatctcattctttggattatgataaggatagagtcaaagaattgattaatttaattcagtgtaggaaaaagagtgtgggtggggactcagacacagaagatatga

SEQ ID NO: 380715 - DNA, 340 bp, Homo Sapiens
tacttggtccagagcttgggagaaagaattcgagggtggttaagcagctggctagaggcagaggctcagacagaagccccaaggcctgagggctgcagcaggaaccctaaaaggctactgagttcaggaggctcctagaagaggttgaaatcctttgctttttgcttattcattttaattatgagttggaacaggtgtgtcctatgctggcatgggtacttcctcgaattggactggccttcggtgccccaaaggggtatgttttattagttctgggctttatcttacagcattattcctagggtcatactaattactttgtgaatctggttaaagtgct

SEQ ID NO: 380716 - DNA, 444 bp, Homo Sapiens
  misc_feature (198)..(198): n is a, c, g, or t
  misc_feature (235)..(235): n is a, c, g, or t
tgatagagtgtgaagttttttccaaaaataatcttatttgtagctatctctattttgccattacatttccatgtatgcttttgaatgcattttattttgtgatcacatccctttgatccagcaaacattaggggaatgtttggcctttttaaagcaatggcctcaaattggcagcactttaacactggttattttacntaaaatcttgctaagtcaatttgaattattttttccngtctagtttccataatgttacttactttcttcacaagtattgctatgcccaggtatttgtgagttgcaagtttccatatagacaatgaaacttgtctttttgcctgagtttttcaacaatgccatgtcttggcaattaagacattttagaaattttcctgactgccgctgtcactgagatacaaaattatttccttcccaccctcgtgc

SEQ ID NO: 380717 - DNA, 825 bp, Homo Sapiens
  misc_feature (500)..(500): n is a, c, g, or t
ttctcagagattctctattgatgagttaggagtcaatgagaaaagttgtattgcttttggcagaaataacacaaatacagattttgatggatgcatgcgtaaaggtgcagacgacgtttattcaaggctgaagtgaagcacagcgctgtgggaagtggggctccccggcccgaagaccacgacactgtgaaaacgatagctgatccctttgctacagacacggaagcaattgtcttcttattgcagcattgacacgatctgaactgagtgattaatggatttttatagaatttttggcattcagtgttcttcaattcttctgcattgaaaaacccaatgagtctccttaaagagcacagctgacagcatcttcagtttatctgcagcactaaaatcatgtcaattccgaacaatagcccccaagatcattcttgttgacttttaaaatagtcctttgagcgaagcctacttacttcttcttcatatttttcatcagtgcnttgagcaatcagattatgcaagttgaaagaaggaagccagcagtgttgctgaagttctctgctgctggaaggaacttgctgaaagtgttgaggagataatcaatgggaaatgcattcctttaggcatcaaggctgttcttaaatgcgatgacattatttaccaacaggaaatgaaattctgacttgaggtgggtgactattaaggattggccaggactgtcttttgggatggatttttgggatgaatttcacacttaaataatccagttccttcacacagatgttaccagccatgctaccagtgtggccttgagtaaaaccaaca

SEQ ID NO: 380718 - DNA, 662 bp, Homo Sapiens
  misc_feature (466)..(592): n is a, c, g, or t
cttgaaagggaaggggaactagattcacagtgcttacctaagcaattggcacaatgttactcaaggtgtcatggagaagaataaatatagtgaaagataaaacattttatttcactaatcttaatttattagatgataattctgtaccccaagtttcagtaagaaaacagaatttccttcctcgtgttataaaagcaaaagcaattcatgatattttctctctcgaagcccttcctccctgacagtctttgtctaccacccactaataaagttgtacttaaatgttccaacatatgtttctacttcattaacaatttttctctaaattttgttcctttgttccttcacccatcatgtaccatctgtaccatactgatttgtacgtgcattacttagtaaaactaatgcttaagtagtctatctactcaaaagtgtaaggcactggccaggtgcagtggcttacacnnnnnnnnnnnnnnnnnnnnnnnnnnnnnnnnnnnnnnnnnnnnnnnnnnnnnnnnnnnnnnnnnnnnnnnnnnnnnnnnnnnnnnnnnnnnnnnnnnnnnnnnnnnnnnnnnnnnnnnnnnnnnnngaacacatataggtcccggctactagaaaagatagaggcgggaggatagaagaggaacgggaggacggag

SEQ ID NO: 380719 - DNA, 434 bp, Homo Sapiens
acacagttatagctacagcctaggttaaatgattcctcatcctggtgtttttattctccatgtttaattacttctttaaagattaagattatatatagaaaaaataattgtggtatccagagaatacaggtagaatttttcatatatcaggacatatgtgatgatacttaagcaatagtgtacatacagtaatatatgtttaatatcgagtatggataatgaaggacttttctttttcaccttgtttataatgacattttatccagggtttgaatcaaataaattcatgttaactgtactattttattgaaatgttctagtcttattattggataattagaaataaacattttaaagtctttatgaataaataaggatgttttcctatgtatacaactgtactattttcattagtaataaacatcactttcaag

SEQ ID NO: 380720 - DNA, 232 bp, Homo Sapiens
gagactctgagaatatattatgacttctagatttcctcttttttcttaagtaaataaatcatgttcaaaggatgtaagagaaaggagaggcaagtatttttgtttgtttttctctgaatatctgaatttcatagaataacactatacttctcccaaaagaaacactttcaagataagttatgttgtcttttcttttgtaaaattcccatgaaaaagcttacaaaccatactt

SEQ ID NO: 380721 - DNA, 311 bp, Homo Sapiens
gaataaggaaactgcttctttcttttccaggaaattcatttaaaaatttgcacctcacatacaataatatcactcatagtaagtctgaagctgaagagaggggagcagggttttctccctaaatttcatcctactaatctttgaaaatcctcaggtattaatcttaattaatagtattagtaatatctcccagctgggcatggtggctcatgactataattccagcaatttgggaggctcaggcaggcagattgctttagccaaggagttcaaaaccagcctgggaaacacgcgaaaaaccctgtctctac

SEQ ID NO: 380722 - DNA, 599 bp, Homo Sapiens
  misc_feature (281)..(281): n is a, c, g, or t
  misc_feature (410)..(447): n is a, c, g, or t
atatgctttatctggttctaccctctcaacaactctatgaggtagataagacagacattcttatcccaaattccagaaaggagttactgattgcactctgagcccatggaagataagcccccagtcccctgtgttcccaagtctaatgctcatgcctctggataagtatttaccaggtgatcctctgctcagatccagaatgctgggctgggctcacgtactcacgctgcaaattggagaacctcaggagaatctggccagccttaagaaagacggactcnaggtgctgacatttgagttcccttggtgaaacatcttgggcccctcccctgcccccagttcacttaccactggaggactgggagaacacttttcgctctcactggcccactggtcagtgagtgcccacnnnnnnnnnnnnnnnnnnnnnnnnnnnnnnnnnnnnnncatatgacttccaatcaactctctaatgctcctctggatagctaagcatcaccagacatttgaagaaaccctccaacatgaaaaacagagaccatgataaacaggaaataaaggaactcaatggaaacagacacaatataagaagtagaagg

SEQ ID NO: 380723 - DNA, 615 bp, Homo Sapiens
  misc_feature (524)..(540): n is a, c, g, or t
catggctgcagcttcaggccaagcccaatggacccaggcttcaagtctttcccatggacctatgcatcaagttgacctttgtgaacctaggcatcagacctgttcatctgctaacttaggcatcaagccagctcacctgaggacttcagtagcaaacctgtcatggaccttgcatgtcagactgccaagaatctctgcccagtctgactgtaaagggatctccctgccaaaacctgtctctaacaactagaagaggtccttactttttaaaatctgcagacagcagttcaagaccacaagattacaaataatctgggaaatgtgacacctccaaaggaacagaataaagcaccagtaaaccaacactaaagaaatgaagatctacaaacttcctgaaaaagaatttaaaataattgtcttcaagaagtccagtgagctaaaatagaacacagataggcaattaaatgaaatcaggggaaaaataaacaaaatgataagtttaacaaagagatagaaaccattcnnnnnnnnnnnnnnnnnttctggagctgcaaaacacaattacagaactgaaagattcaacagagaacttcaacagcagacttgatcaagcag

SEQ ID NO: 380724 - DNA, 600 bp, Homo Sapiens
  misc_feature (342)..(351): n is a, c, g, or t
gagtcccactctgttgcccaggctggaatgcagcaggttcaaacaattctcccatctcagcctcccaagtagctgactggggactaacaaacctagcagtccacccctgtggtattcgattcaatccaataaatcttcacttaggtgcggggactgagggggttatccaaattgccaattgatttagggcttcaaataaattgatgtattaggcatgatttctagttttatttatttaaaaaaggagcaaggatttaatgacagaagtcaaacccaagtaaaggatcattctaaatttttctgctcatccccccaaacctttttagtttttgtccacacttnnnnnnnnnngtagtattagcaacttactcttactctctccaatgcatttgacttaattttcataaacagttatatgtattacaatataggttttcctatcatatcaaatgtcaaagcaacagtggtctaaacaagagagcagttcatttctcccttatgtcacagcagagcatagaagtcccaggctgatatgggacatccataatgttggagacccaggccctttccatctcattgctcagacactgtcaaatcacc

SEQ ID NO: 380725 - DNA, 144 bp, Homo Sapiens
ttacttcaagcagtccacagagagcctgtcttcaaaaactgagtaattatttatctagatatgatgtagagaggattcttgtttaagtgcaattgaattagaagatttatgagatgtcctccaaagcttgtcttctgtgcccca

SEQ ID NO: 380726 - DNA, 663 bp, Homo Sapiens
  misc_feature (140)..(140): n is a, c, g, or t
catcagtgcggtcagcagctgtgatacgtgcttaaaagagagagctcgtataccctaggattggacctctgtctggttatgaatcgctttggagtttgcgaaacgttttcacattccattgtccctgcttttacataaanctctggttccatagagcgccatataatgccagatccgtaggggtcatccagacggaccagggaccatgccctggagcttgtattctcccaacagtactggctgaagatggtttgggatagccagaagagagatcataatgcccccaggatttgaaagatatagaagctttccaaagaacatttaaccataaagggcaaggcaagagctgaacctgatcgcctgtcttccaggaacccccacccttcagtatcaggcaacccttccacacccaagtgctcagcgatgcttgggaggagactgctcactctgcggctctgagggcatcatccccaccaacaggctgaagaaggcactggaggccccatcagccaatagcaggactgaaaatcctcctttatccaagacaacgtgtttggcaaggccgactggcttggcctccctaggctggaaattgcaattctgctttcccttcacacctcccattagtgtgcacaaaagaaagtaccttagatctactcttct

SEQ ID NO: 380727 - DNA, 256 bp, Homo Sapiens
  misc_feature (86)..(86): n is a, c, g, or t
atgagcaccatgcctggcctgaggaatatttttctaggttccccccaccccaagcatttattctgcaattttagttttgttcctanagcaagcaaggtttaaggatttaaaaataatccgtattttagaatgctttctggctttgttactttttatccacagtagaagttctcagagaatgatctccctcttttaatttaactttttggcacagtattttgagaattataaataatattagaatgttttctggctg

SEQ ID NO: 380728 - DNA, 227 bp, Homo Sapiens
  misc_feature (51)..(78): n is a, c, g, or t
  misc_feature (140)..(140): n is a, c, g, or t
  misc_feature (217)..(217): n is a, c, g, or t
tataagatgaatgagagtatgagtgtatatatgagcatgtgtgtatgagcnnnnnnnnnnnnnnnnnnnnnnnnnnnnttggctggatagactgaaatgcttaaggcagggatggaagatgaagactgagaaaatgtgtnggctgtggtagaatcagaaactttaatatgtgctttgaaagcagacctgaaagtgaggtgacatcactctgcttgtngtgcacgagg

SEQ ID NO: 380729 - DNA, 832 bp, Homo Sapiens
taactgtttactttataattttgtaactctacaaaatggatgattattttggttttaagaggcctggttatgacaaagttccttacactaagctaaatgagactctgtttttagaattaggaaattataggagttgttttatttataatttagtttaattctcctggcatggtttttctatcagcttctgtcccttcaagttaactggtttaccagctttggaagagcctgggaagatcacaggcgtgatgaaacacagtctttctttctgactcatgtagaagaacattgatgatccatatttaaagcttacctagtattgactcaacaaatttagaaggaaaaccagccagttttcctggatcctttaactaaagatctcatcctacccacctgcccttctcgctgctaaaagactctcagcgtattacctacccagtacagctaagaaatcaatgctcttttttaagaggtctcaggagttaagatgctaataagaaaaaactccctgtatttatgctttcataaaataaaacctatagaactatatatctgcaaaggaataaaagtcctctctttcctgaagctgctttgtgggacaaagttttggtataggctcttagtagctaagtcttagttccctttttttgaaagaaacaaaattgtacttgcttggtatatggtatttgctacactgggacacagtttagagtcaactggccgtaactcacgtacaataaaatacagtattatagcagggaaagcagtaatatgtaatcacaatactaaggttgacattatttatttatattgtgaagtaagtacccacttc

SEQ ID NO: 380730 - DNA, 216 bp, Homo Sapiens
gttggcagggaggttgggaaaactggtgtgtaatacaaagtacagatgatggatttatcccccatttgctcttgagtggttgctcatgcttagttgctgagtagaaatatacacacccctctccatatcctttaattgccagaagaagggccaccacaattatgataaggaagtagctcctttcttcctggcagaggccagtttggaccaagaaga

SEQ ID NO: 380731 - DNA, 559 bp, Homo Sapiens
  misc_feature (132)..(191): n is a, c, g, or t
  misc_feature (205)..(342): n is a, c, g, or t
ccaaagtactttagcctgttatcatcctctgtgttgctcaaattgttccaaattggcctgtaagaacccctgacgctggtgcccgtgtccccatttgtctttgagcacttccttactttttgacacaggtannnnnnnnnnnnnnnnnnnnnnnnnnnnnnnnnnnnnnnnnnnnnnnnnnnnnnnnnnnncaggcagagtctcnnnnnnnnnnnnnnnnnnnnnnnnnnnnnnnnnnnnnnnnnnnnnnnnnnnnnnnnnnnnnnnnnnnnnnnnnnnnnnnnnnnnnnnnnnnnnnnnnnnnnnnnnnnnnnnnnnnnnnnnnnnnnnnnnnnnnnnnnnaaccaattaaggtcacacattacagtaaggtgggcctatcttttaatttctttaatctagaacagcattcccccagcctgtttttgtatttcatgacattttttaagagttgaaggggtccagaatatttgtcttgtagaatgcctaacattctggatttgtttgattgctctgtcataattaggttaagtttaaatatatttggcaagaaaactat

SEQ ID NO: 380732 - DNA, 540 bp, Homo Sapiens
actaattgctcctagtttctatccctttccactggtgaaggatctagaataagagatttaggtcgaggactcatttgtggagaggtggtagctaaggtcataaacatagctgtactgtcaaggaggatgatgtacgagtgaggaaaaagtcaggaaacaagccttagaagacactcacagttcaggagtatgaaacaagtacctcaggcagagaaggcacaggagggctatggagccaagaaggccgccacagaagctacacgaggacagacgttgcaacaaagacctcattaataggggcagagtgacaagaatgttagaaaggatgaactctgaaccagcccctgaaccggtcaggaaaggggcactatgagtaagaaagcaagtcttctgtggcagagggagtgtgtgacaaaggggagaaattgcttcagttcattcatttgagaagttgcctggttggaggtagcagggacttgcatttgaaggcagaaaggaagaatcagcagagagggaaatgttggttaaagagggaagacc

SEQ ID NO: 380733 - DNA, 553 bp, Homo Sapiens
  misc_feature (30)..(30): n is a, c, g, or t
cagctgagagattacatctagttgggaagnagcctccaaggtatttgcttggtcctcatagaaagcaaaaggagaacagaaaaccaccagcccaccctcaaccccaaagcccctgggcaaatcagcagccttcgtgggattcaagaggatagcagcaacttcaaagacgtaggttcaaaaggcaaagttggtagactctctgctccaggttctcaacgtgaaggaaggaacccccagctgaaccagcaatgataatgatggcctctctcaaaagagaaaaacaaaacccctaagagactgcgttctgcaagcatcagttctacggatcatcaacaagatttccttgtgcaaaatatttgactattctgtatctttcatccttgactaaattcgtgattttcaagcagcatcttctggtttaaacttgtttgctgtgaacaattgtcgaaaagagtcttccaattaatgcttttttatatctaggctacctgttggttagattcaaggccccgagctgttaccattcacaataaaagcttaaacacgttgtcca

SEQ ID NO: 380734 - DNA, 324 bp, Homo Sapiens
aagctgcagccatcctctcccctccccaagttttgggcaccaccatctcctagtctcttgagactggcccctggcttctcccgttaccccagcctcagtcccatccaatctgatccccattgagaagtccaagtggaccctcttctccggcctcactgcccccaacccactccttgggctccatcccagcctcttccttggcggtcccccagctactctccagtcctacgtgcagctgcatcttccagatccacctggcacggcatctccttctgcctcaatgcctgggattcaggaccttgatcacagctgggttttgtatag

SEQ ID NO: 380735 - DNA, 432 bp, Homo Sapiens
  misc_feature (11)..(11): n is a, c, g, or t
  misc_feature (21)..(21): n is a, c, g, or t
  misc_feature (70)..(70): n is a, c, g, or t
  misc_feature (88)..(88): n is a, c, g, or t
  misc_feature (99)..(99): n is a, c, g, or t
  misc_feature (160)..(160): n is a, c, g, or t
  misc_feature (173)..(173): n is a, c, g, or t
cttcctggtgntcgcttattnggtttcccctcaaattggttaaatgtttcaagagtattttagaagtganccaggggaaaacctgganaaatatgattnctaagcctcttacttcataggggtacacagcagcctgtgggtttagctctatgcatgtgancacaaaaagaagncagctgctagataccataaaatagttaagttctccatctggtttgcaatatgggtgaagatttgctgcaaatctgggttgactgccatgccccagttagtttacaaatacactggtccttttagttatagaacatgaagagtggtcctaagtgcccaagtattaaactcttatacaagcattcagcaaaaatggggtaaagatgaaagcaataccactttatttaaaatgtgctctacttaatttctaaaagtctggca

SEQ ID NO: 380736 - DNA, 383 bp, Homo Sapiens
  misc_feature (34)..(34): n is a, c, g, or t
  misc_feature (87)..(87): n is a, c, g, or t
tcctaatcagggaaaatcggcaaaatggctgganctacaaccctggtctcttgaatcctgtttggaaatctgtgcgttaggaggganaatttccattcctacagcttcaatgggaaaaggtctactccaatttcaaggaggtaacagtccatggcatgcacaattcaagccccctgcttcaaccggttcctcactcctcactaggagaagtgattctgctggttgagacaagaccaatatccaagagggctacactgcattcgagggacaaggctcagtgtcttcctctctcccactgctttcccaagccagtcactatcacattttaatgtgtatgtgaattacttgggggatcttattaaaacacagattataattcagta

SEQ ID NO: 380737 - DNA, 302 bp, Homo Sapiens
aaaaactctaaaatttatatgcaaccacggaaaggcccagaataaccaaagctatcctaagcaacaagaacaaaactggaagaattacattatttgacttcaaattatactacacagctgtagtaaccaaaatacagtgtactttcataaaaacagacacacagaccaatgtaagacaatagagaacaaagaaacaaatccacacccagtaaactcacttttaacaagggtgccaagaacatacactggaaaaaagacagtctctcaataatggtgctaggaaaacaagatatctatatgca

SEQ ID NO: 380738 - DNA, 174 bp, Homo Sapiens
aaaaagtctactatgagagagcagccagcagacacaaaaacaagatgaactccccatcggtgatggaaaaatagaacaacgtgcacaagattataccatagctgtgtttaaagtgactaaaaacccattaaagtacaatttttttaaaactaaacaagctggctcaaaagttca

SEQ ID NO: 380739 - DNA, 278 bp, Homo Sapiens
cgaacatcatagcttagcctgccgtaccttaaacatgctcagaacacttacataagcctgcagttgggaaaaatcatctaacatagaggctattttataataaagtgttggatatctcatgtaatttattgaatcttgcatgaaagtgaaaaacagaatggttgtatggtttctactaaatgcatatcacttttgcactatcataaaataaaaaatgataagttgaaccattgtaagtcttgggccatctgtagcagtttcaattatccaaactagag

SEQ ID NO: 380740 - DNA, 114 bp, Homo Sapiens
gagagtattacatgatacgcaagtactaaaatttgtttaactgtttttggcaactcacttactgaagaacatctagattgttttcagttttgggttattacaaataaagctcct

SEQ ID NO: 380741 - DNA, 153 bp, Homo Sapiens
tgaaacactgtgcctagtcaatttgtatgctgttctctaagccacttccttagaaccatcttctaattcactaacactctgtttgtctatgtccatctaagataatgtatatctagtttattgagggtttattaccaataacttacttttttc

SEQ ID NO: 380742 - DNA, 597 bp, Homo Sapiens
tagggtagtgtcctgaaattctcatgtatgtgagcttttttccagttctacagagtggagccagctgtcaacatgtgcttgcaagccatctgcagagatactcactcgcttttcacaggagcgcacttgggagccagccaaagagtgggtgaggcatttggagcattcggggttttgttggcaagatgggagggatgcatcccctgtggcttataggtgggttcctgatggagtccatgaagtaactggtaggatctatggcagttccaagtatgggctgctgtttgagtccccatctctctttcctgcttttaccctctcccaaccactccaccttgctgatcacctcaatattctgggtgagatgaaaataaagtggatctcttgggcaggggcctgtatgtcttgagaaactggacacttacttattatactctccttttcccctgtggaagaaataatgggctcttgttaactgagctgtgccacttttgggggttggtgatgcaggtaaagtgaaactgtttaaaccccttccaatgaatctaatcttagatttctttactcctctggtgtgctgaagttttactgtcaact

SEQ ID NO: 380743 - DNA, 582 bp, Homo Sapiens
  misc_feature (382)..(382): n is a, c, g, or t
agttaaggccgtagtttagtggaacactcttagatcaggttccctggcccaataagaaacaggggtgttagggaagtggaattggaagtctaggcattttctgggtcaagcaaatgcagatgatagcagctaccccagaagagcatgtgttcagccctcccacaaatgctgtagacactggatctcataatggaagacttaattttaccttacctacaagtgttttgcatatgaaggcattctctgtcatagttggaatgagcccagaaagatgaaatttagttcctagacaaacagtattgctgctttgtttgggcaagcaaatgttgaatggttgctagagtgtgtcattcaacatgtagcatttctaggataatgtatngataagggtttttccttcagttgttatgctcctcattttagcttgccataagtaaagcttaccatcttattccattacagatacttttggtcacaggttctataataaacatgaattgcaaataattacatatgataggatgtttggatggatatctcctaaaatattttaaaataatactttattgggctgggcatgat

SEQ ID NO: 380744 - DNA, 924 bp, Homo Sapiens
  misc_feature (76)..(179): n is a, c, g, or t
  misc_feature (279)..(279): n is a, c, g, or t
  misc_feature (358)..(358): n is a, c, g, or t
  misc_feature (501)..(501): n is a, c, g, or t
aagcgactctccgccccagcctcccgagtaactgggattagaggtgcgcgccaccacgcccagctaatttttgtannnnnnnnnnnnnnnnnnnnnnnnnnnnnnnnnnnnnnnnnnnnnnnnnnnnnnnnnnnnnnnnnnnnnnnnnnnnnnnnnnnnnnnnnnnnnnnnnnnnnnnnatgagccactgcgcctggctgagacacattcttaaaaatatttgacaactgttgctttttatctagaaaatttaatgaatttactgattagtaatatatntttattcatttttatggcttattatgtcattacttgtttcgtctttttcctatttgtccttttcaggttttattttctnattttattttcctcttttggaaatttgctcttcgagtttactcttctagcagctacttttgttgttgctgttgttaaagtaacatttattgagaacttactgtcagggacttaatgggtgcttttaactctcaaaatagtttnatgaattagaggttaacatataggcacagaaattaacactcagtgtaaaaattaaggctcatataaccaggtctgtcactctttttgtggtacaaacagcccctcaacaggtaaaattactcaagagaaagaaccgctggcaactaggagggacagccacggcagtgaggcattctatttcttagaaagaaacaggcacccgcagcccagcgtgggggatgtggagtaccaccctcagggctcgcgggttgggtcatgaaggtgagtcaggggtggggacacggtgtccaactgagggacagattccaaagtgggcagcaggcgactcactgcaatggtttcatgtgtgctcctgtgccagggctgagacttgttttcctcggataaccatgaaccaggcactgcgatactctgcaaaacttt

SEQ ID NO: 380745 - DNA, 412 bp, Homo Sapiens
ggcacgagggggcagagactctgaggcctgagagacctggcctcggattcccagctctaccacccagtggtcaaatgacctggggcaaattgcttcacctctccagtcttcggcttccttgcctctaaacagtaatagtaataaaccaccctccagagttgtgagcattcagtgagattacatgcataaataatttgctcatggtaaggagttggagttcctggaaaacatgacaaaggcaccttcacagctgaggtggccgtctgagtcaatgactccaattctgagtccattgcttctggcctgtgctgtcggggtgctttttctctgcaggagcagtttatttctgaaccaaggtcataaattagttcattttgcaagttcttgaactgaaaatttttattcaatatct

SEQ ID NO: 380746 - DNA, 552 bp, Homo Sapiens
  misc_feature (172)..(172): n is a, c, g, or t
  misc_feature (194)..(194): n is a, c, g, or t
  misc_feature (237)..(237): n is a, c, g, or t
  misc_feature (273)..(273): n is a, c, g, or t
  misc_feature (414)..(414): n is a, c, g, or t
gcggccggactgtagagacgtagatgggtctactgcggtgttcgtagctgcccttacaccggaacttgtgtgctgggaaaacagtgaaaattccttcttctgaactgaaatattgccacttaattccagggttggatttcaggttgtctgcaagaactgaatttaagtctcngtcctggattgaaggcctggcntattaacagtagtagaaagtccgatccacaactaattgttctnagacacgattggtattaaagttcccatcgaattccnatccatggaaggtgggatagtacagcagtcttgaattgagttacggggagaggttaggtgagccgtataaggatgcttctacaacttgcttgttccgattgaccacatccaagtaacggttgaacttctctcggatttttnttcggctagctgctgtacttcactttctccatttgaggattttctcagtgtaaacaaaggagttgaatatccgctgcatggtgacgacccccagctcctcggccgccagcctccgcatctggctcgccagcacttgcg

SEQ ID NO: 380747 - DNA, 176 bp, Homo Sapiens
gagtgctcgtgctggtctagacaaagatgtcaaatggcagatgacacctcaaaaagcctattagcaaagtactacactgtgctctacctttcaagaatgatttcctcatgggtgactttgttccacatttttggatttctccatataactgattttaatcatcctgatgaaaatac

SEQ ID NO: 380748 - DNA, 437 bp, Homo Sapiens
ccgcctcagcttccgaaagtgctggggattatagttcagaacatggtttgagcaatgtagttaaagttctttcaaaaaataataataaaagggaattatagtttttttctattaaaattgaatctttcctcccccttttagacctgctgagctagggaaaagagccccaagatggatccgagataatgaagtgacaatgtgtatgaaaatggtaaagaacctttcaatgcactgacacgaaggaggcatcattgtcgagcatgtggatatgtaagtgagatttcttgatcattaaggtggctagtaactatataagtgatgtaaagtcatcaactagggacacacaaaaaaatgactttcaacaaatcacttaataaatttattttggtgccaattacgtgcagaggacctgtgctgagccctggagaaaaaacgtt

SEQ ID NO: 380749 - DNA, 241 bp, Homo Sapiens
gtagaggatccatcacactgtcatcagattatcaaagatatctgtgaccccccaaaaagggttatagggacttagagggatacccgtaattcattttataaccaggactgggaaatgggggcagaaaactaaaaatggcctcgaaaaaggccagggacaaattgctgatcttttccctctattcacattgggaaaataagtgcttcaaaccggaaaaatcattaattaagctggttaaact

SEQ ID NO: 380750 - DNA, 230 bp, Homo Sapiens
  misc_feature (190)..(190): n is a, c, g, or t
gtagaaggttggcaatattgtatgactttgtgatcgtggcacatggctgaattctagcattacctcaacactcaaagtgactgtgtcttttccagttaaaatttttcaagtaaagggcaggaaaatatggcaaaaatatgtttccagtagtggactggagggcttctttgcctaaggattgttgagaaantctgttggctctcttttttctggtatggcttaaaatcatg

SEQ ID NO: 380751 - DNA, 371 bp, Homo Sapiens
gaaacttgaaatggctttgctttggctgtcgtcttctgccgtgtgccagatgagcttgtgatctgggaagccggggcacccccgttttgtttctctgggcggttgtggcagctgaaggcggacgttgtttcctaaccataggtggaacgaggagacgggagcgagtgggctctccaccagcacatcactatgcatctgttccaggaaagaagaaaagcgagcgaggaagacggaaaagactgcctgccttggaggggtcacatgagggagacctgtgcctgatttcattaggaaatccattctgttattttttggtgctgttggctactttatcaaaaaacccttcaatagcatccttaagatttaaaaaa

SEQ ID NO: 380752 - DNA, 255 bp, Homo Sapiens
tactgggggagtccagcttccttctctgtctcttgagcttactcttttgcctttcaccaagggacaatcctttgcatgtggtgccttctgccctgttatgacacagtaaaaaaatccctcaccagatgtggcccttgatcttggacttcacagccttcagaattattagccaaataaatctcttttctttatagattacctagtctgtggtattctattacagcagcagaaaacagactaagacatttgtattct

SEQ ID NO: 380753 - DNA, 450 bp, Homo Sapiens
gtcaatactccttaatcaactcccctttatatatacatctatcctgttagattcggtcccattagagtaaccctgactaatacagtaactactggtgagtcttccaactgttctctgtcctgtgttctgcatatgtaaactagggaataatgatgcttctgtcgttatgataataaccattgtgaaaatcaaaataaatcatgtccatcaaatgctaatggaaaatctgagcacataataggttctcaggcagcatttcccccttctacttttccctccattcttctcagtctaattatttattaaattgtgactctattcttcatggatcaaagaggataatgtaataggtaaaggcttgtgaaattactgtgtttatcaaacaaaaccaatcgaatatgcatgctaccacacaattcaacatgatatataaaagtgctttggaaagtg

SEQ ID NO: 380754 - DNA, 216 bp, Homo Sapiens
tgaactgccccacaaatcacacctatgtgggggtgtaacacacatacttctaactcagctgcttttaggagctatgccaactaaatgagattgcttttgcagttagggaggcgactactgaaactgtatgaatgaaaaaaactactttctgcataatgagataattttggagacagttgataaaaaccgtaaatccggccgggcacggtggctcat

SEQ ID NO: 380755 - DNA, 486 bp, Homo Sapiens
aatcaatcatctctacataatgaaacctccataaaaacccctaaacgacagggttcagggagattcttggttgaagaacacagggaggtgctgggagggtgccaggcctggagagggtatgggagctctgtgcctcttcccacacaccttacccttcataatacttccatgtggctattccagagccatatcctttacaacaaactggtaaatgtaactcacagaaactgagttctgtgatgcattctagcaattatcgcaacttaggagggggtggtggaaacccctaaattcatagccagttataaatactggctataaatggtcagaagtactgggacttgccactagcatcagaaatggaggcaatcttgtggaactgggtccttaatctgtggggtctttgctaactacagatagtgtcagaattgaactgaactactggagcaccacatggtatcagaaaaggcatcatgtatttggtgt

SEQ ID NO: 380756 - DNA, 189 bp, Homo Sapiens
atgagccaccatgcctggcctattttgatatactttcaaagttacagaaaaggttcaagaatagcccaaggaactaggaatacccatgtaacctatattcagactcaccaattgtttacatttttcacactttttctctatgtacttgcaaattattttttcttaatcatttgaaagtaaattggagac

SEQ ID NO: 380757 - DNA, 342 bp, Homo Sapiens
  misc_feature (43)..(89): n is a, c, g, or t
ccactgcactccagcttaggcgacagagcgagactctgcctcnnnnnnnnnnnnnnnnnnnnnnnnnnnnnnnnnnnnnnnnnnnnnnncaatcatctaagtttgcacattagtaaaatagagaaagaataaataacaatcagtttataagttaaacttccacattggggaaaatagcgaaagaagagcaatgtaaatctaagttagcagaagaaaatagataacaaaaattagagcagaaatcagtgaaattgaaagtagaaacagtaggcaaaaatcaataaaagcaagaccggttctttgaaaagatcaataaaattgataaacctttaggctaaccac

SEQ ID NO: 380758 - DNA, 395 bp, Homo Sapiens
  misc_feature (171)..(171): n is a, c, g, or t
atacacatcacaattgatcaagaagcccctgatgaatggaaaccagccacatacaacacagcaaaggctttaacacaggcagacaagacacgggcaaagggagctattcctgacttctggtgtggtaactttggtggggtggagaggggtcctggaattgcccaggggacnaaccaggtttctagaagaagggttgttgcctgtacttgccctagaataccacccaaggctgctcctagagattccaaagcaatcaaggggggcgacgttgtcaactcaggccccctgatcacctcaagcagctctagaagggtcttgttaaaacaactccatcattcacacataatctgagataaagaaatcctcctgaagcaggacctagaatatggcttcta

SEQ ID NO: 380759 - DNA, 422 bp, Homo Sapiens
gctcaagtgatcctcccgaagtgctggaattacaggcatgagcactgcatctggccaaaaaatcttaaaaggtatatgatattaacactttcaatttatagatgaagtctctgaggttgtatgatttgttaaggctcaagttacgggccaatgtagaatagtttatgacaatagcttcccagtcttgactccagagcctgggttctctgtgccatttgatcaatacatgacatgacattctactgagcacacctctggctcatttccatttccatttgctctgtttaccagaattgttgctatgtccctttgccaacctttgaagagagaggtaatgggcagcaaagatgccagaattaaggaacaacccaaggaagatgaaagaatccgagataataaggcccaacgtcaagtcggttatt

SEQ ID NO: 380760 - DNA, 398 bp, Homo Sapiens
  misc_feature (138)..(171): n is a, c, g, or t
tcataaagctattcccaagtaccattaactcactcttagtaacagttcttcttctagatcagcactgtccaagagaaacagaacgtgacacacatatataatttgaaatttcctaggctaggcacagtggctcatgcnnnnnnnnnnnnnnnnnnnnnnnnnnnnnnnnnnaagatcacttgagcccaaggagtttgagaccatcctgggcaacacggtgagacctcatctcttaaaaaaaatacaaataaattagctggtgtcacatgcctgtggtcccagctactcaggaggtggaaggtggggggaccaccggggcccaggaggttgaggctgcagtgggcctgtgatctccaccactgcactccagcctgggtgacagagcgagaccctgtctc

SEQ ID NO: 380761 - DNA, 499 bp, Homo Sapiens
actggttagtgctgctgcaaagatgagccgaagaccatgagagacctccaggtggtccttctggggagaagaaatgggttttggccccaaatccttctgctgcatttttcccctatccctgggaagccatgagacctcaaacctgtgttcccaaggaggcgagctgctgttcccaggtgatgatatgatgtgcttggggaaagtaagtggctgccagacatggctgagagctgttgtcactgccgtcaagtgcatgtctccaagccatatcacacggcgtccctcgatgtgaggccacatggcaagtgggccgtggatctccctctgccctttgcaagcacgtaagacagcagattttgcagataccttgtggcgcaggggaatttcctttggccaggtctgaagaaataaagcagcaggcaccgagaacaaaaccaaggctttcaaaagacaaggagccaaaaaacttactcaaaataaaagtagttttaaaatgtca

SEQ ID NO: 380762 - DNA, 423 bp, Homo Sapiens
cctttgagcggccgcccgggcaggtacccttttccagtggcagagaaccttcctgaaaggcagtcctgtgtaatggtgtccatttcatcacacccttaaaacactcagctttaacaaacatgcagatttttgctgatgtgggagaaaatattaattattaatgatattaaggtgattatcttttcgtatgtttatagatatttgtatttctttttaaatgaactgctcatgacctttgtctacttttatttgggtttacttctttctcatttattcctataaactctctataaaaggaaattaaccatttgattgtcatatgttgtgaatatttttaccattttgacttttgaatttatgtctttttaatgaattgtagaagtttaaaatctttatggaataaatttatttagttttttgttt

SEQ ID NO: 380763 - DNA, 222 bp, Homo Sapiens
actcttctctgctcttgtagcatgaaagcagccataaatgaatgagcatgggctatgttccagcaaaactgtatttacaaaaacaggctgcaggctggatttggcctgtagtttgctggtccttgtttcagacattcctgtcatgatcccctatttgtcacaagagactgtcatatgcttagctaaaatccagatgacttggccgggcgtggtggctcacac

SEQ ID NO: 380764 - DNA, 435 bp, Homo Sapiens
tcagtcttacagacttcgaatttcataaaaatcactgggattcctataaaatgtcacagaccaaagatcagggctatttttggtctagaactcccacttttttcctactccactccaatttggatgggcctttcaaacacaaaaaaccaaaaaaggatgccacactgcatgctttgtcagaagaagtgccccagttacattctagaaacatgaatgcatacatgcatgaacatgcagacatgaatgaaactatgtaaatcatcaaggagcgatgtaactgaaaccaaagaatttgagcacaagaaaggatcttatagagaatttaagtcagagtttcatttctcagatgaagttaaggaaataaaaggttaaataattaatgatgaactctaatagtaacagtaatagataactttttacagtgcttactatgtg

SEQ ID NO: 380765 - DNA, 472 bp, Homo Sapiens
aacaatcatcattttccctattgattattaagattgcaggaccatttttatggtcccacagtaccatgtgaaatgaggatcgcttgtagctgggaacagtgcttacttcagggaaaactgattttgatagaaccgactagttgagtattaaactgttttggaaataatttatatatctaagtgctgaaatatatttctcttctccccacttattcaaataaaaaagttttaatactataaacttttcattgttagcgccacgcagtccttgtcaagattgttctgggggacaaaaacttgatgtataaagcatgaatatacacacagtacttaaacagataccatatctgtggtattaaaattttgggggtggttgattaggattgtaaaaagactccttagggagtgaggatggaaaagagaaacactggttaatacagagtataaataaattttttggaaattgattgca

SEQ ID NO: 380766 - DNA, 607 bp, Homo Sapiens
ttcagaagaatagaaatcccttaagtttatgtcagatgctcctagaaaaatgttctctcaaggcagaagtcacttagtgttgtgaaggtgtcaaagaaagtctctatgctgggaagactcaccacatactcatcatcatacccatcctcatctggaactccagtgttagggtcacagtcccggactgtaaacttcatggtgcagctaaaggagcctgcaactggaggagaagggaggcaaacctgcatcagtggggagtgcaagggagacgtttccatcatttcttaggaagtgccatctgtactcagcactgtgttccacattttccagttaaacacacatgccctgttgtctggggtagtggttctcaaaagcagcctacaagcgggtcaggaaggcagtctcacaaagcatgaatgtaaagtctatctcacgctgtgggttacagcagtacagaaatgataacatgggcagactgtttctctattggtatgaagaaagcagcagagaggtacttttgggggctttttgccatgcctatcaaagggacctaaatgttgaaaaataaatattttgagaaccactgctgtaggaccagaccaaaaaa

SEQ ID NO: 380767 - DNA, 390 bp, Homo Sapiens
  misc_feature (101)..(221): n is a, c, g, or t
agttggtggtggccagactagaccagggagggtgctgctgacaatgacattgtaattgtagaaatcgtgtgcctgacacaggtctaaggactttccaaagnnnnnnnnnnnnnnnnnnnnnnnnnnnnnnnnnnnnnnnnnnnnnnnnnnnnnnnnnnnnnnnnnnnnnnnnnnnnnnnnnnnnnnnnnnnnnnnnnnnnnnnnnnnnnnnnnnnnnnnnnatgggatgtctcatcccaagccctgccctcttaaccaagatggccttgtgtctgatccatgtcagaaaacagaatagccgacataaactcatttgttagccaggtgtggtagcccacgcctgttgtcccagctactccagaggctgaagcaggaggatttttgagccca

SEQ ID NO: 380768 - DNA, 212 bp, Homo Sapiens
gtgggagctaagctctgaggatgcataagcatgggtgatataatggactttggggacttgcggggaaaggctgggaggcgggtaagggataaaaggctacatattgagtagagtgtacactgcttgggtgacaggttcactaaaatctcagaaatcaacactgaagaacttatccttgtaacaaaaaaccacctgtaccccaaaaactgttg

SEQ ID NO: 380769 - DNA, 124 bp, Homo Sapiens
ttagcgtggtcgcggccgaggtactagctaacacagccaagaaagttaacaatagagccgtaagtatttcccagatgaagaaaacacaagtttagcttcacttttgttttggaatgcaaattta

SEQ ID NO: 380770 - DNA, 430 bp, Homo Sapiens
  misc_feature (375)..(375): n is a, c, g, or t
  misc_feature (402)..(402): n is a, c, g, or t
gcgtggtcgcggccgaggtactaggctttctggagaaccttaccatcacatgcttagatcttagctcctgatgaggtggtagaaggagacaatggggaaatgatttaatattaggaaaggcaagtgcctcgagacatttatttaagctaatctgtccttgatttttgactttcagattcattacacccagccacattagcctgcaccattaaaaacattgattcaacctctcttattggcatagacaatacatctgccttgttcactactctatcctcagcttggtatttctctagcacagaagaatggtccagtagatatgctgaagaaatacctgaatgcataaataaataagaaaatgagagactgaatgantcaattaatacctcaagtgttaccctngataaggttctagagaggggaggttcta

SEQ ID NO: 380771 - DNA, 439 bp, Homo Sapiens
ttagcgtggtcgtggccgaggtacgcctgactgaatctgcctccttctgaaatctctatgctctttttcacacttctctgtagcctcagagactgccaagttctgtcaagacctctgcataatatcaacgttacaaacacgttttaacttttagagcctaaaatcatgtattgttatccaaagatgatctttctctacagaaatagctgcttgttcttagagatggtggaggtcattaaatctataaagtgagataaaaatccataagatttcatgagttactcaggcatcttataactactatcagaatatcagaaaactcagcaagttatgtgacaaaggctttgagatgatcactccagacgttccacatactgagcatcagccttcttgctgcagtgcatgtgcaagataagatgtcataggcagctttgtaaga

SEQ ID NO: 380772 - DNA, 378 bp, Homo Sapiens
ttagcgtggtcgcggccgaggtactcgacatcccttgcccagtgtagataagtaattcagggtcttaaaggaagctgacaaagcagcatgcacaacagaagtctcatgtcctgaaatttcctctactgatttcccttaaaaattcggtataaatgatgttctcttttcctctaaatattgttctatatattcatattatcctatatttaatacaattttacttacagttaacattctatattataactggttttatcttttactgttattatcactattataaccaaatacttttttatgtttctttaaattatgtcataaaactgtatgaacccatattgatgcatcgttagcacccaaagtctatactttacattg

SEQ ID NO: 380773 - DNA, 382 bp, Homo Sapiens
cgagcggccgcccgggcaggtactgctgtaaaaaagactttaggtgaaaataagttaccaatcagctcaccttaaaataaggtgatggtcttaggttatccaggtgggcacaaggtaattacatgggcctgaaacaagcaggagaggatggaaaagaatcagagtgatgtggatgaaagagtaggagagatgaagcagtggggtccgggggagggcagaccatggagattggatgcaggaaaagggttcaacttggcatcatgagctttgaagagggataagcagtcaccacctagggaatgtgggtggactctaggatttgggaacagtctgtagcttacagctagccaaggacacaaggatctcactcctattaccctct

SEQ ID NO: 380774 - DNA, 390 bp, Homo Sapiens
  misc_feature (228)..(286): n is a, c, g, or t
tttgagcgggcggccgctcaggtacaggagggagatccctgagttgggaacatgctggtaatgcttgggaaatgttacaaaacaccctataaacaaaacattcagcttcccaaagagctggccattatcttgaactctttcttaccattcaggcttagaaatactcattttgtggtcagtgtgggagacctttaatcataaagtgaagcttattaaaataaagatttnnnnnnnnnnnnnnnnnnnnnnnnnnnnnnnnnnnnnnnnnnnnnnnnnnnnnnnnnnnaaacactgtaatatagcatttatattcataactaaatattttaaaacaaaatatgaattgccagccttgttcataagggaacatgattctgtagtcaagtcatg

SEQ ID NO: 380775 - DNA, 151 bp, Homo Sapiens
ttagcgtggtcgcggccgaggtacatgtgttttcttttatgttcttattgacactagatttaatggacccttttcaaaggtctcccagtggtaactatccaaaaatggatgagtaatgtaggctacagcttattcacagatggcttcagtt

SEQ ID NO: 380776 - DNA, 136 bp, Homo Sapiens
gagcggccgcccgggcaggtacgcgggcatgcccagtcacaagtataattctattctagaaatgaactatttaatgtcaggaaatctagcaacataacccattaaataacaattaaatagaaaaatattttggtta

SEQ ID NO: 380777 - DNA, 246 bp, Homo Sapiens
acactcccaggacgctgatccttgtgaacaagaaataagcagtggccataacccctcccttttaattcaccaccttttaaacttcaatcatattttcctgagacaacattggaaactggcctttctgttggcattccttcttcagtgcatagatcagtcattttaggctcacttcaaacctatttgaatcccacgtcccctgctcaccatgctacctttctttttactgtcctccaatcttagtct

SEQ ID NO: 380778 - DNA, 496 bp, Homo Sapiens
cgatcggccgcccgggcaggtacatgtgcatacacacaaattgaggagcaacaggtgtaagattagggaaggacacagggagaaaacacatcctagaaattaagaagctcaagaattaataaggagaatgcagaaacctagagaagacaacttattattaacatcagaaatgacctagttcaaattaaattatcatgttcaaaagcactccaattctaaacagaatacagacattcaaataattttcaactacctatccttatttgaacccataacaaaccaatggctaatatacctaaacctagcttccctgtctatacttatattttggtgcaactttcttggcaaaggttcccagcagctataaaaggaccctgaacaaattgtgttacatggttactatagtagacagaagtaaacagaagtaaaattgtcactgaaaaaaaataggaccacacttcttttacaattagggtacctgcccgggcggccgctc

SEQ ID NO: 380779 - DNA, 445 bp, Homo Sapiens
  misc_feature (422)..(422): n is a, c, g, or t
ggtacggtgctgacaatgagaaatcctagaaagaatggcattagttttactactactaatgtggattagctcattggttttagcttctaataaggcttcggttttcttacagcaaatatctagctgaatcactagttcctcagacagttttttaaattccaagctcttgtcctctaggcttttgttacttttttcatgtgaagatttcaaactctggaattcttcatctgtggttttcaacttgctagtcaactcagaaaccttccgcttatcttcttctgccagcatcttcagttcaactagctgctcttgaagaaaagtattttccttcagagacttattcaagtcaacctctagcttttcaagatgagctttcagtttagtttcatcttgtgcaagagaattcacatgggcagacttcngctttaactgttcctgtaattca

SEQ ID NO: 380780 - DNA, 164 bp, Homo Sapiens
cgcccttagcgtggtcgcggccgaggtactaaattcatagactgggagactcagtattgtcaggatatcaatggtcccactaatgatccaaagattcaacaaaatcccaaaaaaccagcagccttttttgaagaaactgacaaactgattctaaaacatacatt

SEQ ID NO: 380781 - DNA, 229 bp, Homo Sapiens
aatgatgacaatcacatgtcagagtagtggatgaaccaagactccaatgggggaggtggagggaaggaggaaagcgaccctcatccaatgcccacggtgtgcaggggcctttctacctcccatttcagtctcctggcctcaccctacagatggggacgtggctcagggaggcacagtgcttgcctgagtcacacagccgggaggcgacacgcccgggcggccgctcgaa

SEQ ID NO: 380782 - DNA, 336 bp, Homo Sapiens
tcatcccaacactccagagacccggagacgaagatcgggcgtttagaccaggctgggctaaatgagacgctgtataaaaactaaaatgtaaagaaaaagtaaagaaggcagcagacacactgtggacaagcttattgttgccagtgcctccaaccgcctgatgcagcagttcagactcattgaagagaaacgttgtgggctactgagcaggtgcaggctcttgccaccaatcctgaggggcctgagttcgatctcggagacaagtaggaccaccacagacaaagatgagtaaagcaaagtaatgaaaaataaaagctgtgcaaatgcttgaagcca

SEQ ID NO: 380783 - DNA, 756 bp, Homo Sapiens
tttaagatcctcatcaataaatggagacgtataggaaaagtcagactacgtctacaaaatgtcagtatcatgctgcggcttcaaatccgaagtgatgttttgatgtgaagtgaaattttagttgtcgtagtaggcaaacaataaggaatgttgatccaataattacatggagtccatggaatccagtagccatgaagaatgtagaaccatagataccatctgaaatggagaatgatgtttcaaagtattctgaagcttggaggatggtgaagtaaagtcctagtataatggtaattagtagggcttgatttatgtggtttcgtttaccttctataaggctatgatgagctcatgtaattgaaacacctgatgctagaagtactgaagtattaagtagtgggacttctagagggttaagtggtgaaattcctgttggaggtcagcagcctcctagatcatgtgttggtacgaggctagaatgatagaacgctcagaagaatcctgcaaagaaaaatacttccgagacgatgaatagaattataccatatcgtagtcctttttgtacaataggagtgtggtggccttggtaggttccttcacgaattacgtctcgtcatcattgatatattgtgaggatattggtgagtaggccaagggttaatagtgtaattgaattatagtgaaatcatattactagacctgatgttagaaggagggctgaaaaggctccagttaatggtcatggacttggattaa

SEQ ID NO: 380784 - DNA, 825 bp, Homo Sapiens
aataagtccctactcgcggatgaagaggcctccgaaagggaacgagattctggagtaaatatcacagccaaaggaattcctgtccacggcttcaaaataggtgatagagtggagtttttatctcgttaggcttatggtcagtgatgctcggaagctgggctggcatgattgccaactcagatctcggtgtcatcagaggctcctcagccttcagacagcccgacgacgacgcttgacgctagcggcttgctgtgcttgctcactcccctgcactcacgagatgttattactgttacttgagggcgtctttcctcgtgtctgtcatgctgtgagcaaatcataaaaagcttatattatttttcactataaagttactttattaaagcacctaataaactgaactgttaatcatatatattaataatattcattgcattattatatttctattgtattggtatacttacccagagtgctagggagaactttacaatttcatccagaaatttaattttgttaaaggcttgacttgagttcatatagtattgtgtgagttccctctggattcaatcatttgttcttagtggggaatggaaggcttataagtctcgggaaactgatgaaattctccatcacaaagtccaaagggtctttggacaagggtccaaacatgaagtgctttctggaggagcttttgtttagtccaacaggagtccaaggatgcagattagagttttgtgagtttgcctcccttgctgggctaggcatttcattgttgtaactgcctctgagtaactgatgatcctataagtaaccccaataaac

SEQ ID NO: 380785 - DNA, 873 bp, Homo Sapiens
atacttcgtcacacaagcaacagcctcaataattatcctcctggccatcgtactcaactataaacaactaggaacatgaatatttcaacaacaaacaaacggtcttatccttaacataacattaatagccctatccataaaactaggcctcgcccaattccacttctgattaccagaagtaactcaagggatcccactgcacataggacttattcttcttacatgacaaaaaattgctcccctatcaattttaattcaaatttaccccgctactcaactctactatcattttaatactagcaattacttctattttcataggggcatgaggaggacttaaccaaacacaaatacgaaaaaattatagcctattcatcaattgcccacataggatgaatattagcaattcttccttacaacccatccctcactctactcaacctcataatctatattattcttacagcccctatattcatggcacttatactaaataactctataaccatcaactcaatctcacttctatgaaataaaactccagcaatactaactataatctcactgatattactatccctaggaggccttccaccactaacaggattcttaccaaaatgaattatcatcacagaacttataaaaaacaactgtctaattatagcaacactcatagcaataatagctctactaaacctattcttttatactcgcctaatttattccacttcactaacaatatttccaaccaacaataactcaaaaataataactcaccaaacaaaaactaaacccaacctaatattttccaccctagctatcataagcacaataaccctacccctagccccccaactaattacctaaaaaaaa

SEQ ID NO: 380786 - DNA, 579 bp, Homo Sapiens
cctactaaagcatgatgcttttcaaggtcctggtgatcactgtcttctgtggtctgactgtggctttccccctgtcagaattagtttcaatcaataaagaactacagaattcaatcattgacctactaaactcagtctttgaccaactgggatcatacagagggacaaaagctcctctagaggattatacagatgatgatttaagcactgactctgagcagatcatggacttcacgccagccgcaaacaaacagaattctgagttctctactgatgttgagacagtctcctccggctttctggaagaattcactgagaacacagacatcacagtgaaaattccattagctgggaatccagtctcccctacttcctgagaagactccaactttgaaataaacctgcgactgccattcaggatattgtctttgtagaaaatgatataaatctaagatgctcccagcaaagaagaaagaacgaggaagtgatcctggatgagaaatgctgtgccaggcatctctaagctctgcccttactctgtgtgggtttaagaaataaacgttcatttgaattgcaaaa

SEQ ID NO: 380787 - DNA, 798 bp, Homo Sapiens
tttatgtattatcatgtagatataggcttactaggagggtgaatacgtaggcttgaattaatgctactgcaaattctagaattgtgagtagaagtaaaataataaatgtaatggtagctgttggtgggctaatatttattaatactagagtagctcctccgattaggtgtattaataagtgtcctgcagtaatgttagctgtaagccggactgctaatgccattggttgaataaataggctaattgtttcaataataataagtattggaattagtgaaattggagttccttgtggaaggaagtgggcaagtgagctttttagtttgtgtcggaagcctgtaattacggctccagctcatagtggaatggctatacttagatttatggatagttgggtagtaggtgtaaatgtatgtggtaaaaggcctaggagatttgttgatccaataaatatgattagggaaacaattattagggttcatgttcgtccttttggtgtgtggattagcattatttgtttgataataagtttaactagtcagtgttggaaagaatggagacggttgttgattaggcgttttgaggatgggaataggattgaaggaaatataatgatggctacaacgattgggaatcctattattgttggggtaatgaatgaggcaaatagattttcgttcattttaattctcaaggggtttttacttttatggttgttagtgattttggtgaaggtgccagtgggaatgtttgtgatgagacttttagttgaaataagataaataggtaatctcgccc

SEQ ID NO: 380788 - DNA, 180 bp, Homo Sapiens
gttgattagtatggggataattgctagtaggctgaattccaggcctactcatattagtattaggttggtgctggatattgtgattacaggacctaagaagattgtgaagtagatgatggcaagggtgataggatttattagtacgggaaggatttaaaccaacgttatcggggtatgggc

SEQ ID NO: 380789 - DNA, 425 bp, Homo Sapiens
  misc_feature (30)..(30): n is a, c, g, or t
  misc_feature (63)..(63): n is a, c, g, or t
ctgttgcccaccccagtcgcttcttcaccngcctcctaccaccctatttagatactgtcaccnacccagccaggcttccagttctcctaaattattttggaggacctgaatggctcagtcaaccctggaaattagataacatttgattgaacttctgaaaacacaacacatgtgaatcataaacacaagagaaaagccaaatcagctttgaaacccaagaatgagcatgtcacccaatagtctctcaacacttccagttccctatgttccagaacattcatccaagaaaagaacaggccacgactgagaaaagcaactcagaagcagaggatggagaagggcattttaataaacatagttaccaggggttggttatagaagaggcacagcaacagaaaaagaaataaaacgtgtatgaaccttca

SEQ ID NO: 380790 - DNA, 610 bp, Homo Sapiens
gagcatcggcggagtgatccttttccacgagaccctctaccagaaggacagccagggaaatctgttcagaaacgttctcaaggagaagggaattgtggtgggcatcaagttgaacccaggaagctttcatgaagcgggctatggctaactgccaggcggcccaaggacagtacgttcacacaggctcttcaggtgctgctgccacccagtcgctcttcacagcctcctacacctattagatactgtcaccaccagccaggctccagttctcctaaatattttggagacctgaatggctcagtcaaccctggaaattagataacatttgattgaacttctgaaaacacaacacatgtgaatcataaacacaagagaaaagccaaatcagctttgaaacccaagaatgagcatgtcacccaatagtctctcaacacttccagttccctatgttccagaacattcatccaagaaaagaacaggccacgactgagaaaagcaactcagaagcagaggatggagaagggcattttaataaacatagttaccaggggttggttatagaagaggcacagcaacagaaaaagaaataaaacgtgtatgaaccttcaaa

SEQ ID NO: 380791 - DNA, 591 bp, Homo Sapiens
  misc_feature (467)..(467): n is a, c, g, or t
  misc_feature (501)..(501): n is a, c, g, or t
  misc_feature (508)..(508): n is a, c, g, or t
  misc_feature (515)..(515): n is a, c, g, or t
  misc_feature (542)..(542): n is a, c, g, or t
  misc_feature (558)..(558): n is a, c, g, or t
  misc_feature (566)..(566): n is a, c, g, or t
ccacctcacacagcttctgataccttggaggactcttcccctttgctgtacctgtcatcatggctcaccgatttccagccctcaccccagagcagaagaaggagctctctgaaattgcccagcgcattgttgccaatgggaagggcatcctggctgcagatgaatctgtgggtaccatgggaaaccgcctgcaaaggataaaggtggagaacaccgaagagaaccgaagcagttccgagaactcctctttagtgtggacaattccattagccagagcatcggcggagtgatccttttccacgagaccctctaccagaaggacagccagggaaatctgttcagaaacgttctcaaggagaagggaattgttggttgggcatcaagttggaccaaggaggtgccccgctttgcaggaacaaacaaggaaaccaccattcaagggcttgatggctctctgaacgctgtgntcagtacaagaaagatggagttgactttgggaanttgcgtntgtgttnagattctgaccagtgtcttcagccttntatccagaaatgcatntctggtcntatgcagattgtaggggttttcttg

SEQ ID NO: 380792 - DNA, 601 bp, Homo Sapiens
  misc_feature (496)..(496): n is a, c, g, or t
  misc_feature (507)..(507): n is a, c, g, or t
ttctgagaaggtcctggcatgctgtctacaaggctctcaatgatcatcatgtttacctagaaggcaccttgctaaagccaaacatggtgactgctggacatgcctgcacgaagaagtatacaccagagcaggtggctatggcaatgtcacagctctccacagaactgttcctgcagctgttcctggtatctgctttttgtctggaggtatgagtgaggaggatgctacacttaacctcaatgctatcaaccggttgccctctaccaaggcccttggaaactaagcttttcatatggaagagccctccaggccagtgcattggctgcctggggtggcaaggctgcaaacaagaaggcaacccaggaaagctttcatgaagcgggctatggctaactgccaggcggctcaaggacagtacgttcacacaggctcttcaggtgctgctgccacccagtcgctcttcacagcctcctacacctattagatactgtaacancagccaggctncagttctccaaatattttggagactgaatggctcagtcaacctggaaattagataacattgattgacttctgaaacacacactgtgatcataac

SEQ ID NO: 380793 - DNA, 241 bp, Homo Sapiens
  misc_feature (105)..(105): n is a, c, g, or t
gaggtgggacttattagatctaaacaatgtctattttcaagaaatgggtatgggaggggtacaaggaaagagtctaatgaaggtgcagcaatgggcacacacctnggttcagaacatttggcagacacacaggtttcaaggagtggccaaagcatttgttgcacctctatttttttaaatcagtgaagctagttctgctaacactgacgtctatcttgccaatttcagggcttctgtgtct

SEQ ID NO: 380794 - DNA, 538 bp, Homo Sapiens
  misc_feature (42)..(42): n is a, c, g, or t
  misc_feature (147)..(147): n is a, c, g, or t
  misc_feature (175)..(175): n is a, c, g, or t
aaggaaaaaatccctcatttaaaccccaatcagatgcctcanaggggtagccctggattggttcttccagttaagaagccctgcagagcacaaactccagaaacccgggcttcctggggccaaggtctttccccaatctctaccccntttcttctcgggcccacccttctggttnaaaaattggtgctggggttattcagaaccttaaaagtattattcaaaaccaatttcttcccttccacagttatcttagctggatataatgtattttcagctcaattgttaatgtgatggatggcacaatgaatgtatattttgtgttattcgtgaatagtcttttgcatgtcgcacaatgtttgatgtccccaaagtaccacactgagttctatcagttatcctttgtgagcctatgatattccccatttcctgtacaatcatgaacagctctgagatcctggagtgatatgatccagagcagagtttacgggtcttaggatgtctgtaataaataaatatactcaagtttcaggtaaaaaaa

SEQ ID NO: 380795 - DNA, 897 bp, Homo Sapiens
cagctttattagcgacctgagggactaaggtctctgattcctccttcactccctcagggtatcaactgcaaaggccttctccaggaggaaggctaatcacatgattctgagaattcctggcaaggagtcaggtctctcttcttaattttaaaaattccaaatcctgatttctgagtcagcaaagtcagaggctggagtcttcaaaggttaggagatatatgctagggaatacagtctcaaaaaccaaaatgtagtgtcttcaaaggttagaaggtctctgattcctccttcactccctcagggtatcaactgcaaaggccttctccaggaggaaggctaatcacatgattctgagaattcctggcaaggagtcaggtctctcttcttaattttaaaaattccaaatcctgatttctgagtcagcaaagtcagaggctggagtcttcaaaggttaggagatatatgctagggaatacagtctcaaaaacaaaatgtagtgtcttcaaaggttagaagatatatgctggggaatacagtctcaaaaatgaaatacagagtcgtcaaaggttaggagatatatgctgaggaatacagtctcaaaaagaaaatggagattcttcaaaggttaggagatatgtgctggggaatacagtctcaaaaacgaaatatggagtcttcaaaggttaggagatatatgctggggaatatagtctcaaaaaaatgcagtgtcttcaaaagtcgggagatatgtgctggggaatacagtcccaaaaacaaatgcagtgtcttcaaaggtcaggagatatatgctggggaatacagtctcaaaaacaaagtacagagtcatcaaaggttaggagatatatgctgggaaatacagtctcaaaaacaaaatgg

SEQ ID NO: 380796 - DNA, 1022 bp, Homo Sapiens
accaaggtccttctgtgatgctgtccactgaggcttttctgtatgtgggcaccatgctggatgggggtgacttgtcccggtttgtactgctaatgaccaactgctatgccacacccagtagcaactccacagaccctgtgaaatacttcattatccaggacagttgtccacagtacagaagatacaaccattcaggtgacagagaatggcgagtcatctcaggcccgattttctgttcagatgttccggtttgcaggaaactacgaccttgtctaccttcactgcgaggtgtacctatgtgactctacgagtgaacagtgtaaacctacctgctctggtactagatttcgaagtgggaacttcatagatcagacccgtgtcctgaacttgggtcccataacacgacaaggtgtccaggcctcagtgtccaaggctgcttccagcaacttgaaggctcctgagcatctggctgctgttgtttccctcagccactttgatcttcatggttcaatgatggaaagcagaaaacctggtgtggctcccagctcacttcctgctggccaggagtggggatgcaggctggttatcagccaggagagagggagctcacactgcctccagcttgcacgtactctttctttaatcctcaccatcaaaaacaagttggcatctttcagtgctgttcttccttcaaatgtgatatgtatgaagcccctgtctcctgaaggaatgtggcaaaataataagtttaaagtatcagcttttggactcattaattcaagtcgttacagaacacacagttgctgtgagcactgtctgttgtgctgggcattacatggtgggaataaaacagatcctttctctatctttatggacttcatagatgctctaagaaactaggctcaatgcatgttctgctatgtgatctaagatgagacacacaatgtatatgaacttcacctgtctatccattcatgtatacatccatcctttcactcaataaacatttgcctaagtcaaaa

SEQ ID NO: 380797 - DNA, 378 bp, Homo Sapiens
  misc_feature (166)..(166): n is a, c, g, or t
aacggtcgcgccaaaaagggccgcggcatggtgcagcccattcgctgcacgaactgcgcccggtgcgtgcccaaggataaggccatcaagaagtttgtcattcggaacattgtagaagccgctgctgtcagggacatatctgaagcaagagtcttcgacgcctacngtgcttcccaagctctatgtcaagctgcattattgcgtgagctggtgccatccatagcaaggttgttaggaatcgatcccgcgaggcccggaaggaccgaacacccccaccacgattcagacctgtggcgctgcacctcgacctccaccaaagcccatgtaaagaggccgttttgtaaggacggaaggaaaattaccctggaaaaataaaat

SEQ ID NO: 380798 - DNA, 581 bp, Homo Sapiens
  misc_feature (215)..(215): n is a, c, g, or t
  misc_feature (307)..(307): n is a, c, g, or t
  misc_feature (342)..(342): n is a, c, g, or t
tttaaaattaaaaagatatattttttaattaaaccctatctctattagtccacagttcttttctgcatcaaagccattgatcccaatttgacctgattaaatgtccctgaagcactgagggtaggacccagagtgctgtgggtgagaggagggagctttgtgtccctgggacccttgacaaggtgacaaaatgcctgactagaagcccgagtagncaagagacaggtgttcagattccttgagccagaaaaggtgagatgtgtttctgtccaggggtgcaaagaactggcctgctgtccttcacagncccagccactcaaaagggccatctcccaagatgantcctaaatccaagtcaaggtgacaggtaaagactcggccaactgaagttcctggggagtggcctagacaagttttacaggacttaatcttccaaaagcaaacccccatctcctcatcatccacaacagtcttgctagagtcttggggactgtctctgcctgcttcttgggtgtcacgccttcctctcccacctgcattcttcttcatgcatatgcaaaccacacagagacaaatgatga

SEQ ID NO: 380799 - DNA, 603 bp, Homo Sapiens
  misc_feature (587)..(587): n is a, c, g, or t
gcagtgcagtgatggacagaaagcaagtgatctaggccagcagcctccctaaagggacttcagcccagaaagctaaacttgtggctttaatacaagctctatatatatagacatctgcagagaaagacctaagatgctgtggctaaaagaaatcagatggcaaatctaaccgcccaggcatcctaaagagcaatgatcctgacagtctaaagactatcaagttatagacaaattaagactggtaaaagaaaccctgtataaaatagtaaaaactgaagaaagaaaactagtcctctcatgagaagacagacctgacatctactgaaaaatagactttactgaaaaaatatgtgtataaataccttctggatttttgtgaacgttctcaagatagataaaagcttttccttgtaaaacgagactgatcagatagtcatcaagaagattgttaaagaaaattttccaaggttcggagtgccaaaagcaatagtgtcagataatggtcctgcctttgttgcccaggtaagtcagggtgtggccaagtatttagaggtcaaatgaaaattccattgtgtgtacagacctcngagctcaggaaagata

SEQ ID NO: 380800 - DNA, 595 bp, Homo Sapiens
  misc_feature (13)..(13): n is a, c, g, or t
  misc_feature (27)..(27): n is a, c, g, or t
  misc_feature (59)..(59): n is a, c, g, or t
  misc_feature (100)..(100): n is a, c, g, or t
attctgctcgatncggttacttcatgncagagaagctggcattcatcccagcagctgcnacgaatggattcctgggcgaagcatggagactccagtgtgnctgtgtggacagtgcctatgaagtcatcaagcttcaaaggctacaccaactggccatcggcctgagcgtggctgacctcatcgagtccatgctgaaaaacctctcccggattcaccccgtgtctaccatggtgaagggaatgtacggcattgagaatgaagtcttcctcagtctcccgtgcatcctcaatgctcgggggctgaccagcgtcatcaatcagaagctgaaggacgatgaggtcgctcagctcaggaagagtgcggacaccctgtgggacatccagaaagacctcaaagacctgtgactgccagtctctaggctgtagaacacaaacctccaatgtgaccatgaacctttagtcttcagccatgtatgtaggtcacagtttgcttcttccctgacatgtgatatgagctcacagatcaaagcccaggcttgtttgatgtttgcactaggagctcctgatcaaataaagttagcaattgcagcataaaa

SEQ ID NO: 380801 - DNA, 1100 bp, Homo Sapiens
attcattgacctacctgccccatccaacatttcatcatgatgaaactttgggtcccttctaggagtctgcctaatagtccaaatcattacaggtcttttcttagccatacactacacatcagatacaataacagccttttcatcagtaacacacatttgtcgagacgtaaattacgggtgactaatccgatatatacacgcaaacggagcctcaatattttttatttgcttattccttcatgtcggacgaggcttatattatggatcatatacatttatagaaacctgaaacattggagtacttctactgttccgcaggtcatagccacagcatttataggctacgtccttccatgaggacaaatatcattctgaggtgccacagttattacaaacctcctatcagccatcccatatattggaacaaccctagtcgaatgaatttgagggggcttctcagtagacaaagccaccttgacccgattcttcgctttccacttcatcttaccatttattatcgcggccctagcaatcgttcacctcctcttcctccacgaaacaggatcaaacaacccaacaggattaaactcagatgcagataaaattccatttcacccctactatacaatcaaagatatcctaggtatcctaatcatattcttaattctcataaccctagtattatttttcccagacatactaggagacccagacaactacataccagctaatccactaaacaccccaccccatattaaacccgaatgatatttcctatttgatacgccattctacgctcaatccccaataaactaggaggtgtcctagccttaatcttatctatcctaattttagccctaatacctttccttcatacctcaaagcaacgaagcctaatattccgcccaatcacacaaattttgtactgaatcctagtagccaacctacttatcttaacctgaattgggggccaaccagtagaacacccatttattatcattggccaactagcctccatctcatacttctcaatcatcttaattcttataccaatctcaggaattatcgaagacaaaatactaaaattatatccataaaaa

SEQ ID NO: 380802 - DNA, 690 bp, Homo Sapiens
taagggacagtgtcattcaagaatgtgtgcagtttctagagcactgtgaactttatggtagaaacattccagctgttatagaacagcccttggaggaagaaagaatgcacactgggaagaatacagtcacatatgaatcaagaaagttgagggctctgatttatgagataattggatggaatgtgtaattaccgctgacaatttgtatcatgatgactttctatgtacattttcagtttttcctgtatctagcttttgctatttgtatttgctacttgtgagactttgtacactttagtgtaacaaaagcactattccgatataacctgcacttttaaatcctgtccaagtgagattgtgtaagaacccaggccctagaaagtactttggaacttttaaaactgagaaagatgttgtttctatcatgttttctccatttttgtttgggtttgatgtatcttggacaacctttgctattatgttatccagggaccagacactaagttcagaacttagtcgtccataacgtcttcttgtaatcactccaacgactgtgttttctctttgcacaactccccatgattttatagagaatttagagtgtttgacagttttccaatacagatataataatttgtacagattaaatttcttaggtaataattggttttgctagttttcaagattcag

SEQ ID NO: 380803 - DNA, 654 bp, Homo Sapiens
ccacatcccctattatagaagagctaataaatttccatgatcacacactaataattgttttcctaattagctccttagtcctctatatcatctcgctaatattaacaacaaaactaacacatacaagcacaatagatgcacaagaagttgaaaccatttgaactattctaccagctgtaatccttatcataattgctctcccctctctacgcattctatatataatagacgaaatcaacaaccccgtattaaccgttaaaaccatagggcaccaatgatactgaagctacgaatatactgactatgaagacctatgctttgattcatatataatcccaacaaacgacctaaaacctggtgaactacgactgctagaagttgataaccgagtcgttctgccaatagaacttccaatccgtatattaatttcatctgaagacgtcctccactcatgagcagtcccctccctaggacttaaaactgatgccatcccaggccgactaaatcaagcaacagtaacatcaaaccgaccagggttattctatggccaatgctctgaaatttgtggatctaaccatagctttatgcccattgtcctagaaatggttccactaaaatatttcgaaaactgatctgcttcaataatttaattta

SEQ ID NO: 380804 - DNA, 743 bp, Homo Sapiens
  misc_feature (182)..(184): n is a, c, g, or t
  misc_feature (189)..(189): n is a, c, g, or t
  misc_feature (237)..(237): n is a, c, g, or t
  misc_feature (243)..(281): n is a, c, g, or t
  misc_feature (551)..(551): n is a, c, g, or t
  misc_feature (636)..(636): n is a, c, g, or t
agaaagttggcacagtcacgccgggcttcgcaggaccaggtcactcagtgacagatggacaatgcaagaatgaactccttcctggaataccccatacttagcagtggcgactcggggacctgctcagcccgagcctacccctcggaccataggattacaactttccagtcgtgcgcggtcannnaaacnagttgcggcggcgacgaccgttcctagtgggcaggggggtgcagatcngttcgnnnnnnnnnnnnnnnnnnnnnnnnnnnnnnnnnnnnnnnagccggctacctaccaagacttccgggaacctgggggtgtcctactcccactcaagttgtggtccaagctatggctcacagaacttcagtgcgccttacagcccctacgcgttaaatcaggaagcagacccaccaagaagcctgtcgctcccccgcatcggagacatcttctccagcgcagacttttgactggatgaaagtcaaaagaaaccctcccaaaacagggaaagttggagagtacggctaccatgggtcaacccaacgcggtgncaccaacttcactaccaagcagctcacggaactggagaaggagttccacttcaacaagtacctgacgcgcgcccgcaggtgggangatcgctgcatccctgcagctcaacgagacccaagtgaagatctggttccagaaccgccgaatgaagcaaaagaaacgtgagaaggagggtctcttgcccatctctc

SEQ ID NO: 380805 - DNA, 268 bp, Homo Sapiens
agtgatgttccatgttcccatctaacaaagcttgctcaagtttagccgacgtcttcatcttgtggattcggagcagttagtgatggccatgggcaggtgcaggacctttcaaagctttacttcttttatcagcactcctgattttatatacgatgaggctcattaaccccactcctacccaaatttcctggtaaacctgggtatagtaagggtttcatggggaaccaagactttttgaatcaaaggtttgaaacatctccgcgggacc

SEQ ID NO: 380806 - DNA, 546 bp, Homo Sapiens
  misc_feature (116)..(116): n is a, c, g, or t
accacagatctgaactccatggagaagtccttctccgaccttcttcaagcgttttgagaaaccagaaagaggtgaatcgagggttaccgcaagaacgaagagtcactgaaagaaantgcgtggaggattacctggcaaggatcaccccaggagggccagaggtaccaagccctgaaggcccacgcggaggagaagctgcagctggcaaacgaggagatcgcccaggtccggagcaaggcccaggcggaagcggttgcctccaggccagcctgaggaaggagcagatgcgcatccagtcgctggagaagacagtggagcagaagactaaagagaacgaggagctgaccaggatctgcgacgacctcatctccaagatggagaagatctgacctccacggagccgctgtccccgcccccctgctcccgtctgtctgtcctgtctgattctcttaggtgtcatgttcttttttctgtcttgtcttcaactttttttaaaactagattgctttgaaaacatgactcaataaaagtttcctttcaatttaa

SEQ ID NO: 380807 - DNA, 206 bp, Homo Sapiens
  misc_feature (108)..(108): n is a, c, g, or t
tgaccttctggcctaaagcggtgccccagggccccactcctgtatttctatttcagaacaatctgatctaatggtcctaacagtcttcactgccatccccaaggccantcacctctggtttgatacagacatctagatttggatatcaagaaaaatgtcaagtttttgattactcatgtctgaaaactgtgatttccccatacttt

SEQ ID NO: 380808 - DNA, 252 bp, Homo Sapiens
atcctccaggagcctggggaagggaagcgcgccccccggcccggtcccggagccagaatccgcgtctacagcatgaggttctgccccttcgctcagaggacgctgatggtcctgaaggccaagggaatccggcacgaagtcatcaatatcaacctgaagaataagcccgagtggttctttgagaagaatccccttgggctggtgccggttctggagaacagccagggtcacttggtcaccgaatttgttaat

SEQ ID NO: 380809 - DNA, 848 bp, Homo Sapiens
  misc_feature (42)..(42): n is a, c, g, or t
  misc_feature (48)..(48): n is a, c, g, or t
  misc_feature (65)..(65): n is a, c, g, or t
  misc_feature (70)..(70): n is a, c, g, or t
  misc_feature (92)..(92): n is a, c, g, or t
  misc_feature (108)..(108): n is a, c, g, or t
ctacgtgtcaagtagtcgtcccaagcccttctgctttctgangaaaantgactcccttaactagnatatngtactcctttttagtctctttnattaaactcatttatnctagaggtcatacctaatcgtttccaagagcattgtcaagcttgtaacaataaatattggagttaatttaaatgagtcaaagttcattctcctttagctgccgtctatttaagtatgatcacctgcccagacggtcctcttctgtaagagcgataaatggaaatggctggcatcctaggcacaaaacttttaaggaagaaggatggcattttaatggtataatcttttaaaagcataagataaatggccagcaattgatgtgtattagacatgcattttattttaaacaacgagttatcttgagttttcccagactgaacatcatctgaggtataaaatagcataactttccacattttcattgtcggactttcagacattaaatattttctctctgggtcataagatggtccttggtggtgaacttttatttgatgaggagaaacatatttattaatatttctcactttttataggagactctgcctctatgacttcatgtggtccctgaaagctccctagattctattcaggaaatgttattacaagactctgtgtgatgatttttgaaaagctggcttcctgtggctcacagagaacagcatatgattttgttgccatcttatgcaaagaaagtcaggagaactggtgggcacaaggactaccatgtataaagtagtcattaaacgtgaatgatgtgctacagaagatgaattcaggaaaattattcaaaaacctta

SEQ ID NO: 380810 - DNA, 592 bp, Homo Sapiens
gctcctcgtggcggccctctatggctgctgccaccagcgcctctcccagaggaaggaccagcagcggctaacagaggagctgcagacagtggagaatggttaccatgacaacccaacactggaagtgattggagacctcttctgagatgcaggagaagaaggtggtcagcctcaacggggagctgggggacagctggatcgtccctctggacaacctgaccaaggacgacctggatgaggaggaagacacacacctctagtccggtctgccggtggcctccagcaagcaccacagagctccagaccaaccaccccaagtgccgtttggatggggaagggaaagacttggggagggagagtgaactccgaggggtgtcccctcccaatccccccagggccttaatttttcccttttcaacctgaacaaatcacattctgtccagattcctcttgtaaaataacccactagtgcctgagctcagtgctgctggatgatgagggagatcaagaaaaagccacgtaagggactttatagatgaactagtggaatcccttcattctgcagtgagattgccgagacctgaagagggta

SEQ ID NO: 380811 - DNA, 493 bp, Homo Sapiens
taaataactaaccttgtgcctagaaatatagaagaattcatttactgtttaacagggcaaagtatacatcttgatagtggtcatccattagggattaaaaaaattgtaattttaaatggcatttctttgactgataattgtaaggaattgtcaatatgcacacagattagtgttttgtcttggggaagaaaccctgaagtctgcaagacagtatgaatttaattcaccttcactgtttaacttgcaaaaaccattgtgaatcaaaggttgctaaaaggtttttaaaggagagtaaagttgctcttggtagagctggctggcccagcgccacgtgagcacagtgcgtttaataactcgcccactaaggggcaggtggcttaactgtgagaacttctcagccttacaatcagcagctctgactctcctcggcatgcaaggcgctcgcacacactaaagggctgagcgcccagcactggccgactcctccatacag

SEQ ID NO: 380812 - DNA, 489 bp, Homo Sapiens
gttagtattggtggtaaccatatgcaactatagcctcaaagtccaatgcatgtatatttgctctcaggtgaactttaatgccagagaaaacatcctgaattgacccattttcccactcttgtggtcctttgactacatactgtatttagtagaaactatattaaacataaagaattaaaattttcatttggtcagtattctatagaacgtggaaatgtccacattgcttaggtaggtcacttacagcagccaatgggaagatgtcttcagacaatgttgctttgctgcctgtttgggatccttgtacattttactttacaagagagattccatagattcaaacaaatgcctgaactccctatgttcttctagcacagttgtttataagtaggctggagcttcaataatgaagatctcctgccaattccactaagtctaagaactgacaactctcaaaatgctttttcctccttgtgacttaatggttct

SEQ ID NO: 380813 - DNA, 448 bp, Homo Sapiens
cacctcaccagtatgtctcaggctgaatttgacaaagccgctgaggaggtgaagcgcctcaagactcagccaactgatgaagagatgctgttcatctacagtcaacttcaaacaagctactgtgggcgatgcaaatacagatcggccggggctcttggacctcaagggcaaagccaagtgggactcgtggaacaagctgaaagggacttccaaggaaagtgccatgaagacctatgtggaaaaggtagacgagctaaagaagaaatacggaatataaatcaccagatttggtggccagccacacgtgtgacctgtgaggacataatgccttggttttttctaatgtagatgatatggctgtgatacattagggccagcgttaacctctgctcctcctccctctgtagtttttacctacaatcaattaaaagtacatttgttactctga

SEQ ID NO: 380814 - DNA, 1200 bp, Homo Sapiens
  misc_feature (21)..(21): n is a, c, g, or t
  misc_feature (35)..(35): n is a, c, g, or t
  misc_feature (48)..(48): n is a, c, g, or t
  misc_feature (61)..(61): n is a, c, g, or t
  misc_feature (69)..(69): n is a, c, g, or t
  misc_feature (101)..(101): n is a, c, g, or t
  misc_feature (114)..(114): n is a, c, g, or t
  misc_feature (126)..(126): n is a, c, g, or t
  misc_feature (138)..(138): n is a, c, g, or t
  misc_feature (154)..(154): n is a, c, g, or t
  misc_feature (1078)..(1078): n is a, c, g, or t
  misc_feature (1112)..(1112): n is a, c, g, or t
  misc_feature (1142)..(1142): n is a, c, g, or t
  misc_feature (1159)..(1159): n is a, c, g, or t
  misc_feature (1180)..(1180): n is a, c, g, or t
atccaataacaagggccatgnggctaactgaggantaggccgattagngattttaaaaccnggttggcntaagccagatgagctagttataattaatcccncatagggagaganggatgaaggggntatgctatatantttggttagtgggccntagaataatggagatgcgaattatttccgtaactaccctaattttagaagaattagctgctagaattattgacccagcaattggagctttcaacatgggcttttggtagtcataggtgaactccatataatggtattttaataagaaatgctattatgcatgccaaccatagtaagttgttagatcatgaagcgtctaaggtgtgtgttgtgaatgataaaattatgaggtttagggttcctacatggttttggattaagatgagggcaattagcagtggaatagaaccgattagggtataaaataggaaataaatccctgcgtttaggcgttcagtttggttccctcatcgggtaataataataagtgttgggattaaggttgcttcaaataaaatataaaatataattagttcagttgctgaaaaggttatgattaggagaatttgtaagctgattagtattgagatgtagagtttttgtagtaccgttattatctttttttaggtggttttggctagctattaatattagtggcagtaatcaggctgttaaaataattaatggtgtggatagggggtctgaggagaatatatttgaaaagtttttataattttcgtcggtttgtcatagaagtgttaggctggttaaactaattagaaaactatatgaggttacgtttgttcaggtttttttagggcttgatagtcaggttagtggtagtagcattagtgagggaagaataatttttagcattgtagtaggttgagattttggaccgtaatctgttccgtacgtgtttgaaacttttactagtagggctagtcctacagctgcttcgcaggctgcgaaaaactaagatggtgatgggggattggtatggagcctatgggagttggagttttagggaagttactgaagttantaataaataaggataataccatgccctccaggcntaagtaaatgtggatattagggtgagagcnaaatattaagtgtcccnagaagtgatagttagaaggcnatggtgaggttgaagaaagc

SEQ ID NO: 380815 - DNA, 821 bp, Homo Sapiens
tctgagaggaacccttctctgaggatggacacttctcacactacaaagtcctgtttgctgattcttcttgtggccctactgtgtgcagaaagagctcagggactggagtgttaccagtgctatggagtcccatttgagacttcttgcccatcaattacctgcccctaccctgatggagtctgtgttactcaggaggcagcagttattgtggattctcaaacaacggaaagtaaagaacaatctttgcttacccatctgccctcctaatattgaaagtatggagatcctgggtactaaggtcaacgtgaagacttcctgttgccaggaagacctctgcaatgtagcagttcccaatggaggcagcacctggaccatggcaggggtgcttctgttcagcctgagctcagtcctcctgcagaccttgctctgatggtcctcccaaatgacctccacccttgtccttttatcctcatgtgcaacaattcttcctggagccctctagtgatgaattatgagttatagaagctccaaggtgggagtagtgtgtgaaataccatgttttgcctttatagcccctgctgggtaggtaggtgctctaatcctctctagggctttcaagtctgtacttcctagaatgtcattttgttgtggattgctgctcatgaccctggaggcacacagccagcacagtgaagaggcagaattccaaggtattatgctatcaccatccacacataagtatctggggtcctgcaatgttcccacatgtatcctgaatgtccccctgttgagtccaataaaccctttgttctcccaaaaaa

SEQ ID NO: 380816 - DNA, 573 bp, Homo Sapiens
ccgggctgcggcctgggagtccgatggctgcagaggacaacccggggcgtggtgccactggaggcacggagagccttccatatgaccaaggacatgttgccggggtcatatcctaggaccccagaggaacgcgccgggccgccaagaagtataacatgcgagtggaagactacgagccataccccgatgatggcatggggtatggcgactacccgatgctccccaaccgatcacagcatgagagggatccgtggtatcagtgggaccactcagaactcaggatgaactggggtgaaccgatacactgtggacctagacatgtacatcaggaatcgtgtggacacgtcacctacccctgtgtcctgggatgtcatgtgtaaacatctcttcggctttgtggctttcatggttttcatgttctgggtagggcacgtgttcccttcctaccagcctgtgggtccgaagcagtacccttacaataatctgtacctggagcggggtggtgatcctaccaaagagcctgagcccgtggttcactatgatatctgaggaggcttgatgggctttttgccc

SEQ ID NO: 380817 - DNA, 849 bp, Homo Sapiens
  misc_feature (129)..(129): n is a, c, g, or t
tggactcctgttaccatgaggttcctgatcctgttcctagccctgtccctaggagggattgatgctgcacctcctgtccagtctcgaattgttggaggatttaactgtgagaagaattcccagccctgnaagtggctgtgtaccgcttcaccaaatatcaatgtgggggtatcctgctgaacgccaactgggttctcacaagctgcccactgccataatgacaagtaccaggtgtggctgggcaaaaacaactttttggaggatgaaccctctgcccaacaccggcttgtcagcaaagccatccctcaccctgacttcaacatgagcctcctgaatgagcacaccccacaacctgaggatgactacagcaatgacctgatgctgctccgcctcaaaaagcctgctgacatcacagatgttgtgaagcccatcgacctgcccactgaggagcccaagctggggagcacatgcctagcctcaggctggggcagcattacacccgtcaaatatgaatacccagatgagctccagtgtgtgaacctcaagctcctgcctaatgaggactgtgccaaagcccacatagagaaggtgacagatgacatgttgtgtgcaggagatatggatggaggcaaagacacttgtgcgggtgactcaggaggcccactgatctgtgatggtgttctccaaggtatcacatcatgggccctagccttgcggtaaacccaatgtgccgggtatctacaccagagttttaaatttcaacacctggataagagaaactatggctgaaaatgactgagtatcacattgtcccatgttctcaataaagcccaccatgcagcaaatgaa

SEQ ID NO: 380818 - DNA, 598 bp, Homo Sapiens
  misc_feature (322)..(322): n is a, c, g, or t
  misc_feature (506)..(507): n is a, c, g, or t
tgaagagctggctgagcggactgagaccaaaagaccagacatcggtgggcatcagcttcgtggccggtggatctcaggaatggtggctgccacccttaccctaaccttcgatgtggtgaagacacagcgacagatgtcactgggagcggtggaggctgtgagagtgaagccgcccagagtggactccacctggctcctccctcgcagaatccgggctgaatctggcaccaggggactctttgcaggcttcctccccaaggatcatcaaggctgcaccctcctgtgccatcaatgatcagcacttacgagtttggcaaaagcnttcttccagaggctcaaccaggagcaacctctgggccgcttgaaagtcggggagcaaccggctcttgcacgggtgggatcaggagactgaagccaagtgccttccctcccagtccagtcaccccaggctgtcctcagacctggattcctgctgtttcccttcccaggattgcccctctcccgcnncccgaattcaagaccaaatctgatgatcgcccttttttgtatccccatgtttgttatagcttggcccgaggagcttgggccaggcagtatc

SEQ ID NO: 380819 - DNA, 494 bp, Homo Sapiens
cctgaaccttgccactttttgtaaaaagcgttgcttagactcattccctcaggtcttctgaaaatgagtattctatgtttatcggtgttgaaccccaggggcaggagccacggggcctacagatgcacccaagggcagcagccagtaggacgtgaggtcttgcctgcctgggaacatttgcagcctgcagcctcgagccttagcctacattctgggcctgacaggaaatgttctgtctttctttaccccacaccaggactcctggagtggtgggcaaatacctgtgagcttgttttttgggggaaaggcctatctttgaggccattcagatcttaaccatcactgtccgtccttcttgtttcttccggtgaaatctgtgctaccaagtgcctatgaattgactctactaaaatgaaatcttttaatttgtaaacattggaatcggaataaataaacttatataacttaaaagcataaaatccttaagtaattat

SEQ ID NO: 380820 - DNA, 475 bp, Homo Sapiens
accagtctgaccccattgccacggtgacctttggcttatttcttagcaatgattgtgggcttcctatgggcaggtactcagctcctactggatgcttgtgtggaagccaacgtgccaacattcatctacagcagctcagtgcttgtggctggaccaaattcctacaaggagatcatcctgaatgcccatgaggaggagcatcatgaaagcacatggtctaacccatacccatacagcaaaaagatggctgagaaggcagtgctggcagccaatgggagcatcctgaaaaatggtggcactttgcatacttgtgccttaagactctctttcatctatggggaagaatgccaagtcacttcaaccactgtgaaaacagcactgaagaacaacagcataattaagaaaaatgccacattctccatcgccaacccagtgtatgtgggcaatgcagcctgggctcacattctggcttgcc

SEQ ID NO: 380821 - DNA, 505 bp, Homo Sapiens
aggaaggaaagagctgctgtctgtctatccatctatccaatctacttgttggtccacatagtgtggacagagggatctgtgaggggcaggacttggatgagcatctaagtgggtgccccccttttccatggtgtcaagcagccatggggatgctcctggggtctggctggaccacctcaaaccaagttgggtggcttctgctcttttaggaccatcagacgtatgcacactacgcctaggctcacacccacaagcacaaatacacatggacatcagagaatgtatgtgttgagatagttggtctgaggtcacttggaaatggtggcccctaacctgtgcctgactctcactcaggccctggatcacctgggccagtccagacagctctgcctgggtctgcacaggaaatagacagggcttttcttcctggcagaggactggaataagctgggtggcaagctgaaaccactgggtcctccaagctttctcaacttcctttcttaag

SEQ ID NO: 380822 - DNA, 269 bp, Homo Sapiens
  misc_feature (157)..(157): n is a, c, g, or t
  misc_feature (190)..(190): n is a, c, g, or t
  misc_feature (210)..(210): n is a, c, g, or t
aacacagagctgacagaagattgtgagatcaagcaccttggacaaagtctcgactgcaatgctaacgtgtacatgagaccttgggagaacaaagtcatcccgactgtgaaatgccaagcattagataagactattcctatccgaagaggcctccagnttttctcctttccggtcagccaaagtacaaganacaaaagcaggaacaactangctcctacgcgcgtgcacgtacaagggcagactctcaaaggcaggggcacagcacgcgc

SEQ ID NO: 380823 - DNA, 173 bp, Homo Sapiens
ttcctgtgggaagtactcgccactttccatgtggcatctcttgtatgcaaactagattgtgcgctcctagagggcagagtccactctgatcacggttgtggtgtcttccttacccttctggcgcctaatacagtccttgcacacagacacaataaatggcagttgaataacaa

SEQ ID NO: 380824 - DNA, 409 bp, Homo Sapiens
  misc_feature (88)..(88): n is a, c, g, or t
  misc_feature (360)..(360): n is a, c, g, or t
tcggctgcatgcactgagctatggcgttcgtgaccaggcaattcttgcgctccatgtcctcctcttcctctgcgtcggcggccgcaangaagatcctgatcaagcatgtgaccgtcatcggcggcgggctgatgggcgccggcatcgcgcaggtagctgcagcaactggccatacagtagtattggtggaccaaacggaagacatccctggcaaaatccaagaagggaattgaggagagtctaaagaggatggcaaagaaagaagttcacagaaaaccctaaggctgggagatgagtttgtggagaagaccctgagctgcctttcaaccagcaccgatgcggcatccgtggtgcacagcnagacctggtggtggaggccattgtggagaacctgaagctgaagaacgag

SEQ ID NO: 380825 - DNA, 530 bp, Homo Sapiens
  misc_feature (26)..(26): n is a, c, g, or t
attgtattcaccttctcctacaaganggctcagcgagatctgggctatgagcccacttgtcagctgggaggaagccaagcagaaaacctcagagtggatcggaacactagtgatgcagcacagggagattggaaacaaaaagtcacagtgatatgaagagggagaggacatggccctgggtgttattaggtcctccagaaagggacttagaaacaatccaactcttaacaattccattttacactctgtccaacttgtctttgggtcaccagaagccttgcaagtcactggcccagttgcaacccttcagctctaagcacttgtccagcaatgcacaagatgtgcctcagctgctgtgacccaaggataggtggctgatagtgagttgcctggaacctcttgtaggttagaatttcatcagggcttcctcatctcctttccatgtgccaacgcatttcgtgtctgagaaaattcccatacctttatgaagctcaaagaaaagaacaataaaatcttttaatgcttaaaaa

SEQ ID NO: 380826 - DNA, 746 bp, Homo Sapiens
  misc_feature (19)..(19): n is a, c, g, or t
  misc_feature (25)..(25): n is a, c, g, or t
  misc_feature (42)..(42): n is a, c, g, or t
  misc_feature (72)..(72): n is a, c, g, or t
  misc_feature (80)..(80): n is a, c, g, or t
  misc_feature (97)..(97): n is a, c, g, or t
  misc_feature (139)..(139): n is a, c, g, or t
  misc_feature (186)..(186): n is a, c, g, or t
ttaatggacccccaaaatnaatccncccccccaattccggancatgaatggcttggcaatggttttggtggnccagtccngatttaaggtaaaaccngactggtcataaaagtgggtacgggtctttattaaagcaacnagttccccagttgtataccatgctacccacggctctcccctttctcnaagataaggattgggacttaattagcaatgttttactttccataaatagggcatgtcacctcaaacctactaaatggttttatacttagatttatataactgggcatatgaatatgcttaaacactgggaaaattctatcactgtctcagaaacaagaagactcaaatgtgtttcagtttgtgttcactggcctctttcaggtcatggctaaccaccaggaggcaactgtctattcttgacagtgcagttttaattagaattccctacatcaaggatgttgccttttactattgaaaggcatttactgtggtttatgtatgatatcaaataaagagtatttaacacttctttatagttgatctgcaaattaaaatgcttttagaaacaagcaagttaggccttttaaattctctattttctaagactaagttgtaaatcagaattgtccttaaatacccactcagaaacacacataactggaattcgattaggaatggcactctttgctaacttactagatggaaagatggaaataaaggaaatagtttgtatcagcaga

SEQ ID NO: 380827 - DNA, 309 bp, Homo Sapiens
aagagcgagatgggggtgaagctggaggtgtttcggatgtccctctacctcactttccccgtggttatgttctggatctccaatcaggctgagtggtttgaggactatgttgtccagcgtaagagggagctgtggccaagagagaaggagggtcagcgccagggagctagaagaatttaagcagaagatccggaagcagaaagaagagagacttcttcaaagctgcccagaaaagctcctgagaccttcagtttcctcaagtcccaagctcccttccccaacacagaaaataacacacactcaactctt

SEQ ID NO: 380828 - DNA, 454 bp, Homo Sapiens
tgaggttagctcattatgtaaatagcctacttactatctaaagtgatcgagcaatcatatgttgagtgttcgagaccaacaggctgtgaacaatgaggagacacaaaagggcacttccttgcctcctttcctcggtaagatgtgttactgaacaaatgaggctaacttggtggaaaacggtctcaatgttatcagaatacagccaagttcatgtgaacctgaagactatataatccagccatacctatcgtcttctttaacaaaaccttaagctggtgtggctgtgcacaccttcaatcccagcattggacggcagaggcaggcacatcatctctgggcatctactgattgagttccaggatagccacagctacaaagtggagacactggtctccaaaacaaaacacacaacttaaaaaagcctacctatccaggaagtaaggggtgactcccg

SEQ ID NO: 380829 - DNA, 500 bp, Homo Sapiens
agatgataggtatctgaaattccgaatttctcatgaattagagagttcatcttctgaggtcaactaaagaagaggcaaaaacacagttccttactttgcatttagtaaaaacaagaaaaagtgttagtgagggttaagcaggaatactaactgctcatttctcagttcagtggatatatgtatgtagagaaagagaggtaatattttgggctcttagcttagtctgttgtttcatgcaaacaccgttgtaaccaaaagcttctgcactttgcttctgttcttcctgtacaagaaatgcaaacggccactgcattttaatgattgttattcttttatgaataaaatgtatgtagaaacaagcaaatttacttgaaacaagcagaattaaaagagaaactgtaacagtctatatcactatacccttttagttttataattagcatatattttgttgtgattattttttttgttgggtgtgaataaatcttgtaacgaatgta

SEQ ID NO: 380830 - DNA, 494 bp, Homo Sapiens
  misc_feature (15)..(15): n is a, c, g, or t
cccagatggagaaangataggctaaagctaccagagggtgcatttggatgaagaaataaccatctaatgttctaccagggaaactagagttaacaattaattgactatatcaaaaagccatgttctagcaagaaaggaaatagttagatctgatgtgacataccagttaccttcatttgatcagtagtgcattatacataattgaaatgtcatactgtgccataattatgtgtaattactatgtatcaattaaaatatcaatatatgttcaaaaagaaatggggacagggttatcctgattttattcattccctcctgcaagaaatatttttaaaacatcaatatatgtagtcaaattctgaagcatagtacagcatgtgaattattcaagtttctgtcacaagcatgttacagaaatattatgatctattgcctaatgtccattgttaacagaagctgacctcaataaaaaaacaagaggaagattttgaaaa

SEQ ID NO: 380831 - DNA, 564 bp, Homo Sapiens
  misc_feature (123)..(131): n is a, c, g, or t
aaacatggtgcaccgagtgatttccatctctggtaaagttacacttttatttcctgtatgttgtacaatcaaaacacactactacctcttaagtccccagtatacctccatttttcatactgnnnnnnnnngcttgtggcccaatggaacagtaagaacatcataaaattcttatatatatagtttatttttgtgggagataaattttataggactgttctttgctgttgttggtcgcagctacataagactggacatttaacttttctaccatttctgcaagttaggtatgtttgcaggagaaaagtatcaagacgtttaactgcagttgactttctccctgttcctttgagtgtcttctaactttattctttgttctttatgtagaattgctgtctatgattgtactttgaatcgcttgcttgttgaaaatatttctctagtgtattatcactgtctgttctgcacaataaacataacagcctctgtgatccccatgtgttttgattcctgctctttgttacagttccattaaatgagtaataaagtttggtcaaaacagaa

SEQ ID NO: 380832 - DNA, 470 bp, Homo Sapiens
gcacatccctcatcacaggacctagtgaggagatccgggccttgaataaagccattgggggataatcccttcctgaatggccagtacttcattcagtgttccaagacgccaacgcttccccctgtctccttccaccttggtggagtctggtttaacctcacaggccaggactatgtcatcaagattcttcagagcgatgttggcctctgcctgttgggcttccaagccttggatatccccaagcctgcgggacccctctggatccttggggacgtctttttggggccctatgtggctgtctttgaccgtggggacaaaaacgtcggcccgcgcgtgggactggcgcgtgctcagtctcgttcaacagaccgggcagaaagaaggactacgcaggcgcagttcttcaaaagacgccctggttagggtacaagctcaccgggccacagcagctatgcttctttccaattaaa

SEQ ID NO: 380833 - DNA, 424 bp, Homo Sapiens
tccctcctcttcctgtgaggaacctggaattcaatctgtgaggttgttctggagatgtctctgtggagactgcattaaaacaccacttcgcaccattgaataaactcagcaaccaagccaatgcataaaagtaatctatgcttcaggtcacagaagcttcaaggggaaaaaaacagaatactctagggccattgttcacaaactcatctgaaaacatcctggaaaaattttcccaaacacatggaaagaaagagaggaaaaaagaagatatctgaataatgtggactagaataaagagctgccaggagctgtttatttaaaaacagtactttcttctctggctgagtccctggtattctctgctgcaatctgtagctgtagaattttgaagaatgcaattaaattcaaatggtttgatgagtaa

SEQ ID NO: 380834 - DNA, 522 bp, Homo Sapiens
gcacgagcggcacgagtcagcgtctcgggtctctcgcccgctggccgggccctccccgggttgaggcggcccatgtcgagtgggccccacggcgaggagggttcagctcggatgtggaaggccctcacctacttcgtggcgctgcccggggtgggagtgagcatgctcaacgtgttcctcaagtcgcggcacgaagagcacgagagacccccgttcgttgcctaccctcacctgcgcatcaggaccaagcccttcccctggggagacggtaaccataccctcttccacaaccctcatgtgaacccacttccgaccggctatgaagatgagtaaagagaacctggcctcccccaggcaacaaagggaccacagcactggttttggacccttactctgtgtggaccacgaaaaccctttggatgctaagctcgtgtctcctttcctcagatggcgaccattactctgatcttccatcccttctgcttgtaagaggagatgccttaaataaataacttaaactca

SEQ ID NO: 380835 - DNA, 433 bp, Homo Sapiens
  misc_feature (116)..(116): n is a, c, g, or t
  misc_feature (382)..(382): n is a, c, g, or t
tgctgctggggaatttggagcctgaggaggccaaactgatccgtgtccctcttcaacgaatccaccttggacacagaatcttaaacccactgaatggatgggaacagctggcagantttctaggacctccacctctggtgcaaacccctcctttgtgcctctctccaagttcatgaacacccagtattttggaactattggtttgggaacgcctcctcagaatttcaccgttgtctttgacacgggttcttccaacttgtgggttccgtccacgagatgtcatttcttcagtttggcatgctggtttcaccatccgctttaatcccaaggcctccagctccttcaggcccaatgggaccaagtttgccattcagtatggganccgggccggctgagcggaaatcctgagccaggacaatctgactaatcgggg

SEQ ID NO: 380836 - DNA, 418 bp, Homo Sapiens
  misc_feature (51)..(51): n is a, c, g, or t
  misc_feature (77)..(77): n is a, c, g, or t
  misc_feature (188)..(198): n is a, c, g, or t
  misc_feature (296)..(296): n is a, c, g, or t
  misc_feature (406)..(406): n is a, c, g, or t
cctggcttctagaatgctctgtccagggtctgcaacttcccctgggcctcntgaccttaggagtgatgtggctaacntgaggcctgagtgagtgtgtagattgtccttgggtgagtgagaaaaaacactttgcattgctttcaggttggtggaaaatgtcagtggtgtagtgttgaggacctcactannnnnnnnnnnaaatcatttatcctagagaaggactctgatccttgctttcctaagtaaattatgctggagtgcttccagtactaaggcctccttgattctttcccctntgaacactatgagcactgacaaatcatggtagaggtgcccaccaaccagtttgcacagtggaggccacctgacatgcattagcctggacttctctgagagctgggcacanttgcaggacccc

SEQ ID NO: 380837 - DNA, 440 bp, Homo Sapiens
  misc_feature (192)..(209): n is a, c, g, or t
atttccttaggatgaatggtccctacacaaagaggccttgtgggcaaacctggagaaccctcctaaatccatagagttttcaaaatgtgaatctttggaagccttgagttcagaatctgctgctctggaatatttcccttcgatcttatctcagtcacttcgtttttgagaagagtgatgccttgggatgcnnnnnnnnnnnnnnnnnnagaaaacagggagttgaagtccaacctatttaaaaaccccaccatttggagaattacaagggttttgtcctgaattgtagtgttggcaagcccaagccactcgtgctaactgctttttgtctcggttgctattccaagaacagaaggaggaagttggccaattacagcgtgtgtgcatggatgtgtgtggggggcgtgcctctcagaaacgcggccagaagacaagccggg

SEQ ID NO: 380838 - DNA, 453 bp, Homo Sapiens
  misc_feature (129)..(129): n is a, c, g, or t
  misc_feature (269)..(269): n is a, c, g, or t
  misc_feature (299)..(299): n is a, c, g, or t
tagtgccagtgaacatacataaaaatatacatattactgattttctgttttccaaagatatatgacagaatccttcaaaaaaatccctttcttgagagtaaggtaatttaaaaaaataatgaactttcncaagaacaataatagtgcctgtggcataagaaaatctatggaacaaagaagccaactcccgtgtcagctcagagtccacacacagtgagctgcctgcggatgagagttgaaagcactacacgactcttcttgaatcccangagttcgtgactttggcagctggctgctgntccgtgccaagttgggccttctccatggttctcctctttttcttgtcctcattttccattcctaccaagcacttgtaaacctctttggagatgatcaccttggacttctctgggaagtgatcctcaacttccactcgtggccgaatcctggcag

SEQ ID NO: 380839 - DNA, 421 bp, Homo Sapiens
ttcagaggccccagtctgtagtcccggaagaatgaagatttaaatacgaggccatggctaaacatctgaagttcattgccaggacagtgatggttcaggaggggaacgtggaaggtgcctaccggaccctgaacagaatcctcaccacggatgggcttaccgaagtcataagtcgacgacgctactatgagaagccttgccgccgccgccagcggaagagctatgaaacatgccggagatctacaacatggaaatggctcgaaagattaacttcttgatgcgaaagaaccgtgcagacccgtggctgggctgctgaggcttggggctaggcacccacacacccatgtccaactcctttctttatccagccaagttctgttacttttctctataataaaaactccatcacaggtgaacaaga

SEQ ID NO: 380840 - DNA, 493 bp, Homo Sapiens
cattttattggacagtggttaaaaactaaggcacggggtgtgatggtgtcaggcttggttctgtggcttcatgctgctcaaaggtaggcacagaccactcccacgagcacctgctgcactccttaggctggagaattaaatactctaacatcagctcagcaacctaacaggtacaatttatacaggcgacatattaatacgaagttcatcagggcctgtaaggagggttccctttcaatagacaggagaaagataactctcaatgcctgctataatacttaagaaatgtttgacaaggctttaagttccatcaaatgcctagcaaagcagaaaaatggtaagactccagattgtggtaaaggttattcccttactttgtggaaatctgaagagaggaaaatattaatccctggacagactgacaggtgaaaaggttaccgagatgctaggtgaggtcttaggcatgagggagcctacagtaagaccacctcat

SEQ ID NO: 380841 - DNA, 737 bp, Homo Sapiens
cttgatacagaatattgttctccacacacaagtctcatcagtacatgcctgtactctctcacagctcatgatactacagcttctacaccaatggggagaagagggtttcctggctcatattgacagaactattgatttctacaagaaccagagggattccatattggcagctgcagacaagtggttacgtggcttggcagagtggcatgttcccaaagctggcatgtttctatggattaaagttaagggaatctcccgatacaaaacaacttgattgaaagaaaaaggctattgaaagagaggtcttacttgttcctggaaatggtttcttcattgatggttcagctcctacctccttcttcagagcatccttctctctggctactccagcacagatggatacagccttccagagattggcccaactgataaaagagtctttatgaagaaatcaaactcagcattggactcataatttttaaataaattacttcctgtactttgcagaagaaatggttgttgctgtttgacttgacaggatggatccaggttgtgaaacatctgtagcaatttccctgaaccactttaaagtccccttaaatccatcacattgccaaatagctttctgatctacttttgccctttgattaatttgcaactgacaaagcattaaattttattgtaaagagctctatagctgctttataatatccaataaatttttctcaaaactaaaa

SEQ ID NO: 380842 - DNA, 679 bp, Homo Sapiens
  misc_feature (39)..(39): n is a, c, g, or t
attcttggacataagtcaacagatagagtgctgggagcncatattctaggaccaggtgctggagaaatggtgaacgaggcggccctggcattggaatatggtgcttcctgtgaagatatagctcgagtctgccatgcgcatccgaccttatcagaggcttttagagaagcaaacttggctgcagcttttggaaaaccaatcaacttttaattagaagattgtttttcttaaaatctggaagcttttgtcaacattacatttttgaaccaggataatcttccagttccaagaatttgcaggatgaaattatgaaacttctgggagatctttagtaggtttgaacagaatggaataaccatgtacctatatttcacgtatcttgttccagtgcattaatgcaaacagaaaactacatatagaagaatcctggaaagttttgacctgttttcatactgtctacgagattcaacttcactgaattagcactaatagattttacctctaatttagtggaggtgaatctgttgacaggaaggagctggaaaatatgtgtgaacaacttgaagaagactggcaaacttactttaaatttggttttcatattggaaacgagtcaatgactagaacaagattcaaatatgtacaaacaacttatgtaaataaaaatgattttctctca

SEQ ID NO: 380843 - DNA, 467 bp, Homo Sapiens
aggatcatttcctaggactggaactgccttggaaactcatcaccaaacacaagaacttagccttttctaagacggtggtattgacatgccacatggtttccaaattggtcaagtcattcagaactgttctgagatgggcactggaccacgaacattactaaggtgtgcttataccagaggtttcctttaaaactctgctacataaacaaggatctgccatttgctgcttcataagaggcgggctgaccttctttagatcttggtttctatgtccctgcccactagtcaggcttcctggtgacagtgacagattcagggaacacgtgcccctgtgggagctactcgaccagttggctggtgactgcatgttagtttgttaccaaggtctaaaattggtcatattttcctgggttttgataagcagctaacctaagctagggtttgtgaagtggaaaatccctttaagg

SEQ ID NO: 380844 - DNA, 510 bp, Homo Sapiens
ccgtttaattgaaaaacctggagaatccactccatgaaaagaccaaacgccccccacccctacattacttcatagccacttcgaatactcttcaccagacaagcaggagaagataattcccaagacctccacaaaagcaaatgcccagggccgctgcagccaccagcagtatgttcttccttagccatattgctatagtctccacgcagccctgggtatggatagtggattccttgaaatcattcccacagcccacagttatgttgatgcagcaagaatcggggactctgtccttggccatgccgggggatgttttcccagtctgtgtagttagaagctccacagcagttattttctttctgcaatttgtccaaaatagtggctggttttggttgtctttaagggaattctgcatctgctgctggaagcttttattaaactctgacttcacctggtctctaaacacatagccagcaatgccacagccacctccacaagcatgataagaga

SEQ ID NO: 380845 - DNA, 505 bp, Homo Sapiens
tttaatttctaatcctaaagtaaagagatgcaattgggggccttccatgtagaaagtggggtcaggaggcccaagaaaggggaatatgaatgtatatcccaagtcactccaggaacttttaatgcaggtgctagaaactttatgtcaaagtggccaccaagattgtttaatagggagacgaacgaatgtaactccatgtttactgctaaaaaccaaagctttgtgtaaaatcttgaatttatggggcgggagggtaggaaagcctgtacctgtctgtttttttcctgatccttttccctcattcctgaactgcaggagacgtgagcccctttgggctttggtgaccccatcactggggtgtgtttatttgatggttgattttgctgtactgggtacttcctttcccattttctaatcattttttaacacaagctgactcttcccttcccttctcctttccctgggaaaatacaatgaataaataaagacttattggtacgcaaaa

SEQ ID NO: 380846 - DNA, 483 bp, Homo Sapiens
  misc_feature (48)..(48): n is a, c, g, or t
  misc_feature (56)..(56): n is a, c, g, or t
  misc_feature (144)..(144): n is a, c, g, or t
  misc_feature (287)..(287): n is a, c, g, or t
gggggcccttccaatgtaggaaaagtggggtccaggaggcccaagaanggggaatntgaaatgtatatcccaagtcactcaggaacttttatgcagggtgctagaaaactttatgtcaaaagtggccacaaagattgtttaatnggagacgaacgaatgtaactccatgtttactgctagaaaccaaagctttgtgtaaaatcttgaatttatggggcggggagggtaggaaagcctgtacctgtctgtttttttcctgatccttttccctcattcctgaactgcanggagactcgagcccctttgggctttggtgaccccatcactggggtgtgtttatttgatggttgattttgctgtactgggtacttcctttcccattttctaatcatttttaaacacaagctgactcttcccttcccttctcctttccctgggaaaatacaatgaataaataaagacttattggtactcaaactgtca

SEQ ID NO: 380847 - DNA, 430 bp, Homo Sapiens
  misc_feature (11)..(11): n is a, c, g, or t
  misc_feature (101)..(109): n is a, c, g, or t
aaaacaccccntttttgcccatcatcatttaccccattgcttggggaccagctgcccagcaccctattccccaaaagtgggtatgaggatacaagatgtgnnnnnnnnncaatgcttactcctgagagatctccttccacagaatgtagtggcttggctccatgaatcttggtcttatacttaatcatttcactctggcatgggaattattatatatccttctttaaaaggaaaacaacttccctatccaggccactttcaaaagctggaaattctggggatggagactcaaagtatgcaggttgtagggtgattcccccctcctggttgcccccagaacccctcacttgcatttggacagagcatggttggagttcctttgactcaccctttccccccacctagagggaagaaagggtgatggtgtgaa

SEQ ID NO: 380848 - DNA, 391 bp, Homo Sapiens
  misc_feature (45)..(45): n is a, c, g, or t
ctagagaaggctcagtcccaaagggctctgcagccaggcactttngagggactacaagtacttctcccagttacctgcctgcccagccatttgcccccactgtaccttgttgtatactagccatgcacaaggtaccacactggatccagaggcacaggttaatgagacccttggaagggcacaagcatggtgagtttgggagactaaggccaacagaaaagaaacaggatccccacagatgaaacattgaaaggttatgtctgagtctgaagctgctatccagaagttgccctggggaacactcatgtcattgaggaaaagaacactacctagaagcatggcctgacctgcaagggtgatggggaggtgaatctagtctcactgtggccag

SEQ ID NO: 380849 - DNA, 558 bp, Homo Sapiens
  misc_feature (317)..(317): n is a, c, g, or t
  misc_feature (325)..(325): n is a, c, g, or t
  misc_feature (329)..(329): n is a, c, g, or t
  misc_feature (363)..(363): n is a, c, g, or t
  misc_feature (376)..(376): n is a, c, g, or t
  misc_feature (385)..(385): n is a, c, g, or t
  misc_feature (401)..(401): n is a, c, g, or t
  misc_feature (466)..(466): n is a, c, g, or t
  misc_feature (488)..(488): n is a, c, g, or t
  misc_feature (506)..(507): n is a, c, g, or t
  misc_feature (515)..(515): n is a, c, g, or t
  misc_feature (521)..(521): n is a, c, g, or t
  misc_feature (524)..(524): n is a, c, g, or t
  misc_feature (543)..(543): n is a, c, g, or t
gcttggggcgccttccttccccatggcgggacacctggcttcagatttcgccttctcgccccctccaggtggtggaggtgatgggccaggggggcggagccgggctgggttgatcctcggacctggctaagcttccaaggccctcctggagcgatggaatcgggccgggggttgggccaggctctgaggtgtgggggattccccattgccccccgccgtatgagttctgtggggggatggcgtactgtgggccccaggttggagtggggctagtgccaatggcggcttggagacctctcagcctgagggtgaagcanacctcggngtcnaaaagcaactccgaatggggcctccccggagccntgcaccgtcaacncctggtccngtgaaagctggagaangagaagcttggagcaaaacccggagaagttcccaggacatcaaagctctgcagaaagaactcgancaatttgccaagcttcctgaangcagaagaggataacctnngatatacnaaaggnccnatgttggggcttaacctgngggttctatttcgga

SEQ ID NO: 380850 - DNA, 923 bp, Homo Sapiens
  misc_feature (61)..(61): n is a, c, g, or t
  misc_feature (108)..(108): n is a, c, g, or t
  misc_feature (716)..(716): n is a, c, g, or t
  misc_feature (721)..(721): n is a, c, g, or t
gacacacaccacccaagcgttctatggcatttgtcccgtttcaacacagtaaggtaggttngcggtgatctcacagcgtgtaaagaaaccccctttttctcctttagnctaccatgacactaattaatcactactgttagcagggcaggacacaggctccaggcaccacaaaaccctcggcctgtgtgtctccctggaacccggaaaattttgaaagggttaaggatctcaccttacttcatatatccatccctcgacagcacaggattaagtacaggggtattggtctttaaacttatccttagcaactctagttttacaaacacacacacaccctgtggcacatggtaggcctaacctaatctggtgaagaacagatctggagatgtaaagcacgtcctgtgccataggattagacaaccctcacctaatcttggcttgctctctggccttttcaccgggcccagcctctcctagcctctgtgtaccaccatttcctgtttagactaattcccaatcttccagtagaaggcaatcaagtcatggggccacccagttaaaacctagtctcccataaaacattttcaaggcagagggggtttcaagaggacactatggcagaaaagccagctcttattggcaaaaatgaggtagttcaataggctgtgcactccaaatagttgctctccacggtggcaaaaacaacaaaaagtaantatcngtgcgcagacctggagctgctgctggctatccctgagattgctcatgtacctgagaacacagtgcaggaaatgagggccttagattaaaatatacaaaaatacaaaaccagaatatttatattaaggaaaaaaagttaaaatgcacaagatacgtcattcgcacacagctagtgcagttggcatcctggagaaagtgggacc

SEQ ID NO: 380851 - DNA, 699 bp, Homo Sapiens
actctaagtcccaagtctggaaacttcttacacccttaggtaatctgtaaagccaagttctcgaagtgggagtcatgatgacagctaatggcccctctccttcctctaatgacctctgatccatgatgtgtctaaacatgggcaacagaaaagcaatggtctttccacttcctgttttggcaatgccaatcaaatctcgtccagacattatagcaggaatagcttgggtttggatgggcgtgggcttttcatagccatgcttcttgagggaatttaagatcttcatggaaattccacactggacccaggatttaattggtttggggcaaccttttcctttaactgtaatgccctccatttccaatcgaaacacatttacctcttcttgagacatttttgctagttctggaacttcaacatagaagtttttcctaaatggctcatactcaatttttccatgatcaactggttctagaagctttcgctgttttgtttgataccctgtaagggctgtctgaagatcaacttcttcctcctctgaagaatactccatggcatcctggtcattctccatcagctcacctttcttcctatcagaatccacaactgcttttttggttgtcacaacagtgacaacttttgtgaccgttggcccagacttcttttcatttcccccaccacttttacactctcatgtta

SEQ ID NO: 380852 - DNA, 397 bp, Homo Sapiens
  misc_feature (56)..(56): n is a, c, g, or t
gcactggaggctctgttgagcaagggcgcggagcgtatccagacctgcgtgcagcncgaggagctgtggcccttcctcagtgcggatgaggtccagggcttggcagcggcactaaacgactggacagtggccaagcaggagcccagcgggaatggcagagggagccaccaccgccgatgtggacgcgggcagcctgagctactggcctgggcagtcggagcagccggcgcccgtccatgcggcatgggctggccagtggactctgcgtggaaaggcatcaccccgggcgcactcgttacacccaagcctcctggagagggtcagccgcccctcaaggagctggtgcggctggagatccaggctgcccacaaggtgggttgtcgcgggggccctgtgt

SEQ ID NO: 380853 - DNA, 591 bp, Homo Sapiens
  misc_feature (377)..(377): n is a, c, g, or t
  misc_feature (453)..(453): n is a, c, g, or t
  misc_feature (480)..(480): n is a, c, g, or t
  misc_feature (539)..(539): n is a, c, g, or t
  misc_feature (550)..(550): n is a, c, g, or t
  misc_feature (563)..(563): n is a, c, g, or t
  misc_feature (574)..(574): n is a, c, g, or t
gaaaccacagtctgatgcccatatattcctatatacaaaattgtacattatacttaatatacagaagtgtatattaaacctaaatgttctaatactatttttacatctacaacataaaaaagaataatgtaggctcaaatatcagataaatctaggttgagattgtggcctcatcatttacttaaagtgtgttcttgggcatattagtaggcattctaagtttcagttccctcattctcttgattatataataattactacatggaattgctatgggagattaatacaaataaagctcatagtactgtggctgtctaactttttagctgtcattattctaacagttattactatcccattctcaactgtttttaaantagtatcctgctgttttttaactttatggtccttttactgttcactctatgagccacagagtctggaatccacctnggttctctcagaactattgatttcctngtcttgttggaacaattttctgctttagaaaatctgcatcagtctctccttacagattnccccttatggnaagaccttaaccntggaattattncaattaaggataaaggg

SEQ ID NO: 380854 - DNA, 322 bp, Homo Sapiens
ctaggaagagtccacagcttccttcagattctcaaaagaaccactaaccccaaaagacgcacgataacacagtagtgggttttcaggctgagctctgaaaggaccacctgtagaaaggtgggaagtgtgggctaataagtgttctttgccctaactctccaattcaactgcaacagctctgcctttaattttactacatatacgggtttcaattagcttttatgcgaagaaagctaaaagtatgaaaatcactaaaattatgcctccaatctacaaatagtaacttttgataaaaacaatcccttatcagtggagcttaaga

SEQ ID NO: 380855 - DNA, 411 bp, Homo Sapiens
  misc_feature (163)..(164): n is a, c, g, or t
  misc_feature (382)..(382): n is a, c, g, or t
  misc_feature (390)..(390): n is a, c, g, or t
taagactttggcaaatgacaaacattcccataaacctcaccccagtagagacatctcagccctctgataaaacagtactggatacaagttatgctttgataggtgaaacagtaaataattattagatctacaaaatatgaaatgtattccaagaatgcagaannaaccatctagaagcaaaaggactataaaacaaaaacacgagaagaaaattcatggctaaaccagctgaagaacagcttgatgtgggacagtctaaagatgaaaacatacataccatcacatattacccaagacgaaatttccaaagaaatttcagacagaaattatgggaagagcatggaagagattggggaaatggattggtggttttcccaaaaanccggatgnccacctgtggggaaagccagg

SEQ ID NO: 380856 - DNA, 484 bp, Homo Sapiens
  misc_feature (14)..(14): n is a, c, g, or t
  misc_feature (212)..(212): n is a, c, g, or t
  misc_feature (226)..(226): n is a, c, g, or t
  misc_feature (251)..(251): n is a, c, g, or t
  misc_feature (310)..(310): n is a, c, g, or t
  misc_feature (378)..(378): n is a, c, g, or t
  misc_feature (403)..(404): n is a, c, g, or t
  misc_feature (406)..(406): n is a, c, g, or t
  misc_feature (415)..(415): n is a, c, g, or t
tcgctagtccactntgactcaaagagcagagttggttgccgtcattacagtgttaacaagattttaatcagtctattaacattgtatcagattctgcatatgtagtacaggctacaaaggatattgagagagccctaatcaaatacattatggatgatcagttaaacccgctgtttaatttgttacaacaaaatgtaagaaaaggaaatttncccatttttatatnaccccatattccgagcacacactanttttacccagggcctttaactaaagcaaaatgacccaagctgacctttgctagtatcanctgcattcatgggaacgcacaagaacttcatgccttgactcatggtaaatgcaataggattaaaaaantaaatttgggtatcccatggaaacnngncaaaaattntggtacaaccatggcaccccagtggtcagattctacacctgggccactcaggaggcaagagttaatccc

SEQ ID NO: 380857 - DNA, 237 bp, Homo Sapiens
gcccgtttaatgaagatactaaaaataatgcactggaaggagtggaagagttggaaaatttgtaaccatcataatacaggtgtaataggtttgggaaagaatcctcaaaaatgttaaagcaagggaggaaagtttgttgagaagcaagatgttcttctctcctgcccgcccccgccgttggttgttggtggtcagaattattgtgtaataaataatagacattttttcttaaaaaaa

SEQ ID NO: 380858 - DNA, 252 bp, Homo Sapiens
cctgagactaaattcagtacagtatttgtttttataacatccaacatgtcttatgttaaacttaaccactttctatgcagtgactgtggtgagatgatctattttatttgactaccctcaatgtaattcatttgggtagttctaaggcatatcagtgatcaaaatgtttctccctacagttactcttgcattctcaatcagtttcttctgcacatcatctaaagaaaatttatgtggtatgattacactctt

SEQ ID NO: 380859 - DNA, 365 bp, Homo Sapiens
atatttataaatttggaatcttaatgcctaggtatatggagggaaatgcatctgattctcctaaattaatgataaaagtgtcagtgtaaaaaccatgcaagttactgaatataaaacctattcagatcatttgtgtatattctttaaattttaattatattatcaattgttaaatgtttccaattttaaagttatttaaattgaatcacaaaacattccctttatctggatcttttagacttgatgcacagtaactgaaataatgacctacctgttttaatacccttagtttgctgccttttatgagggtgtcacgaagttctaaaatgtatttttttaaagggttaaatctctaacctaggttt

SEQ ID NO: 380860 - DNA, 585 bp, Homo Sapiens
  misc_feature (11)..(11): n is a, c, g, or t
  misc_feature (31)..(31): n is a, c, g, or t
  misc_feature (43)..(43): n is a, c, g, or t
tttccaccttnggtttgggaagtcctggccnggcattcaggcnggggtggaaacaaggggattccaattattaggggaggaggtcaaacctattactgtttaccggacaaccatgatcctatatctataaaactccataatctcagcccaaaagctgctgaagctgataagcaacttcaggcaaaatatcaggatacaaaatcaatatgcaaaaatcactaacatttctatacaccaaaagtagtccaagtcaagagccaaatcaggaatgcaataccattcacaattaccacaaaagaataaaatacctaggaatacaattaaccagggaggtgaaagatccctacaatgagaactacaaagcactgccaaagaaatcagagatgatacaagcaaatggaaaatcattccgtgtttatggataaaaagaaccaatatcataaaatggccatactgcctaaagcaatctataaattaaatgctatttctaataactatcactgaaactcttcacagaactagataaaactattttgaaattcatatagaatcggaaaagagtccaaatagccaaagcaatcctaa

SEQ ID NO: 380861 - DNA, 644 bp, Homo Sapiens
  misc_feature (21)..(21): n is a, c, g, or t
  misc_feature (51)..(51): n is a, c, g, or t
  misc_feature (74)..(74): n is a, c, g, or t
  misc_feature (79)..(79): n is a, c, g, or t
  misc_feature (100)..(100): n is a, c, g, or t
  misc_feature (108)..(108): n is a, c, g, or t
  misc_feature (136)..(136): n is a, c, g, or t
  misc_feature (141)..(141): n is a, c, g, or t
  misc_feature (399)..(399): n is a, c, g, or t
  misc_feature (533)..(549): n is a, c, g, or t
ttatttaggccctccattccnggggaaaggaggccaccttggaggtacccncatcttggaattaggataaaagnggccncataccatatcggatctaggngattaatncccattaggaggtaccaccagttttagntgttnggagatagttttggttgtaccagaacaaaataatatgtagcagcttcattgctattggaaaaaccagttattggaattcccaccttaaatggctataccaacaatataactggtagttctataataaaaatgagcatatgttctgttgtgaagagctaaatgcaataaagtttctgtatggttgtttgattctatcaacaattgaaagtgttgtatatgacccacatttacctagtttgtgtcaaattatagttacangtgagttgtttgcttaaattatagattcctttaaggacatgccttgttcataaaatcactggattatattgcagcatattttacatttgaatacaaggataatgggttttatcaaaacaaaatgatgtacagannnnnnnnnnnnnnnnnatagttgctttatgccagagtggtttaccccattcacaaaatttcttatgcatacattgctattgaaaataaaatttaaatattttttcatcctg

SEQ ID NO: 380862 - DNA, 145 bp, Homo Sapiens
  misc_feature (122)..(122): n is a, c, g, or t
atttatccctgatcctaatgctgaaaaaccatgatgacttgaatcatcaagccagccagcaggtttaacaacacgtgaacctgcccaaatagaagattcaagtgttgttaaacctgctggcntggcttgatgatgaaccaaaatt

SEQ ID NO: 380863 - DNA, 594 bp, Homo Sapiens
tgaagttaatttcccattgctactaaactgctttggacaacctggtacaaagtggataccattctcctacacatacaggcggccccttcgaactcactatggatacataaatgtgaagacacaagagcctttgcaactggactgtgacctttgtgccatagtgtcaaactcaggtcagatggttggccagaaggtgggaaatgagatagatcgatcctcctgcatttggagaatgaacaatgcccccaccaaaggttatgaagaagatgtcggccgcatgaccatgattcgagttgtgtcccataccagcgttcctcttttgctaaaaaaccctgattattttttcaaggaagcgaatactactatttatgttatttggggacctttccgcaatatgaggaaagatggcaatggcatcgtttacaacatgttgaaaaagacagttggtatctatccgaatgcccaaatatacgtgaccacagagaagcgcatgagttactggtgatggagtttttaagaaggaaactgggaagaacagaggtccagtctggctcatatctcaccacaggggtggtttaccttccttctggccat

SEQ ID NO: 380864 - DNA, 337 bp, Homo Sapiens
  misc_feature (140)..(140): n is a, c, g, or t
tgttctccagggctgataggttaagcaccctcaccacagacaattaactctcccaaaaggtggggtttccgggtgggggcaatgcttggggaagagagctcaagccctgggcctcataactgggggagagggacacacangaagggggatggcagtgggtggccttgccctgccacgccagccaggccactgttcatgaaggtccaacgctctgaacctctctttttccttagaaggggggtctggggtgaggggctgccaagggactctggctgtggggtcatcctggtgggaaacttcatgtgagagaatgtgggggttccctgagacgcccttt

SEQ ID NO: 380865 - DNA, 377 bp, Homo Sapiens
gaggacacaggcttctggggtgagttctgggaaaaccaactgctgttccagtgaggctcaaggcaccctgccaagccaggtctgcctggtagtgagggcagaggtccctccaagtctctcctctctagaacggcagcagcacctgctaaatgtaattcaactcagcccatttccactgagcttggattcatattcaagagcttcctgcttttcctaaacaaattccttagcttctataccagactagcccatttcttagaaatgggatcatcttgatttgcacagcaacctcaataagacctcaatagtccagcctcctcttcccaagtttcaggctttatttacacgacttgggtgaggtatataggatgggcgtg

SEQ ID NO: 380866 - DNA, 593 bp, Homo Sapiens
  misc_feature (28)..(28): n is a, c, g, or t
  misc_feature (57)..(57): n is a, c, g, or t
ggtttccacttttccaattggaccatgngcgtgatggtatgtcagactgcttcaaancggtgctctaacttcactgatagttatcaggccttagaaaaatccttattactaaaatattgagctcaagtagattaaaacatttgccagggtcatacagctaaatcagtgaagggtcagaattggaactcaggtctgtaaaatgcctaaaattaagctatttaaccacattatatttagcaggtatctcttttttatggtacatatttattttcaatctgtattgggcccacagtaagcactaaataaatcctcactaatttaacaatgtcactttttaaaaagtaaatataatcgtttcctttattaacaagagtcaggttctaatttagctacattgtacatctactgatagccttccagttaagattaactacttatcataataaagtccaacttacatcaaaattttccaaatattatttgctcaataaaaatatattttaaacaaaatatcaactcttagtatctacagtacttcagtaaaaaaactcaaaggctatatatactttttcagaaaaatattttaagtcgta

SEQ ID NO: 380867 - DNA, 429 bp, Homo Sapiens
  misc_feature (358)..(358): n is a, c, g, or t
aaaatgtattcatttgccagactgatttattctgtgtaatagacacttgttgtccccccatcctttctttttagattgtctgaacgggcacaaagcaaattagtgcaaaatgctttcagccaagtgtcaggtggaatcatggtgaagaatgctccactcttgggctttctaactctcttggtgtcggtcctgacagctttgtctccctcaattatagcttccgtgatgtgttctctgtgtggagccccaaaaccaatactgtaacttcgggaggttctgtttcaacaaagacatcttgagctcactgaggtttaattggctcaaggtttttcaggctgtaccagaagcatagcgccanatcctgcttctgggggaggacttggggaagccttttactccatggtggaaggccaagctggggcaggcata

SEQ ID NO: 380868 - DNA, 624 bp, Homo Sapiens
  misc_feature (227)..(228): n is a, c, g, or t
attcagaggtccttcagtcagagcagcaagtgatacttagcagctcttccatggtcagccatgatggcagtgagggaggccaggactggttcttttgctggcttgctctcctcaacctgccttccctgggtttccatctcagtatcctgtaaatgcatccaccctggtaaaccctgctctattttgggtctggaaggcatggaccacataatgctgcccacatgtgnngaacatagccttctcggagcttgattcgatgaagtctcagctccagaaggttcccgctgtcctggtggaagtcacacatgctgtcccatgatgaccagtaaccctgtcctgcatggtaaggtgggaagaacaccttctcttggagccttgaacagaaacaccgcacgcagcaggctggagctggatggccctcccagcagactccagtcccatttcctggccagaaggaaatgtgcacagagaagccacctttatgtaggagtttagaatctgaccagccaacttctctctcacagatgggcgtacggctgtgctgtgtggttttcccttggggaggcgggagcaagaaaaagtatttgtagcttgttttataaaaaataaaaatgggtaaacttg

SEQ ID NO: 380869 - DNA, 479 bp, Homo Sapiens
  misc_feature (14)..(14): n is a, c, g, or t
  misc_feature (230)..(230): n is a, c, g, or t
  misc_feature (464)..(464): n is a, c, g, or t
tatgttctatcaangggagcagtgtttgctatcatagcaggatttgttcactgattcccattattttcaggcttcaccctagatgacacatgagcaaaagcccacttcgccatcatattcgtaggagtaaacataacattcttccctcaacatttcctgggcctttcaggaataccacgacgctactcagactacccagatgcttacaccacatgaaacactgtctcttnctataggaccatttatttcactaacagctgttctcatcatgatctttataatttgagaggcctttgcttcaaaacgagaagtaatatcagtatcgtatgcttcaacaaatttagaatgacttcatggctgccctccaccatatcacacattcgaggaaccaacctatgtaaaagtaaaataagaaaggaaggaatcgaaccccctaaaattggtttcagcccatctcatatccnatatgtcttctcata

SEQ ID NO: 380870 - DNA, 523 bp, Homo Sapiens
  misc_feature (20)..(20): n is a, c, g, or t
  misc_feature (37)..(37): n is a, c, g, or t
  misc_feature (225)..(225): n is a, c, g, or t
  misc_feature (263)..(263): n is a, c, g, or t
ggcagactggagccttgttnccggtaccaaggctttngcaaagattgtggctatgaagataaaccttcccaaactttaaaattagcagtgtttcaaaaagatgccatgcacttttgtgggaattttaatttaatgagaaatgaaaggaaagcagtcatatcttttcatcattgcctaacccctttaaaagtatatattaaaattcatactatttcgatatttatnctatggccttctaaactttttattaaatccactccccntcccaaacccccaggagaaaccacagtgcagacagcaattacgagccttctggtttctttcacaaaatgggctttttaaaaactgcctttaaaacactctccatgtaaggagtcctggtccacgtcatttctgccttctccatagggtacatactcactaggacattagggattgaagacaatagaagtctactgttcctggatgtgttgtttctagtttcagctctaaaaagccaaattgtttctaattccatattaaa

SEQ ID NO: 380871 - DNA, 206 bp, Homo Sapiens
  misc_feature (166)..(167): n is a, c, g, or t
atgagccactgcgcccagcctcctgctcccttttctttgtccccacatgtgcaggtgtcatggcacagccaggtaagaagcctcatttgtataataaaaggttaggcttggagggccagtctttttgctatgtgaatgacacacctggtcaaatcaatcccgtttnncctgtttgggctctatgcaatcagacaccacctcctcaa

SEQ ID NO: 380872 - DNA, 420 bp, Homo Sapiens
  misc_feature (160)..(160): n is a, c, g, or t
gcatattttaaccatttccttccaataaaatttttttgtggaaatttgctttctctcaattatgtaaagtacgtatattacatcttcaattttgtcacagcacctaaaagatttactactttgactctttacagaataagtttgttggcctcaggtgtanggccccctaactggggcggaaggatagagaaaagtggattcaagagatattcagcaatagaatggatacaacttggtcattaattaaaagtgatgggtgagagagaacaagttcaggatgcttcttaggtttctgtcttaagcatcttgggtgaattaagacctttatgttgtcctggcaaaaactaggatgatgattttaattagctacattgatttatcagtagtaatgaagaattgtatctcttgtctttaaaaaaa

SEQ ID NO: 380873 - DNA, 403 bp, Homo Sapiens
  misc_feature (347)..(347): n is a, c, g, or t
  misc_feature (355)..(355): n is a, c, g, or t
  misc_feature (364)..(364): n is a, c, g, or t
gtgaccatctcatgtctttggaaactgagtcctctatttaaaatgcattcctacagagaggatttacatatttacatttttttctgccatgcatctaggaatactaccatctatgaatacttcagatttttggcttggaactgttgggcttacacagactgactaccagccccagacctacctaagtgcaagctgtgggtaggcactgaggggagagagactcctttccatcccactgaggggcaagactgagacagacaagctgagtgtgttttgttttatcacccctgaggctggtggccctcaagagatcctaagctcctgtgtcaagtctccccattaagtcntccctganccctggggnttgggcctttccaaaacccaaagggattcaaggcaggct

SEQ ID NO: 380874 - DNA, 295 bp, Homo Sapiens
taatttatagttcctaggacctttttaagagttttacagtaatcttcagcatttaccatgcaactttcttgtttgattatgcataggattgattagacaggtattttcaaaaagcctgcaagcatagtactcagactcattgaaagtttatagaatttggcctgtgtggaaaactctgtgctccaagtacaacaactaactgaattctctaatttaaacaactttgaagggaagtgaaaggttataaaatgatacagactcataccgcagaatcaccttaaaatgcagctgttgg

SEQ ID NO: 380875 - DNA, 365 bp, Homo Sapiens
  misc_feature (24)..(24): n is a, c, g, or t
  misc_feature (83)..(83): n is a, c, g, or t
atcatctcagtcctgagaatactnataatcactgagggcactggcaacacaccgtttctggacctgcaaaacaagaaacccantcccgctctgtgaggggttcaccaacttcactggtgggggccttgcctgacagctaactagtctctggaagagacaagcccgggaagctttttcagaggagatgtgtggactagctcttgaaggaataatgcgcattaatgcaatggaggaaaacaaagataaagaatagctcaggtaaaggcatggctcgttgaaaaaatattaagtaatggagtgtagctgaaacatcaaaaacatgctagttgggcagtgaaagaatgctggggagcagcaggggtcct

SEQ ID NO: 380876 - DNA, 393 bp, Homo Sapiens
  misc_feature (142)..(142): n is a, c, g, or t
ttttgtcccaccttttacctctgcccttctcactccagtggatgcttttcctctgagacagtacgtagtatcaaataaatagtcctttagctttctgctactagatctataaatctaccctgcatctataggtatctcttcntttatgaaaaattacttcttacatatgtactctagattattctgtctactttgagtcttcaacctcttcatctgtgaaaagcgttttcagttaaaatacataaaatgtcattgcagatcagcatttatagatgaacagttgctctcagttttaatgatagggaacactaactttgaaccccaattaaatgaactgttatctcccctccaaaataattcctattcttagtggtaaacttataaaagattata

SEQ ID NO: 380877 - DNA, 417 bp, Homo Sapiens
  misc_feature (203)..(203): n is a, c, g, or t
tcctgttgagaaacaaccaaagccgatctgagagtggtgaaactgttttaagagcatcagaaagtatgcacgtagacagcttttatgtattctaatgatgctgaaattatttcaaggataactccgtgtgtggaacaactggtgaggtttgggggtggcacctcctgatttgggaaagcaccaggtcccacagtcctgtggcntgtggaatacagaaacaaggcggtgtgtggatgaagagttagtcaacaaatgccattccgtaatgaaccgattttagaaaccacaagtgagtttcatgtttgctagtaaaggtgtgtctatggcagtattagtaacagctattattcctgatggaatgcttacaatattgcaggggactgtacccaagtgcctttgtaaatatcctcaccttag

SEQ ID NO: 380878 - DNA, 416 bp, Homo Sapiens
  misc_feature (400)..(400): n is a, c, g, or t
ctgttggaagtgaagtactcactactgtcatagatggcgtctgatacccacgggttccaggcgccttgtgaagctgccagtgctatccggaagaaaagctgtaaacatgagccgcaccacggctgaggtccatctccttggtctgctgcagagctgcttggcggattagctctttttcccgatctagggccatacagcacagtccattcatgcccagggaagtgtgaacatttaaaagaccatgcttttataaagcccaaataatgtaaacttacaataaaaacccatttttcctcttttgaaactcttcatattgctaataaagtgttaaaaacagtctcatttatgtcatccaatatgaaaggcatcaaagaagacctgcattttctccggattacangtaaaaactctcttcc

SEQ ID NO: 380879 - DNA, 110 bp, Homo Sapiens
tccatgaaaactgtactagttgttgattgctgcaggaaaaaaaattaccacaaacagcatttaaaaaatttaccacaaatacgcatttaaataacacaaattcattttct

SEQ ID NO: 380880 - DNA, 419 bp, Homo Sapiens
taaagatgacaacaataagccactggggactgctagaggagaaagaggggaaggagggcaagggctgaaaaactacctattagatactatgctcactatctggatgatgggatcatttgtaccccaaaccttagcatcatgcactatatctatgtcataaatctgcacatgtaccctcagtacctaaaataatagtttaaattatataaaaaataaaattaatgcatttgcaacaatcgttgtatctgctatactggaaattccaagatggttgaaaaatatgtatagacatcagagagaaaagcctgaaatcaagaatcctatacccacttctctaggtgtaagaaaattatttcaggaaatataaggattaaaagagtacacattccatctgagaaaaatacacagggaagaataat

SEQ ID NO: 380881 - DNA, 399 bp, Homo Sapiens
taagaactgcctgtggctgaagcagctggggtaaatgcaaaacccaattagtgggcaaaaagtcccagctctgataggaggcgggctggaggagctcccaggcggaaatacattgaaatctttacaggggagggagggagtcacctcagctccactatgaggccagcacaaaagtgacctaccttcctatcatgcccccatcccaggattttttatattcagatcagataggcacctcggtccatctgcaggaatactgatattcatgtaggatgggggagtggaactccacccctcttgcaagcctgaacctggagggcacacctcccttggggacgcagtcacccccaaatgttccagaaatggctgtgtacacggtgcactctcactgagttttca

SEQ ID NO: 380882 - DNA, 128 bp, Homo Sapiens
aagatgttacatggtgtttcgaagccagcaagttaccatctccggtgtctcttctctccacatctgtaacttctttttccaggttttattttcagttttaaattcctaataaattatttgaaaacgtt

SEQ ID NO: 380883 - DNA, 432 bp, Homo Sapiens
  misc_feature (17)..(17): n is a, c, g, or t
  misc_feature (42)..(42): n is a, c, g, or t
  misc_feature (62)..(62): n is a, c, g, or t
gctttacccaagttgtncttccctgggcaccttctgaacttncctttagaaggtctaattcngctgttttccctgttgtcacccgtaactgtcccttagattcaccttccctgtttctacatatccttacttaaattttttcttcacttgtttccattctatatttgtacttctgtatagttcttgtgaaaactgtcttgatccctaaaatacttgtgtaaatatctgtttaccaccatagaactgagaacccctagaaggtatttactggttttcttatttttatatttcctacatttcttagtatagtacattatatatcattggtgctctataaatagttgtctaattgattggaaaaatagaccttttggggagatgggaaagtggttctgcagtttttgtaaaaatgaaatgtttatcataaaattc

SEQ ID NO: 380884 - DNA, 418 bp, Homo Sapiens
ttcagtgcccctgtactgccctgacgtctcaggccaaagggagggagcaagtggggatctacagtggccactcagcaaaaacttactcccggggcggggaagcaaacagcccctgctgaccctttgcggatctcagtttgctccttttatggacctttactggagagagttccctccacagaatgtctgaagtcttgcattctttcccttccatcactgtattgattcttttttaaaaacagccaccacccctcaaactcccacctcacctcatctctgcagaatgttcacagcaaaacacctttgtctgtttttagattcttgaagaattagtctgttcaagacattgtgtttaaagctgggagcccactgggagttccacaagtgctgcatatattgggtagcaaaagaaaatggg

SEQ ID NO: 380885 - DNA, 435 bp, Homo Sapiens
cgttatccaaaagctgcggaactgggcgtctgggcaagacctgcaggcgaagacaacatgcactaccaggagatcgccaagcggacccagccacctccgaaactccccgtgggccccagtcacaagctgtccaacaattactactgtactcgtgatggccgccgggaagttgtgcctccctcaatcatcatgtcctcacaaaaaggccctggtgtcaggcaaggccgcccgagagttctgcaatggcagccactgagaagaaggcagtgacacctgctcctcccatgaagaggtgggagctgtccaaggaccagccatacctgtgacccttgccctaggttaccttgctatatatgtcttctagggccacattgactgcttttcctccttggaactcctctggggagagtgtgacctaatttgtaacaaatatat

SEQ ID NO: 380886 - DNA, 501 bp, Homo Sapiens
  misc_feature (366)..(366): n is a, c, g, or t
ggccgagcaagcccagctaggtatggcgatggtgaagcggttctttgaatcttaccatgaggtccccgacggcaccccagtgtcatcgcaagacctacatcaccacggccttaggcggcatttgcggcataattcggctccgcttacagcgtctcactcaaccccgcagattccaccctggaagcagtggccagagtcggccggtacacattcactgcagctgctattggagcgatgtttggccttaccacctgtgtcagtgcccaggtccgagagaagccagatgaccccctgaactactttcattggtggctgcgcgggaggcctgacattgggagctcgcactcacagctatgggacatgcancatgggctgtgtctacatggcactgcggccgccctgttcaagatcggcaagctggaaggctgggagttgttccctacccccaaggtgtgagccaaacccctgtgacaaataaacgctgtatgttcctgtgaaaaa

SEQ ID NO: 380887 - DNA, 443 bp, Homo Sapiens
  misc_feature (11)..(11): n is a, c, g, or t
  misc_feature (21)..(21): n is a, c, g, or t
  misc_feature (33)..(33): n is a, c, g, or t
  misc_feature (44)..(44): n is a, c, g, or t
  misc_feature (50)..(50): n is a, c, g, or t
  misc_feature (67)..(67): n is a, c, g, or t
  misc_feature (83)..(83): n is a, c, g, or t
  misc_feature (131)..(131): n is a, c, g, or t
gccctttaccngctgtccctntcagcagcagtntgtcagcagtncaactntgatttggtgaaagccngttgaccgtctcctantccaactcccaatgttactgccagcccatgagaccgagcttgcacganggaccaggcatccatgtcacggtctttagttggcgatgttaaatggtgactgttttatttaaaactcgggtctgatcactggaaacggattgcttggtgatttgtgatttggggctcggttcattgctctagggatgtttgtgtattgtgtaggtgcgtgtactactgcgctgcccctgtggtatgtcaccggttctgtgtaaacgccctccatgtggccctctcatgttgcatgttttcagtggtttggaagttttgtatatttattgtattaatgcagagtgtcataaaataaaataatgtttactggaa

SEQ ID NO: 380888 - DNA, 582 bp, Homo Sapiens
  misc_feature (249)..(249): n is a, c, g, or t
gatgcgtgtgtgaccccagtgctgacgtttgaggaggccctccaccaccagcacaacagagaacgggcctccttcatcactgatggggagcagctcccgagcccccgccctgcacctctgctttccagaactcctgccgtcccatctgccaaaagggacccttctgtaggggagcacaccgtagaagtgcttagagagtatggattcagtcaggaagagatccttcagctgcactccagatagaatccnttgaaagtgataagcctaaaagccaatctctgactcagggcttatagctcaagagaatctgaaggctgcatctccactggggagggatgcccacaattgtgtgtatggaaatgtggatgaacagcaatgaagtcatccaaatatccccaatcacgatccaacggaaaggctggttacaggataacgattgcgcccttacgctgcttatcagagcctctgattgaggaaaatttgtgtgtgtgtactgatagtaacttgtggcagctttctgcctttcagttcccttggtgaagtgtatccatttattaaaacccttttataaatacaactctg

SEQ ID NO: 380889 - DNA, 283 bp, Homo Sapiens
tgtctctgcactaggtggcaccttgcaaaccagatggtgagagttagttagtttgacatagagtctggagggcagtaccagtagccaaggtgtttcttccagccttccttggtctttcttcttacccaccatggaggactttaacacaagtaccctttccaaccaaagagaagcaagctttagagtccaagcccgtgccactaacacttaaatgtgagtgcttagaactgtaatcctttgggtcagacttctccttgcctcaaataaaaacttgcttttgtga

SEQ ID NO: 380890 - DNA, 379 bp, Homo Sapiens
ggtgagagagaaggctttattaaaacaagtggcagatctggactgccactcttgtgcccttggtgcacgtcgagactgggcaaagatggggacatagggaggtacaggtggggtgaggagcaagcacgctaaaggggaaatcttgacaagtgggagaggaaggcactgctcacaggactgtgctcaactggtctcccagaagaagttgttacaagccactgtgagagcagccaccaggcacaacatactccttgaagtccacttccccatctccgttttcatccagttccttcattaccttgtccacagcatctgcatccttctggacggttgcctcggcctgacgtcggaacagattctcgacagaaggcacgctgca

SEQ ID NO: 380891 - DNA, 359 bp, Homo Sapiens
  misc_feature (38)..(38): n is a, c, g, or t
cacgagccgccttccgtgtctgcggccctcgcagaacnttccagcagcgacatgttggcccagagtatccggaggttcacgacctccgtggtccgtcgcagccactatgaggaggggtccggggaagaatttgccattttcagtggaaaacaaaaggcgggtgctggctatgatgaccgtgtactttggatctgggtttgccgcacctttctttatagtaagacaccagctacttaaaaaataaggatatttaattcatccctttaacagaatgaagaaagtttaagagatgatctgaaaattggattaaactcttgaactcttatactagaaaaaattgtaaataaactaatgacata

SEQ ID NO: 380892 - DNA, 678 bp, Homo Sapiens
  misc_feature (268)..(268): n is a, c, g, or t
aggaacagtctgagatctaagtaagatccatttcctcgctctgccgcagcagcgtcattttagaaggactgccaggcacaatgaaggttctcttactaaaagacgccaaggaggatgacagcggcctggatccatatatccaggagctgcgattgtgtggcctagaagccacacatgaattcctgtgctgtcatttgagtttatgtctctccccagtttgtcagaaaagctgtctcatcctgaaggctttggaggactcattttcacncagccccagggcagtggaagcagtgaagctgtgtttggagaaggacaattaaaactgaagcctggggagaagtctctgaaagacagatggaatgccaagtctgtgtacgtggttggaagtgccaccgcttctctagtgaataaaattggtctggatgcagaaggagcgggcagtggaaatgcagaaaagcttgctgaatatatttgctcaaagccatcttcagagctgcctcttctctttccgtgtggaactatcaaaggagatactcttccaaaaatgctcaaggacaaagggatccccatggaaagcatgcatgtctatcagacagttccacaccctgggatccaagggagcctgaagagctactatgaagatcagggtatcccagccagcatcacgtttttcagtcc

SEQ ID NO: 380893 - DNA, 316 bp, Homo Sapiens
agtccaaagggagggcccagaacaaatctgtcttcaaccccattgccaattgtcagttatatcagaacatgcccgtggtccctgatctttttcaggaaattaaaaagctggtccttatagcaaacaggaactcagagctcttggcgaggcagtatgatgtcttagtgtatgggcagcatgctggttttcttgctgattttgcaagtgctccagaaatgtagactggtttttttctttcttattttagtatttcatatcctgatttttaaatgttgggccaaaaaaatgacacatctggctggacatggtggctcat

SEQ ID NO: 380894 - DNA, 703 bp, Homo Sapiens
  misc_feature (268)..(268): n is a, c, g, or t
tgcccagtaagaaatattagtttaaaggcgattaggggaggtttttcctttcaatagacatcctattcaatagataaatgacctcaagaaagcaggaaagatgaaaaagtgagaatgttagggaaaagaagaggcagctgaccacaaaaatgtactcactcctcccttgacatacatgactgaaatctaaatggtttggggtggggcatggaaactgggcactctgcttaccctataaatactacaactgctccataagatttccttnagaactgagaatgggtaatgagtgctgagtactctatatagaccaaagaacttgggggaagaaatttaggtctgctgtagaacttaagaaggtcctaaattatgtcaaaaacaccttttgccaaagaacccccttctcacccagaaggccagtatccatccagaacccaagaaagctaagggaaaccatgcgcacagctgtgaggcagagaaaggtgagcctggagcttatgcacaaaggaagattatccagaaagatgtggcagttctgttaatgcaatgctaacccaaactgaggagttctgcctgctatccagcccataataagctggacagggaacaatttttctgtatacacaaggtaaaccctaaaatagatataagggaaaagccttgccttacattatatttatttatttatttagagatgttgtct

SEQ ID NO: 380895 - DNA, 620 bp, Homo Sapiens
  misc_feature (153)..(153): n is a, c, g, or t
  misc_feature (459)..(459): n is a, c, g, or t
ggtagaaaaatcattatattggataatcacaatatttctctagagacaaatttctacagttccagtcctctaggaaaatgcttccagaataccagttgattttagaatataacaagttttgtccagaccactgtcctcttaataaatattganacctatactactgagacacagactttattaagattttcacatgtaatcaagcatagtttccattgcatccgagcagcaaccaggaatggcagcatgtcattttgtgacaaccgacactgtggcttttcaattctggtttgcagaaaccttatcctcaattaaatctagccatgctctgaaaaaggctttaggtcactccaagcttggcagttaacatttggcatggacactggtaaaaccacaatagagaaagaagtaacagatacaacctcataggccataaacatacacagcaaatggaagcanggatgtgaagtcatggagtgaccacatgttaacaggaggggcttagcagagccactgggaagctttgactcacagccccgacagttcttagagtgggaacgatttctacatacagaacagctcaggcactaacacactgagaacagaaactgcctgatcaa

SEQ ID NO: 380896 - DNA, 473 bp, Homo Sapiens
  misc_feature (40)..(40): n is a, c, g, or t
ggtacaggtgcaagggagagaagaagggcatggcagaagnaagccccgcagaaggcagcttaacggtacttggaggtcagcacggtgctcacagaggcaaggaatttgtccagagaggcatgcaccccgggggtgaaatcggcagggttggtggctagccaaggtcaccagcaaggcagtggcttcaggagcttgaagttgacgggatccacacgcagcttgtgggcatgcaggtcgctcagagcagacagggcaccgggcaggtcatcgaggtggcctgcagcattggccagagcatcggcgaccttcttgccgtgacccttgacctggcatgagccgtggcttacatcaaagtgagggaagtaggtcttggtggtggggaagctagcaaacatcctttccagggcttcagctccatattcagcaccatggccaccaatcttcccccaggcagccttgatgttgctcgtgcc

SEQ ID NO: 380897 - DNA, 552 bp, Homo Sapiens
  misc_feature (53)..(53): n is a, c, g, or t
  misc_feature (134)..(134): n is a, c, g, or t
ttagccatatgcagagaatgaaaccggacccctacctttcacagtatatgaanattaacttgagaggattaagatttaaatgtagacctcaagctatacaaattcggagaaaacctaggaaataccattctggnacattggccttggtaaagaatttatgggtaggtccccaaaagcaattgcaacaagaaaaatgattgacaagtggaacaaattaaaccaatgattctttttacctcctttgcatttgtgcatgccatttattctccctgaaatgatagcctaccgttagcaaaccacccttggccttgcctcatccttatgttggataagaccattcaagtcgtagcttaaaagtaatttctgtgagaaaccttttctgatacctcaagactgcgttgagtgtccctcctctgatcttttctaaaactgtgtactagctttctatcagcacttgcaacttattcatttctttttacttgaagaaattacaatttccattgtaaacccactgtctatcgtaagaccttgtaaatggatgagtgggaaaag

SEQ ID NO: 380898 - DNA, 461 bp, Homo Sapiens
  misc_feature (414)..(414): n is a, c, g, or t
ctcggaggacacactgaactctcacttctcagcatgttaagtgtagtgcttcatggaatgctctggcaccctctatggtagtactattactattgccatttgatagatgaggaagctgaggcgctgagctattaagggacctgtctgggtaagcagcagaagtcagaaacagctgaggcagtgcagggccacgctctggaaccactccctcctgaaacagtccttcttggctctgagaacagtcatgcaacatctagaattttgtgttcggccttgggctgagtgctaagggtatagcagttaaaataatgcaggtattcatgtttcaggtgcaacggaattaggttttcagcagagccttttctgactcttggaaggtggcctgaggaagttacagaaagatgactaagaaantagtcacgcctgtaatcccagcaactttgggaggtcagggtaggcaa

SEQ ID NO: 380899 - DNA, 536 bp, Homo Sapiens
tgtgccgtgtgatgatcctcccactctatgtttcagatacactgaacttctttccatttctaaacaataccttagtgctcttgaacttggtgtttcctttcctgacacactctttccccagatggctatatgactgactcctcttgcttcagatgtgactcccttgagcacccttcctacagtagcccttaacttgtctgccttcctcactgctgaaatcctggtatgtaggatagctgtatctagggaaggtgctcaataaatatctacacatgcgtgaatcatcgaaaccaattttaaagcccacctcctctactctggtaaaaactgcataaattaaaagaaacatatagtccattccacttactgctctcccttaaaccttagtcatccataagtatctagtgacctgctttctgttccctcatctccatcctggcccccttaagcgtctaaaatcaaacatttctcccaattagaagtcacccctagctcagaatgcacatcttttcaaaaataacctttactcctattca

SEQ ID NO: 380900 - DNA, 494 bp, Homo Sapiens
ggcggtgtctagttgccagtggggaatctttccattggctttcattatttttcaaatcttctacagttctattgagctcccggatagcccggagtctgcggatatagcgacggcaactaggcagaatagagaggtggtgagcatgcagggtgagaaagaagcactccgtaggagatttcggctcagaaaatggaggctgatcgccatagagttcagtcagccagtcattcacatcttccatcgttgcattcacacgcgtctcatcattgggaagagtaatccgacatcttgggtgaaaaatatacgtgggatcaactgtttctaacttgatttttgtacttagctgctgcagtacccaaaggaaattcagcataaatccatctgtagacaccaatctatcatctgtctgcatctgtgctttcttcatattggcattgacgacagccgccatgtaactgagagcagcctcacgggtttcgccatttaacaaaata

SEQ ID NO: 380901 - DNA, 502 bp, Homo Sapiens
tagactgagcactagagaactcaagaaaatacccgcaaacttgtatatcatccctttttagtggtatgcaaaatttataaagagaagggcagaactaagaagaattaagtttggagaagatataatagaataaaacagattgcctaaatatcctacagttgtgaagctgcctgtctggtgaacatgctcagagcacttagatttggatagttttaaaaaagagttgggtcatcagagagtgagttttcgatggaatgtgacagtgccaaattttttctactgcttgaatgaaaggaaatgaaaacaagaacagaagttatagaatagggtaagagggacgttgccatacagaaagtaaaaatttaaaaccttacttattccttttgaattgaataattgatgtgtctactactatggttactgagttgggtaacattttcgggtacaaatagtggtataggtatgaatgggggggaagtaatatgataaactctttaatcct

SEQ ID NO: 380902 - DNA, 545 bp, Homo Sapiens
ttcgccatcatcctgctgaacaccgacatgtacagccccaatgtcaagcccgagcggaaaatgaagctagaggacttcatcaagaacctccgaggtgtggacgatggtgaggacattccccgtgagatgctgatggggatctatgaacggatccgtaagcgagagctaaagaccaatgagaaccatgtgtcccaggtgcagaaggtggagaagctcattgtggggaaaaagccgatcggatccctgcatcccgggctcggctgtgtgctctctgccccaccgtcggttggtctgctactgccggctctttgaggttccagacccaaacaagccccagaaactcggactacaccagcgagaaatcttcctgttcaacgacctcctggtggtcaccaagatcttccagaagaagaagaactcggtgacgtacagcttccgacagtccttctccttgtacggcatgcaggtcctgctcttcgagaaccagtactaccccaatggcatccggctcacctcgtctgtccccggagcagatatcaaagtgt

SEQ ID NO: 380903 - DNA, 431 bp, Homo Sapiens
ggatctgagaaggtgtttttttaaaaaaatgtatcccggaacttaaattataattaaaacaaagagaatcaattttgtatagctacacctagcaacagtattacctagaaatagtaacattttgatgtatatccttccaaaatcatttaaatccacacacacataaacacatatgactacatacaacttatatttatcttattgatataattgactgttttcatttgtttttaaataaatgcccttgggctaggactgacttttactttttgaaacattaattcagtgttgcaagtatttactttgacatttttgcctatgaaatgtcatgtcaaatgattatgctatgacataggaacagagaatgaagaatcatagaataatagaatttaagatctaaaagagacctttgagaatattaaaatctcctt

SEQ ID NO: 380904 - DNA, 415 bp, Homo Sapiens
gatagatactcttggcccagtggacttattccactaaacatatggactttcaacagagacatttattcagtatctaatatatgacaaggataaagcaacctgcagttaaaaagagagagatcttaaagttttcaggagaaagattaaaactaatatactctaaaagataatggcctgtactgggagttcccgaaattctctctctcggtttccctgtggtcctaaatgcagagcctgcctttagcagttccatctcccaggactgaatactgtgataggaaaagaacttaaagatcatcgagactggctccctcgggtttgacagatcagtgagaggcttggcacagtgacatgactttcccggggccacacagctagaaggtgacccagctaggattcaggttcctccctctca

SEQ ID NO: 380905 - DNA, 300 bp, Homo Sapiens
ggcactgcgcttgcacaaatggaaaaatatccataaatataaataacccaaaattaattaatatagagtataaaattgtaataatctatattagacacattattaaaagccaataaacaagttgtaacagcagtataatttttgaggcaaaaacatctaaaaatctgaaatttttcattactgttcagatttctggaagtatactcactccttcacaacaatgttaaaagtaaagagtaaacagaaaacataacaaacttaggaagtaaaaagtcttactaggtattttgtaaagatttc

SEQ ID NO: 380906 - DNA, 408 bp, Homo Sapiens
  misc_feature (186)..(186): n is a, c, g, or t
gtcacagcgccggtgtgaggcctcgcttccctagagaaaccatttcacctgttcattaacgcaaacaagggggtagctttaggggtgcttactcaagaacatggggccactgacaacctgtggcctttgtatcaaaagtttttgacccagtaacctgtgggtggcccaaatgtgttcaatttagtncccgaccgccttgttaactaacaaaagcaggaagctaacctttgggggaaacttggtggtgaccacaccccatcaggttagaacaatcttaaaaggcaggaagatggctcaccgactcaaggattttaaagtatgatgctatcttactagaaagaggtaacttaacattaaccactgataattcacttaacccagcaggtttcctgacagggaacccaaatc

SEQ ID NO: 380907 - DNA, 368 bp, Homo Sapiens
cagaagaccggtcagtccacactactgggctgcgatgtgaagccccacccatacttccggcaggcaggagatccccactgcttcacccactagaagctctgctcaaggcagaggtggggaccaaccctcttcaccctgtccccaaccaggaagtgtgatgtctccacacaggccagccggctgccccagcccacctcccgcctcccttcccaccagaaggacctgtagctcctgcagagacctcctggggcacaccgtatctaaggggctggaacataggggagccctattcgttgctatgggaacaaagacagccagggttcggcccccccagacaggaagggtcgactcaggagacacgttttccc

SEQ ID NO: 380908 - DNA, 413 bp, Homo Sapiens
gagtgaatctcctgaaaccatatgcaagctctcacagacaggagcatttttccagagcggggggctgtaggttccatcagattctcaaaggtattagaaactaaaaaaagaactaaagaacccactgctataaagtcaagtttaactaaataccaaagactacaaagtctctactacttcataactctagcttctgaaacactttacagctttttaaaagaactctactttgccacaattacatcatcaaaaagcagtgtcgtcccataaagattacgaaatagccctctgtttggagagcagtgtttctccaacagtgttccagagaactgtagactgaggaaatataaacaggtacttggccagagaggtgggggaaattctgcccactcccccaggggattctaggtaga

SEQ ID NO: 380909 - DNA, 380 bp, Homo Sapiens
cccccctgcctccaccacacacccaaaacttgtgttttgatagcctactatattccaacgctatcagcagtacaaataagaaagaaaaaacataccatgtccttattcttcacaatgcttttgttctcttagaagtaaccatataaccagtaataagcagatatataaataacatatcttggagtaaaaattgctataaggaaagttaaagcagctggtggaacagtaagtgttaggagttggcactgtgcttgtagggtgggaacagctctttgttaaggtgcctttgagcagatagatgatgaacacgtgtaggctccctggatgaagagtgttccaggtgtgagacaatgagaagttgaaaaatgaccctggagtgt

SEQ ID NO: 380910 - DNA, 482 bp, Homo Sapiens
cacgagatcctatctgcttgagtatagaaatcctactctgccaaggccacccttcggagagcatttacatagcactcaatgcactctcgcttttggtttactcttttactaggtgaaaccaggcctagtggctcataactgcgatttactatcatacttgacctcagtccgcaggtgaaacaacaaatgtagggatgctgaaagtagctgagtatgtgtctattccaaccacagggtgggttcagggacacatcggatccactgcgaaacagacatgagctcacactccatccaccagctaacctccataagtccctactctggaggaccacagtgatgttctcggtctctgggaattcctgtcaaatcagagccagcgtccacaattccccaaatatctgagaattttcttttctctaagtcacagtcatcctggtagaaggctgtaggtccctttggggaagactgggaaaaagattaac

SEQ ID NO: 380911 - DNA, 388 bp, Homo Sapiens
attcatccagattctgaagagggcgctggggcaggtgttttcttacgtgaggcccagcacaattacagacgctctttgatttacaaaggagtcacatttggataaatctaccacaaaacaaaaacatcctactttgaaagtgcattcagtacgctggacctaccaaacataacttagccttgcctgccttagcctagcactctgtctagctcagaatgcttatattagcctacagcaaaatcatctaacaccaagcctgttttactaataaagtgattataaatcattttgaatcaaaattaaaaattcaaagtatggcttttactaagtaaatatcacatttgcaccatcctaaagtcaaaaaattataagtcaaaccatcgtaagc

SEQ ID NO: 380912 - DNA, 370 bp, Homo Sapiens
taactcaaaaacctttttaatttatatccttaattaggccgcattaaggaaagtgatctttaaaaaatcccatccctcctttatctgtgaaattggacatttatattattacctcagataagattgctttctgtgattcagagctccagtggatttaagtataatttcatagcatgggtacatagacaacattataaatagcctttggtataacttattcaggctacaaatttatactttactctttttcctttctcactcttacttccgtgtttctcatttttcattaagccactttcaacataaaatgtgatgctcagtgatgtttatatttagaactcatcacaaccgcctcccccaaggaacaaag

SEQ ID NO: 380913 - DNA, 432 bp, Homo Sapiens
aatattcattcaaaatactcgggaaagttctacccattgtgtttaattgggttactaaatttaaaaaatccatttgcaaggtgctactgtcaactatatcattccttcacacccttgcatacattacattcatttgtgatatcacagagacacaagttagggatggcaatttttacttttgcgataaaagagaaatttaggaagataaatcttcaaagtatataactcagattttttaaaactgcagtggttttgaaattgctgttgctgaagtctacattacgaaattgcagctgaaaagttgcaggatcagctttcctcaaactttgtaaaagccatcattgattactgtcttttctctgctgggaaaacctttaaagattagagaaaataggatatacttacttgtagccttccccagccctctttatc

SEQ ID NO: 380914 - DNA, 632 bp, Homo Sapiens
tcatataggatgttggttggatcaagggatttctcaaagattcctgactgtccatgtgcatgatctgtggctgggccaggtgcagtggccccgagctcagcgggggacaaggacccgccacctgcttccctgggtcctcttgctgaagaggaggcagcacagcaggcgggccatggtgccacccggaccggagccagcatgcaggtgctccagctgctcttgcttcacgctctgatccatgccaacctcgccctgggagatttctggggagccactgaaggaagcttgccgcaccagaaagcatttcttcctcctccctggacggtgataccgtggaggctgctgctcccgacacaggagcatgggacagattcccataatcaaatgatttgctccgaacttctgggacttccgctgggtgaggacaaggcatctgctctgatgagaagcgtcgcatctctttctggtggtgatggactgggacagacaatgagtatgaaccagcagggacagtcagaaactctgaatgcttcccaaactcatcctgcttaggaagtgcagaaagcttactggtttcttctctttcaaaagacatggagaaactggagctgtgggacaagttgctttcttgc

SEQ ID NO: 380915 - DNA, 393 bp, Homo Sapiens
  misc_feature (113)..(125): n is a, c, g, or t
aagtatacttgaggagggtggaatagcaggaggtttttgtaaggtgaaatagaatgaaagtgcagccaagaatttttctgtcttcaattttaaagaacaccggcataactcannnnnnnnnnnnncccctgtgttctttttgaccttcttagcagctcctgactttctcccttggggatttttctctgtatagtcagcgctgactcccttagaaatcctgaaccccacacccgtatcgcgaaagagttgaagagaattcaaataaacacgttgagataagtagcttgtgaactaactgttacagcatgcctctgtaataagatactgccagctagaagctaaaataaagtgaaattccatttaacatgtgacaatcaaaactgtatgtgtctc

SEQ ID NO: 380916 - DNA, 211 bp, Homo Sapiens
aacaagtcttgagattaatctttgcttgatgctgatcttgtgaacacagtgggggcagagtatttttagttttggggaaaactccatattattgatttctaaagtttctttagctaaggtcttcagcatattttttaagtacctgataatgtctctgtcttccccattaaactgtaagctccttgatgagtttattcacctttgtgcctcc

SEQ ID NO: 380917 - DNA, 418 bp, Homo Sapiens
  misc_feature (25)..(25): n is a, c, g, or t
  misc_feature (65)..(66): n is a, c, g, or t
  misc_feature (283)..(283): n is a, c, g, or t
  misc_feature (286)..(286): n is a, c, g, or t
ctccgtgtgcaggaatgccaaactncctctgccgggaccctccgtgtgcaggaatgccaaactcnngctgccgggaccctccgtgtgcagagccctggactggactcagcctccccgacaccgcccagagctggtcatctcccctggggctgcttgggcgtctcagaaataaacgccccagtgtgcagactccacctgaccccattctagaaccctctttcagcctgtgctctcccatgggacccctctgcctccagcccaggcccgggcaggggccgcatcnatnctagcacagcctgcacagacatcgtttgggtctcggaggctggcgttacccttggttgctggacatggggggcgtgcagttatgggggcgctgtcagccttcccgcgcgcatcgccgactccacgtggaccc

SEQ ID NO: 380918 - DNA, 352 bp, Homo Sapiens
tcacgtctggtcccatttctgtggccctgctgaggtgtggtccagtggtgaagagggcgatggatgggtttgcatgtctgtgatgagcgcgttgcatggggctgcgcgtctagaactcagatcccaaagatcatgagaggagcgaggaaccccggggtatgtctcaggggcctgtgggtcagttggcactggtgtgaggggctcgaggtggaatgcgccagttgtgtttatgggatcatgggcagccaagcgaggggaaggttgtgtgtttgcaacattctccacaggattcttttgtgacgttgtttgtaggagcctgtctgggctgctgagctgggaggcaaactggtca

SEQ ID NO: 380919 - DNA, 209 bp, Homo Sapiens
ttctggaccattctgtctgatgctggaacagacgaaatttccgaaacttttgccatttctgcattacgaagaggaaatctgaacattgtgcaattatccagtttaaaatgggttcccagataaagatccagaacatctgagaactgtgtcctaaaatctgcatccaaatctctaaacatgcgtccgggactaatggatgtgcccctggc

SEQ ID NO: 380920 - DNA, 421 bp, Homo Sapiens
actgtggaaatgggagctaatccctgtttaaccagctactgcctggtcagatactccttagagcataattttgctgagttatgccccattccatctttgaacccatgctagagtctccccctgcaagctaccctctctatcagctacttcattccaacagctactccttccttccagcttcccagtacctgccagggtcccatgagacaggggtgtcaccttcctcaaggctgaagacacagaggacatttgttactgactggttctctggccatgggtaaggacaagccagccctccatagaggcatgacaggctcttgctttcaaggaggcagagctacttcagaggcccaaggacatcttctcactccagacagggcatttcccagccaaagcctcagccttctaccttcaggctttc

SEQ ID NO: 380921 - DNA, 325 bp, Homo Sapiens
gatgatgattgcatggggtttgatgctacactggatcatagagtgtgggttctttcttacatgtgttggtagataaatgtcatagactgatcctgaatccacatcaacagcatggaatccagcacaggatccatagatcactttcaacctctggccttcctcaacagtgagatccaccagtaatggcttatgtaccaattctccaaatgacttaaaggccataaatttggtgatatggctttggtgcccacgcataggacttccacagaactcttcaaagcaatcaccagaaatttgattctttcatattttacaactttataat

SEQ ID NO: 380922 - DNA, 299 bp, Homo Sapiens
aaaatagatcaaagttgagtcatagcatcccccaaacattatgggaagctgaacttgggcagttatttctctgccttgtccctcacagctaacacaggggcatgtaacctagtcctggctaatggactcccttgagggaacactgtcaagaggcagagagagttagaggtttccaagccagcagtgactacagagtttaaatcatgagcctaacagagagtatccagtgaccggaagtcaggaggctcaggtcttctaaccaggaaggttaactggtatgatcttgctgtgttagctgc

SEQ ID NO: 380923 - DNA, 700 bp, Homo Sapiens
  misc_feature (578)..(578): n is a, c, g, or t
  misc_feature (601)..(601): n is a, c, g, or t
  misc_feature (607)..(607): n is a, c, g, or t
  misc_feature (612)..(612): n is a, c, g, or t
  misc_feature (616)..(616): n is a, c, g, or t
  misc_feature (620)..(620): n is a, c, g, or t
  misc_feature (645)..(645): n is a, c, g, or t
  misc_feature (655)..(655): n is a, c, g, or t
tttccaattatagatggatcattacagacagcggagtcctgagaagccagacatctgctcctcacatgaatgcactcacctcctagagaccaggctgccatcatgctctggaagcttgtggagaatgtcaagtacgaagatatctatgaggaccggcacgatggtgtcccgagccacagctcgcggctctcccagctgggctcggtgtcccaaggaccctactcgagcgccccgccgctgtcccacaccccgtcgtcggacttccagccgccctacttcccacccccctaccagccgctcccctaccaccagagccaggacccctactcccacgtcaacgacccctactccctgaacccactgcaccagccccagcaacatccctgggggcaacggcagcggcaagaagtgggttcggaagccggctctctcctgccccagcctcgggccgccttgccccagctctcgggccttgacccccggagggactaccactcggtccgccggccggacgtgctgctgcattcggcgcacacggcctggacgcgggcatgggtgacagcctctcgctgcacggnctcggccatcccggaaatggaanaagttnaattnagtngaanatgccaatagcggcgggatgaaatntattgggaanaattctgttattaaaaaaattcgggttcctcccaaatcggttgaa

SEQ ID NO: 380924 - DNA, 698 bp, Homo Sapiens
  misc_feature (606)..(606): n is a, c, g, or t
  misc_feature (608)..(608): n is a, c, g, or t
  misc_feature (654)..(654): n is a, c, g, or t
aatctttaggatctgagcaggagaaataccagcggatcttccccactctgctcccttccattcccacccttccttctttaataagcaggagcgaaaaagacaaattccaaagaggattgttcagttcaagggaatgaagaattcagaataattttggtaaatggattccaatatggggaataagaataagctgaacagttgacctgctttgaagaaacatactgtccatttgtctaaaataatctataacaaccaaaccaatcaaaatgaattcaacattattttcccaggttgaaaatcattcagtccactctaatttctcagagaagaatgcccagcttctggcttttgaaaatgatgattgtcatctgcccttggccatgatatttaccttagctcttgcttatggagctgtgatcattcttggtgtctctggaaacctggccttgatcataatcatcttgaaacaaaaggagatgagaaatgttaccaacatcctgattgtgaacctttccttctcagacttgcttgttgccatcatgtgtctcccctttacatttgtctacacattaatggaccactgggtctttggtgaagcgatgtgtnanttgaatccttttgtgcaatgtgtttcaaatcactggtgtccatttnctctctgggttctcattgctgtgggaacgactcagctgataatc

SEQ ID NO: 380925 - DNA, 622 bp, Homo Sapiens
tggatgaatccttcaaatcttccatcaataacagacccatggctaaaacttccttcttcaccataaatatgtccagtgtaaatatgagaggtatcataatcaagtactttatttgatgtttctactttaaattcatcactgaaaagggaagtgtccctcttcattcgtaggttgaaatgtcttccatgggcatggaaatctagacgtaaaaattggtcttcatgtgagactgctcttttggcacgctggtgtttttggtgtaatgaatccacattgtaagataatccttcataatgtctgatatatttatttaaaggattcccatactgacctcccatccccgccgcccaggagaggagcagaattaacactctcagcaacaccatcttccgctgccgctgccgccgccgccgcctcctcacgggttaacagcagcacatcgatccggagggagaagctgaaggggcttggtccggagcctccacgggaagccgggacctcccctggcaggagaaacggcgaagcacctccctctcgctccacttcaggggccggcaacgctcctagctcctccaaaacagggacctccctccccctcgttcgtttccttcctcctttcccc

SEQ ID NO: 380926 - DNA, 1011 bp, Homo Sapiens
  misc_feature (20)..(20): n is a, c, g, or t
  misc_feature (51)..(51): n is a, c, g, or t
  misc_feature (54)..(54): n is a, c, g, or t
  misc_feature (56)..(57): n is a, c, g, or t
  misc_feature (63)..(63): n is a, c, g, or t
  misc_feature (83)..(84): n is a, c, g, or t
  misc_feature (97)..(97): n is a, c, g, or t
  misc_feature (120)..(120): n is a, c, g, or t
  misc_feature (132)..(132): n is a, c, g, or t
  misc_feature (143)..(143): n is a, c, g, or t
  misc_feature (147)..(147): n is a, c, g, or t
  misc_feature (163)..(163): n is a, c, g, or t
  misc_feature (170)..(171): n is a, c, g, or t
  misc_feature (192)..(192): n is a, c, g, or t
  misc_feature (197)..(197): n is a, c, g, or t
  misc_feature (205)..(205): n is a, c, g, or t
  misc_feature (216)..(216): n is a, c, g, or t
  misc_feature (231)..(231): n is a, c, g, or t
  misc_feature (252)..(252): n is a, c, g, or t
  misc_feature (258)..(258): n is a, c, g, or t
  misc_feature (282)..(282): n is a, c, g, or t
  misc_feature (358)..(358): n is a, c, g, or t
  misc_feature (412)..(412): n is a, c, g, or t
  misc_feature (439)..(439): n is a, c, g, or t
  misc_feature (509)..(509): n is a, c, g, or t
  misc_feature (522)..(522): n is a, c, g, or t
  misc_feature (580)..(580): n is a, c, g, or t
aaaaaaagccatttgggggnggagaaaattgggattttttcaaaaaatttnggngnnaggcanaaatcccagggtttttaaanngggagggtgggangtttcaggggcaattttcaaaanggggggtattangaatagtttgncaangttttccgggggtccnttttggnngagaacccagtgttgtttttngaaanattttaangccattagaangtagggggttttagngttttttggaatgtttcaggngttcantgttgtgggttcgggcgagatttnttcaaccttctggtgttttagattcggcaggtaatgccaaggtttcattgttagctaattgtgtctggagtgcatntgaaatctcaaacattagggatgcaggaagttttacagtagtttcattaagacntggaataataaggtggactagtatcantcttccccagtggagctttttctggggatttagctgaatccttgtgagtaacattctgaatcacttgctngatgattgttatngggattagttttccttgggacatatgctggcactgtgtggtcttggtcataggtactntggattttcccatttacttttttacttccaacaacggtcttgtgattgaaaatcttactccaaattccaccttccacattgtctttcactccaaattcataaactgtgttgggctttaggttttccacaattgtttcagtggctggacagatttgaaaaatccacttcttttctttatccttttctcgatagcgaattgtataaaatctgtcattgggacagtgacttggcaatgtccagtcatggtgtgggttgatgaggaaaccccaggacaggaagaccgagctcggtgtcagagtgccaaccaccagctgcagaggtttgcgagaacgagttttacctgaacatgacttcttttgacttggaggtggagcaggtcgcacaactatcagatatttcggctctgcatctggaagcaataacattatttt

SEQ ID NO: 380927 - DNA, 566 bp, Homo Sapiens
  misc_feature (30)..(30): n is a, c, g, or t
  misc_feature (53)..(53): n is a, c, g, or t
  misc_feature (60)..(60): n is a, c, g, or t
  misc_feature (68)..(68): n is a, c, g, or t
  misc_feature (78)..(78): n is a, c, g, or t
  misc_feature (100)..(100): n is a, c, g, or t
  misc_feature (119)..(119): n is a, c, g, or t
  misc_feature (149)..(149): n is a, c, g, or t
  misc_feature (160)..(160): n is a, c, g, or t
  misc_feature (166)..(166): n is a, c, g, or t
  misc_feature (234)..(234): n is a, c, g, or t
  misc_feature (324)..(339): n is a, c, g, or t
  misc_feature (502)..(502): n is a, c, g, or t
ggaaatggactggcaccacagtcaggaaanatcgccccaacacttcaatgtcntggagantgaattcntttgtgatcngtaaaatttgcagccccagcantaagttccattagcatctnggcgatctcaggctttatgaccgagtcagntgactggctgnttccangacatgctcctgcacatctttgagctgtgtggctgcctttgagtagtgagagttcctgaacacagtgntgaagagatctgtgaggaaagtactgtaaggctgtttctatgcaatgctgaaattctccaaatttcctctaatgtttcctgaaaacaagnnnnnnnnnnnnnnnnaaatggcgtttgttgtaagtctcctcctccattccttttgtttgctgaggtagcggtttccttgtaacattaataagagatgcttccagactgggctggccctcagttgtaaagtctgaagcaagaatgcacagatgtatttgtaaggcttctaagtcctttncgtgagacgcgccccggcccccagcgcaccgccttggaccggctgtgtacaccggaagttacgt

SEQ ID NO: 380928 - DNA, 856 bp, Homo Sapiens
  misc_feature (622)..(622): n is a, c, g, or t
  misc_feature (624)..(624): n is a, c, g, or t
  misc_feature (627)..(627): n is a, c, g, or t
  misc_feature (632)..(632): n is a, c, g, or t
  misc_feature (639)..(639): n is a, c, g, or t
  misc_feature (641)..(641): n is a, c, g, or t
  misc_feature (646)..(646): n is a, c, g, or t
  misc_feature (649)..(649): n is a, c, g, or t
  misc_feature (687)..(687): n is a, c, g, or t
  misc_feature (706)..(706): n is a, c, g, or t
  misc_feature (708)..(717): n is a, c, g, or t
  misc_feature (787)..(787): n is a, c, g, or t
  misc_feature (803)..(803): n is a, c, g, or t
  misc_feature (809)..(809): n is a, c, g, or t
  misc_feature (811)..(811): n is a, c, g, or t
gttccgttggggaagatggcggcggcctcgagcacccttctcttcttgccgccgggggacttcagattgatccttcccgggaagagtagggactgctggtgccctgcgtcccgggatcccgagccaacttgtttcctccgttagtggtggggaagggcttatccttttgtggcggatctagcttctcctcgccttcaggatgaaagctcagggggaaaccgagggagtcagaaaagctgagtaagatgagttctctcctggaacggctccatgcaaaatttaaccaaaatagaccctggagtgaaaccattaagcttgtgcgtcaagtcatggagaagaaggttgtgatgagttctggaaggcatcaacatttggtcagctgtttggagacattgcagaaggctctcaaagtaacatctttaccagcaatgactgatcgtttggagtccatagcaagacagaatggactgggctctcatctcagtgccagtggcactgaatgttacatcacgtcagatatgttctatgtggaagtgcagttagatcctgcaggacagctttgtgatgtaaaagtggctcccccccgcggaaaaatcctgtgagctgtccggaaacttgttanancanctaanggaaaananttttnatnaattttctacgccaccttaagggccttgttaatctgtntaaccttcccaggggaccntnnnnnnnnnnactaaaatgttatttgggttctccaatcccttaaaaacaaaaatctttccccaaaattggccaatttatnttccttggaaaacccncctaantnccggtccccttgggaataaaaaatccttccttgggaaaatttttt

SEQ ID NO: 380929 - DNA, 695 bp, Homo Sapiens
  misc_feature (524)..(524): n is a, c, g, or t
  misc_feature (545)..(545): n is a, c, g, or t
  misc_feature (595)..(607): n is a, c, g, or t
  misc_feature (620)..(620): n is a, c, g, or t
  misc_feature (635)..(635): n is a, c, g, or t
  misc_feature (642)..(642): n is a, c, g, or t
  misc_feature (646)..(646): n is a, c, g, or t
  misc_feature (648)..(648): n is a, c, g, or t
  misc_feature (660)..(660): n is a, c, g, or t
  misc_feature (666)..(666): n is a, c, g, or t
  misc_feature (677)..(677): n is a, c, g, or t
tgctcagagagagagagactaagacggataacgcgtcatctcgccttcccaaattttcccccctcgctagaccgggtccaaaacctccatccggagccggcaggagaggagaacgatgtttaactcggtcaacctgggcaacttctgctcgccgtcgcgcaaggagaggggcgcagatttcggcgagcgagggagctgcgcctccaacctctatctgcccagttgcacttactacatgcccgagttctccacggtctcctccttcctgccccaggccccctctcgtcagatctcctatccctactcggcccaagtgcccccggtccgggaggtctcctacggcctggagccatccggcaagtggcaccatcggaacagctactcctcctgctatgcggcggccgacaagcttatgcaccgggagtgcctgcctccttccaccgtcaccgaaatcctcatgaaaaacgaaggctcctacgggggggcaccaccaccccagcgccccgcacgcaacccccgccggnttctactcctcagtcaacaanaacagcgtcctgcctcaagccttcgaccgtttcttcgaaaacgcctactnnnnnnnnnnnnnaaccgccgccganccccctgctccgggnaaggggnaagncnagggggaacccnaaggcncccccggctcnggaatggggtcccgggct

SEQ ID NO: 380930 - DNA, 525 bp, Homo Sapiens
  misc_feature (92)..(92): n is a, c, g, or t
  misc_feature (141)..(141): n is a, c, g, or t
  misc_feature (479)..(479): n is a, c, g, or t
aaggttctaaatgtctgcggggctcagagccggatgtcacgtcgtcctcctccgccggttttctcttgggtccttttccgtgccgtcccgcngactccgcctctggccgcgcgtgtctggctgctaggccgacaccaaagnactggccgggtacccgggaagaaagcacgtgctccagcagttgccgcgcccagccccgagagaggccctagggcgctgcgggcttacggggtccgcagtccccccgcgacgcgagccaacgggaggcgtcaaaagacccgggccttgtgtggcaggctcgcctggcgctggctggcgtggcccttggccgtcgtcacctgtggagagcacgtcttctctgccgcgccctctgcgcaaggaggagactcgacaacatgtcacccgcgctccaagacctgtcgcaacccgaaagtctgaagaaaaccctgcgggatgagatcaatgccattctgcagaanaagattatggtgctggatggaaggatggggacatgatccacgggga

SEQ ID NO: 380931 - DNA, 582 bp, Homo Sapiens
  misc_feature (566)..(566): n is a, c, g, or t
gctgcttggtaacaatgggggaagataatggctgcctgagcaacgtctccgagcaggcgctgggctagaggcgggtctcaaccagctactcattggaggcgggcttgagagcggcggccagggaggtgcggagcagcctcggcggcggcggccgaaccaaccgagtcggatcctgaccctaaaacctagtattttccacttgttcatcaatatggaaaactcagattccaatgacaaaggaagtggtgatcagtctgcagcacagcgcagaagtcagatggaccgattggatcgagaagaagctttctatcaatttgtaaataacctgagtgaagaagattataggcttatgagagataacaatttgctaggcaccccaggtgaaagtactgaggaagagttgctgagacgactacagcaaattaaagaaggcccaccaccgcaaaactcagatgaaaatagaggaggagactcttcagatgatgtgtctaatggtgactctataatagactggcttaactctgtcagacaaactgggaatacaacaagaagtgggcaaagagganaccaatcttggagagc

SEQ ID NO: 380932 - DNA, 604 bp, Homo Sapiens
  misc_feature (441)..(441): n is a, c, g, or t
  misc_feature (559)..(559): n is a, c, g, or t
  misc_feature (563)..(564): n is a, c, g, or t
ctaatatccgggaatggaaagggaagaactccggggttaggcgtattctagattgacgccttttgctggaagagcgctgctggggttaggattctgcgcggcgaggcaagatgctcaagtccaagacgttcttaaaaaagacccgggcgggcggcgtgatgaagatcgtgcgcgagcactacctgcgagacgacatcggctgcggtgcgcccgggtgcgcagcgtgtggaggggcgcacgaagggccggccctggagccgcagccccaggacccggcgagcagcgtctgcccgcaaccgcactacttgctgcccgacactaatgtgttactgcaccagattgatgttcttgaagaccctgccatcacgaatgttattgtgctacaaacagttcttcaagaagtgagaaatcgcagtgcccccgtatataaacgcatccganatgtgactaataaccaagagaagcatttctatactttcactaatgagcaccatagagaaacctatgttgaacaagaacagggagaaaatgctaatgacaggaatgatagaacgattcnagtnncacaaaatggtacaatgaatatttgaaaaaaatgtctgca

SEQ ID NO: 380933 - DNA, 821 bp, Homo Sapiens
  misc_feature (47)..(47): n is a, c, g, or t
  misc_feature (70)..(70): n is a, c, g, or t
  misc_feature (159)..(159): n is a, c, g, or t
agagcgtcgggatatcgggtggcggctcgggacggaggacgcgctantgttcttctgtgtggcagttcanaatgatggatcaagctagatcagcattctctaacttgtttggtggagaaccattgtcatatacccggttcagcctggctcggcaagtanatggcgataacagtcatgtggagatgaaacttgctgtagatgaagaagaaaatgctgacaataacacaaaggccaatgtcacaaaaccaaaaaggtgtagtgcgaagtatctgctatgggactattgctgtgatcgtctttttcttgattggatttatgattggctacttgggctattgtaaaggggtagaaccaaaaactgagtgtgagagactggcaggaaccgagtctccagtgagggaggagccaggagaggacttccctgcagcacgtcgcttatattgggatgacctgaagagaaagttgtcggacaaactggacagcacagacttcaccggcaccatcgagctgctgaatgaaaattcatatgtccctcgtgaggctggatctcaaaaagatgaagatcttgcgttggatgttgaaaatcaatttcctgaatttaaactcaccaaagtctggcgtgatcaacattatgttaagattcatgtcaaagacagcgctcaaaactcggagatcatagatgataagaacggctgacttgattacctggtggagaatcctgggggttatgtggcgtatagtaaggctgcaacagttactggtaaactggtccatgctagttgtggtactaaaaaagattgtgaggatttatacactcctgt

SEQ ID NO: 380934 - DNA, 655 bp, Homo Sapiens
accgcctccccgcccaggtctgggcacagccgcccgccgcccagcacaggagggtgcagccccggccccaagttctgcgccatgggaggctcccactctcagaccccgaggggccgggaacccgccggggagaggcacccgagacccacggagaccgcctcggattctgaaggtaattttgagactcctgaagctgaaaccccgatccgatcacctttcaaggagtcctgtgatccatcactcggattggcaggacctggggccaaaagccaagaatcacaagaagctgatgaacagcttgtagcagaagtggttgaaaaatgttcatctaagacttgttctaaaccttcagaaaatgaagtgccacagcaggccattgactctcactcagtcaagaatttcagagaagaacctgaacatgattttagcaaaatttccatcgtgaggccattttcaatagaaacgaaggattccacggatatctcggcagtcctcggaacaaaagcagctcatggctgtgtaactgcagtctcaggcaaggctctgccttccagcccgccagacgccctccaggacgaggcgatgacagaaggcagcatgggggtcaccctcgaggcctccgcagaagctgatctaaaagctggcaactcctgtc

SEQ ID NO: 380935 - DNA, 975 bp, Homo Sapiens
atgctcacctgagactgagagctcccatgagttttgaatatgctctgctccttacagcaaagacaccatttttaaaagtaccattcttttgactttgctgttcccaaggcttctgtgatattccggcccctccgtttaaaagccatcagatttgagagcaataagtcttcaaaaccgggaatttacattgtttttcagctgaccgacttccaggaaaaggactcaaccgcatctacccaaataccgtggcactgcttgcgctctttgccaccggatactccccttccaatgagactttctgattgtgtctaccaactctcctattaggaaacccgtgggttgcatgcagctattctgttgtattctcattctcactctccctcccttctctcactctcactcttgctggaggcgagccactaccattctgctgagaaggaaaagcccgcaactactttaagagattaagacaatatgcgcaatcctcgcctttcctagcaatcactatttaaatctggcaagaactgacaacagtctttgcaagaatggaatccgtaaaacaaaggattttggccccaggaaaagaggggctaaagaattttgctggaaaatcactcggccagatctacagggtgctggagaagaagcaagacaccggggagacaatcgagctgacggaggatgggaagcccctagaggtgcccgagaggaaggcgccgctgtgcgactgcacgtgcttcggcctgccccgccgctacattatcgccatcatgagcggcctgggcttctgcatctccttcggtatccgctgcaacctgggcgtggccattgtggacatggtcaacaacagcaccatccaccgcgggggcaaggtcatcaaggagaaagccaaattcaactgggacccggaaaccgtggggatgatccacggttccttcttttggggctacatcatcactcagattccgggaggct

SEQ ID NO: 380936 - DNA, 584 bp, Homo Sapiens
tgtagatgctgacaaccagcagggccccggatacatacacatccccaaagggaaagggaagcagtttgatgctcaaggacactgtcttcctgatggcaggactgagaacactccaggtgttgaaaccaaaggtcttaatttaaaaataccacgcgtcatagcacttgaaaaccccaggaccagatctcttcatagagcacttgaggaaaccccaaagggcatgcctaaagacttgaatgtgggtcagcaagctctttccaacagtggcatctcagaggttgagggtctctctcaacatcaggtgcctgaattgagctgtacgtcagctgctgatgccatcaacaggaactcaacaggccagcaaagccaaagcggttcaccttgcattatggatgacacagcatttaatagaggagtgaatgccttcccggaggctaaacataaagcaggcactgtgtgccccactgtgacccattccgttcattcccaggttttgaaaaaccaagagctgaaggcaggcacttccatcatggggtcccatctgacttctgcagagacctttactctggacagcctgaaggctg

SEQ ID NO: 380937 - DNA, 659 bp, Homo Sapiens
actatgttgtagttggggcccagagagagcatggggccctggagctgcaaaatccggtgtaggcacagctctcctattgaaacttgcccagatgttctcagatatggtcttaaaagatgggtttcagcccagcagaagcattatctttgccagttggagtgctggagactttggatcggttggtgccactgaatggctagagggatacctttcgtccctgcatttaaaggctttcacttatattaatctggataaagcggttcttggtaccagcaacttcaaggtttctgccagcccactgttgtatacgcttattgagaaaacaatgcaaaatgtgaagcatccggttactgggcaatttctatatcaggacagcaactgggccagcaaagttgagaaactcactttagacaatgctgctttccctttccttgcatattctggaatcccagcagtttctttctgtttttgcgaggacacagattatccttatttgggtaccaccatggacacctataaggaactgattgagaggattcctgagttgaacaaagtggcacgagcagctgcagaggtcgctggtcagttcgtgattaaactaacccatgatgttgaattgaacctggactatgagaggtacaacagccaactgctttcat

SEQ ID NO: 380938 - DNA, 584 bp, Homo Sapiens
  misc_feature (434)..(434): n is a, c, g, or t
tttttttcctccccatcctgtcgcggctcgaaggatggaaaatggcggcctagacgcggagtttcctgcccgacccgcggcggctccggcggcgccatgacgcgctgggtgcccaccaagcgcgaggagaagtacggcgtggctttttataactatgatgccagaggagcggatgaactttctttacagatcggagacactgtgcacatcttagaaacatatgaagggtggtaccgaggttacacgttacgaaaaaagtctaagaagggtatatttcctgcttcatatattcatcttaaagaagcgatagttgaaggaaaagggcaacatgaaacagtcatcccgggtgacctccccctcatccaggaagtcaccacgacactccgagagtggtccaccatctggaggcagctctacgtgcaagataacagggnagaatgtttcgaagtgtgcggcacatgatctatgaccttattgaatggcgatcacaaattctttctggaactctgcctcaggatgaactcaaagaactgaagaagaaggtcacagccaaaattgattatggaaacagaattctagatttg

SEQ ID NO: 380939 - DNA, 618 bp, Homo Sapiens
ctattatataatacatttcgatctttacaataaagatacgcattcacgctgtaagtgtagttcactgtacgtgtaagaaaacagcaccactgacatgaatctcatggcagaacaactcgacatgcctatgcagccacacagtggtaacttgaaggcagcacagaggtgagggattaaaaggaaaggcagattttgaaatctgactctcaggttagctggagttacaaggcagccaacaatgattatacacaatctgcaccaaacagggaaaggacctgctgctgaaaagggaagaggggtagatcctccaatgtaaatataaacatgccatagttaacaaatgataaggatgccacatttttcatgcagaaaagaaccacaggtattcagtttcttgcatgatgattactaaagaaaacctattaaatatttggaatttagatgcaagctactcattcacacagaacttttccataaacattgttccacatattgaaaaaactgcaaaactatagcactaacttgattctacaaaaagagcattttttacaactgccatttactgtatgtgaaaacaaagacatacaaccttaaagaaagccactaccatttttcacg

SEQ ID NO: 380940 - DNA, 598 bp, Homo Sapiens
ataagctgcggttcgaaaatcctgacagcacagggcttcctgggctctgcagagcaaactggaaagagctgggatccaggcactatgttctctgaagaactgtggctggaaaatgagaaaaagtgtgctgtggttcggaagtctaagcagggcaggaaacgccaagaactgctggccgtagccttcggggtgaaggtgggtgtcaaaggcggctttctttggccccctctcaaactctttgcctgttcacagatctcctccctggttcgaagggctgccctcacacacaacgacaaccacttcaattatgagaagacacacaactttaaggtccacacgttccgaggcccacactggtgtgaatattgtgccaatttcatgtgggggctcatcgcccaaggggtccggtgctcagactgtggattgaacgtacacaaacagtgttccaagcacgttcccaatgactgccaacctgatctcaagaggatcaagaaagtgtactgttgtgacctcacaacacttgtgaaggctcacaacactcagagacccatggtggtagacatatgcatccgggaaattgaagcaagaggattaaaat

SEQ ID NO: 380941 - DNA, 587 bp, Homo Sapiens
  misc_feature (46)..(46): n is a, c, g, or t
tccaggtgctccagattagggcagagggacaccacccatcaaagancggcctcgttggagatattgtaacagcctgagacttcccagtcgcctcagttcggggcagcactgggcgatggtgtacagccctcggtctgtgagccgcctgcagccactgacagttacggtttccagcatgagacacacgttgggggtgtcctggcagagtctgcgggtcagcaccttgagggcgcggtccacgttgatggtctcgcccgtcaggcggatagtcctccagagccgcgggtcccaggccaggttgtaccagcggcggcacactcgcgcgcagcggcacagctggttggtgggcaggaaggagaagatctgcaccatggagtggtccgggagccggtctatgctggcctgctccttctggggtctggaggcgagccggatgagcgggtgtgtgaggcgggtcgggggcggggagtgcaccatggccaccgtctccccggtgatggaggacgaggaggtggacgagccccttccattctgaaatcctgggagattcggtggacatatcaggtgctgggctgggcgtgctcagt

SEQ ID NO: 380942 - DNA, 587 bp, Homo Sapiens
cttctctgtctacctctgggcgggactgccgggtgatgagatactcggtcggcgacggtagaacgggcgacggcgacaaccgcaatcacatccacgacggtgatcatggcagagaatcacgcccagaataaagccaagctcatctctgagacccggaggaggttcgaagctgagtatgtgacagataagtcagataaatatgatgcacgtgatgttgaaaggctacaacaagatgataactgggttgaaagttacttatcttggagacataatattgtagatgaaacactgaagatgctcgatgagagttttcagtggaggaaagaaatttctgtcaatgaccttaatgaatcctccattcccagatggttattggaaattggtgttatttatctccatggttatgacaaagaaggtaacagattgttctggatcagggtgaagtatcatgtaaaagaccagaaaaccatattggacaaaaagaagctcatagcattctggctggaacgttatgctaagagggaaaatgggaaacctgtaacagtgatgtttgacctgtcagaaactggaataaatagcattgacat

SEQ ID NO: 380943 - DNA, 594 bp, Homo Sapiens
gatgtgaaaggaataggagatgaattatataatccagaaacacataaacgacatactttgttttgtgggacaactgttattcagactcgtttctacactggagaactcgtcaaagccatagttgttagaacaggatttagtacttccaaaggacagcttgttcgttccatattgtatcccaaaccaactgattttaaactctacagagatgcctacttgtttctactatgtcttgtggcaggggcgggcattgcgtttatctacactattattaatagcattttaaatgaggtacaagttggggtcataattatcgagactcttgatattatcacaattactgtgccccctgcacttcctgctgcaatgactgctggtattgtgtatgctcaaagaagactgaaaaaaatcggtattttctgtatcagtcctcaaagaataaatatttgtggacagctcaatcttgtttgctttgacaagactggaactctaactgaaaatggtttaaatctttgggggattcaacgagtggaaaatgcacgatttctttcaccagaagaaaatgtgtgcaatgagatgttggtaaaatcccag

SEQ ID NO: 380944 - DNA, 583 bp, Homo Sapiens
  misc_feature (44)..(44): n is a, c, g, or t
tcaacagtctattctgagtcactgtctagaagaccacccattcntactcccccacaagtcatctgagaaggagccttactgattgtagctgttttgcgctttcgaacaggcttcatgatgctgatgacactgctgggctgcagggatggctgcagccagtaggaggtgttctccacgttggccatgtaaatgcgcaggctgccatcctcacacagcagaatcattgttgtccgctgctgctcattgcaggccgtgtgcctaatagcaaccatgtcttggatctaggaggagaggacaaaggagggtcttcgttcccacacccacagatcagcatcctcacagaaaaacaggcagagatgcaactggtttcatggtcagttgagagaaagtacagaagggtggcaaagaaaaggcatctagaagaaaaaggactgaaaatcttttatgggcctccattgaaagagctgggaaagtgaaatgaatatacaaacataaaaagagaccaggttcacagcaaagtaatgaatgggaaaatctggcactgaccttcgctttagcaggaagagtcttaatctcctggata

SEQ ID NO: 380945 - DNA, 595 bp, Homo Sapiens
caagagtgtcaccgacatttacctcctgaacctggccttgtctgatctgctgtttgtagccactttgcccttctggactcactatttgataaatgaaaagggcctccacaatgccatgtgcaaattcactaccgccttcttcttcatcggcttttttggaagcatattcttcatcaccgtcatcagcattgataggtacctggccatcgtcctggccgccaactccatgaacaaccggaccgtgcagcatggcgtcaccatcagcctaggcgtctgggcagcagccattttggtggcagcaccccagttcatgttcacaaagcagaaagaaaatgaatgccttggtgactaccccgagggtcctccagaaaatctggcccgtgccctcgcaatgtggaaacaaaattttcttggcttcctactccccctgctcattatgagttattgctacttcagaatcatccagacgctggtttcctgcaagaaccacaagaaagccaaagccattaaacggatccttctggtggtcatcgtgtttttcctcttctggacaccctacaacgttatgattttcctggagacgcttaagctctat

SEQ ID NO: 380946 - DNA, 346 bp, Homo Sapiens
atttcaccagcccctgttctcgtcagcaaaagagccgttcatttcaataaaccgggcgacctcagccatcccttcctgattttccgctttccagcgttcggcacgcagacgacgggcttcattctgcatggttgtgcttaccagaccggagatattgacatcatatatgccttgagcaactgatagctgtcgctgtcaactgtcactgtaatacgctgcttcatagcatacctctttttgacatacttcgggtatacatatcagtatatattcttataccgcaaaaatcagcgcgcaaatacgcatactgttatctggcttttagtaagccggatccacgcggcgt

SEQ ID NO: 380947 - DNA, 723 bp, Homo Sapiens
tttgtacaaaaaagttggccatgatcaggtgccagcatctgggaagggccttcttgctgtcctcccatggcagaagatggaagggcaagggagagctaacatgctcccgcaaaccctttttataatggcatcaatcaaatatgaggccagagtccttgtgacctaatcatctcccagaaggctccgcctcccaaccctgttgcattgggattaagtttccaacacatgaattgtggagacaacacattcaaaacatagcattccacaccttgggctccccagattcatgtcctcacatgcaaaataaattcattccatcccaatagcccctaaaaagtcttaacttgttccagcatcaactttaaagtcaaagtccaaagtctcatctaaatcagatatgagtgagactcaaggcatgattcatcatgagacaaaggatgtacatttgcaatgtttgtcatgtcagacaaaacaaaaatatgtaaatatccatcaatagggaactgctgaaaaatttttttgtataatcataaaatgaaacatgcagatgtttaaaccaatgagctagatctcaacgtgctgatatggaaagtgcttcagaatgtattaaggacataaattaagtgtacaataatgtgtgtgtgtgtatatatgtatatgcttacgtgtgtatggaaagtatctcagcagatacaataaaaacttaattgtgattacccctgg

SEQ ID NO: 380948 - DNA, 492 bp, Homo Sapiens
acagtggcgcctgtctaaagtatttttcacaacatgtttgataatcagtgctttaaaaagcagcagtgtcctatgaagtggaaatgtcagttctagagcattggatgtgaagttctggtcatgtcaccttgcgtgtctcaccctggaggagtgaaggtgggcgcccggcgggggggtgtggctgcaccccagcaccgggagggggcacgcacgacaccagaggaagggacagccccacccatgtcaacagcaggcaacctgtgttttcatttcaagtgggatacagtatttttttaataaggagccatacttttttttaagagtttgagatctgaatgtgatttctaattgtatcaaacgttaatgttttaaagctataacaaagtttaaaatttctactttttgtttttcatttattttaactgttcttttatctattaaattgatgtatgtggatggggaagttttgtttctcctcttaacatttgtttc

SEQ ID NO: 380949 - DNA, 625 bp, Homo Sapiens
gggctcctgtgtctacgtcatggtggggctagagagaggtccccgcagctgggctgtgttgagtgagggctcgtctcttcagcgccaggcaatagtttgtcttgtctctgtcccttttctgtgtccacatgacatttacatcttgcgagttgcataatttaagttgtttatttacattatacatttaattgcattctatagcgatgctatgttgaatgtattctgatcggatcgtttatggttatttacaatgcagttactcttgaagattattgttagaggtagactgttgatttgttttgataaaataaagcttttgtgttttaaaaaatgctttaatgttttggctttgtgtatctattagtaaatcattattgatctgatttactcaagacgaaggcatttataatttttgaaattaaaaaatgttaattgtatgtatagtcaaagattaagtagaccaaatgtttatggatatgatactttacatacattatgtttgctgaatatttcttaaatgtaattacattgaatctgattacttctgggtcacattattagacccaccaagaaacaggctgaagtcaagtcagttcccattttttcggggaattagaacataaaa

SEQ ID NO: 380950 - DNA, 839 bp, Homo Sapiens
ttggggacaccaactctccctccctgcacttaggatgttctggaaatgagaggaaatccacattcctgccccaggaggtgggaagcctggcaacgatgtagcttcccctgagatgcggtatgatcaggcctcagcaactactcaggaggcaaaggtgtttggaaagcaaaccccaaacctcccggcacggcatgtgctctgcttccgtccctcaccgcctgcacaaggtcgttgagacttttctagaactccccggggttgtatttatggccttcaagcaaacaaattgaaaagcagtcaaggaggagttcagatagaaaagtgctggagatacacatctttccttcaaaggaaatgtaatttatttccaaccgctgcctcagacgggggtttcacatgttgtgaagtcacatcttgaatgactgtcaccctcatccttccccaaaaagctaaataagggcctttggcatcaatgcgtgcattctccacctttccgcggcttgcgcttggatttctgagtggctttcttcagggagcccttgtggtcatgtgtctttaatgctgctccccatgcccccaggccaggccagcacgctcaggtgatagcgagtggggccaggaaacccccctgccctgcccagtggacagatctgccccagccctgctgtggggacgggccctctatcatttaaccacatacattagttgcttttcatcaaaatgtcagctttcctcccattatgcaggagaaagaacggccccaagcgtaatttttggtaaaaacaccaagaggcaggatcctaataatcagacaaaaactgggccttcaacaatgcaga

SEQ ID NO: 380951 - DNA, 1002 bp, Homo Sapiens
ttagagacaaaaagcagttcactttatttagcaaaataaacttaaccaatgcatttaaatatagtaaattcaagaactttggtggtttttttcttagatgcttgcttttttgccagttggagtttctgtcttctggcccaacaggcttctttccaagttaatgcagctatattccaaggaagtgttttatgaaatctgaatactcaaacaccccttctgtattttcactcaaccatcattgtattagatgatacataaggaaagtgacttagggaagtaagttcagaaggaaatgtgttcccttctccctcatattatcttttcaacagaggcctggattgctaaatggattatgaaagcaaattgctactgggaggtgatggtcaaaagcaaacttagatggttttcacaccatctgtcatcatgactcaaagggaaatgctagccacaccatttttccagtgaagccactgctttacacagaagatacacatagcttcctattgttattttcttttctaattatgtacatttagaaaaaaaatacaacactgtgttaaacagcaggacagctagcaatggaacatacaacactatgctgaaaaaccacaacagcttggttaagcggaggagagaaacagagatggccttcatggagtgaagctgtcaatgcctgccatctccttagtctgtgacggatctgcactctgagggcaggccttctgagcgccgccactttgccaggcgctgcttaaaccatttctgggtctcctcctcggaaaggcctgcctcggccgcgatgaggcacagcgtggtggaatccgggtgcttgtcgaccttgttgaagttgtactccaggatttccacctggtcctctgtggggccgctcgcggtctccgccgacatggtccctgcgcgctgcggggcagggagaagcggcggcggtgagcgaggcgtggagcgggcgggacgcagcgaaggaaggcggtcgcggcgccccaa

SEQ ID NO: 380952 - DNA, 908 bp, Homo Sapiens
ttgggtttgtggcagagtacgagcccgtgctgatcgagatcctggtggaggtgatggatccttccttcgtgtgcttgaaaattggagcctgcccctcggcccataagcccttgttgggaactgagaagtgtatatggggcccaagctactggtgccagaacacagagacagcagcccagtgcaatgctgtcgagcattgcaaacgccatgtgtggaactaggaggaggaatattccatcttggcagaaaccacagcattggtttttttctacttgtgtgtctgggggaatgaacgcacagatctgtttgactttgttataaaaatagggctcccccacctcccccatttctgtgtcctttattgtagcattgctgtctgcaagggagcccctagcccctggcagacatagctgcttcagtgccccttttctctctgctagatggatgttgatgcactggaggtcttttagcctgcccttgcatggcgcctgctggaggaggagagagctctgctggcatgagccacagtttcttgactggaggccatcaaccctcttggttgaggccttgttctgagccctgacatgtgcttgggcactggtgggcctgggcttctgaggtggcctcctgccctgatcagggaccctccccgctttcctgggcctctcagttgaacaaagcagcaaaacaaaggcagttttatatgaaagattagaagcctggaataatcaggctttttaaatgatgtaattcccactgtaatagcatagggattttggaagcagctgctggtggcttgggacatcagtggggccaagggttctctgtccctggttcaactgtgatttggctttcccgtgtctttcctggtgatgccttgtttggggttctgtgggtttgggtgggaa

SEQ ID NO: 380953 - DNA, 475 bp, Homo Sapiens
tgtacaaaaaagttgggttgaagacagcctctccaaacacagctccagcagccacatttgcaaccttggccatctgtccagaacctgctcccacctcaggcccacgccaaccgtgcactgctgcaatgggctctgagctggagacggcgatggacaccctcatcaacgtgttccacgcccactcgggcaaagagggggacaagtacaagctgagcaagaaggagctgaaagagctgctgcagacggagctctctggcttcctggatgcccagaaggatgtggatgctgtggacaaggtgatgaaggagctagacgagaatggagacggggaggtggacttccaggagtatgtggtgcttgtggctgctctcacagtggcctgtaacaatttcttctgggagaacagttgagcagacagccacattgggcagcgcccttcctctccaccctcccagacctgcctcttccccctgct

SEQ ID NO: 380954 - DNA, 733 bp, Homo Sapiens
tttgtacaaaaagttggcgctgctgtagccggtaccctttgccttcgccactgctcagcgtctgcacatccctacaatggctaaaacagcaatggcctacaaggaaaaaatgaaggagctgtccatgctgtcactgatctgctcttgcttttacccggaacctcgcaacatcaacatctatacttacgatgatatggaagtgaagcaaatcaacaaacgtgcctctggccaggcttttgagctgatcttgaagccaccatctcctatctcagaagccccacgaactttagcttctccaaagaagaaagacctgtccctggaggagatccagaagaaactggaggctgcagaggaaagaagaaagtctcaggaggcccaggtgctgaaacaattggcagagaagagggaacacgagcgagaagtccttcagaaggctttggaggagaacaacaacttcagcaagatggcggaggaaaagctgatcctgaaaatggaacaaattaaggaaaaccgtgaggctaatctagctgctattattgaacgtctgcaggaaaaggagaggcatgctgcggaggtgcgcaggaacaaggaactccaggttgaactgtctggctgaagcaagggagggtctggcacgccccaccaatagtaaatccccctgcctatattataatggatcatgcgatatcaggatgggggaatgtatgacatggtttaaaaagaactcattatt

SEQ ID NO: 380955 - DNA, 676 bp, Homo Sapiens
ttgggactggaggggacgctggtagagatggaggaggaggcaattgggatggcgctaggcatacaagtaggggttgtgggtgaccagttgcacttggcctctggattgtgggaattaaggaagtgactcatcctcttgaagatgctgaaacaggagagaaaggggatgtatccatgggggcagggcatgactttgtcccatttctaaaggcctcttccttgctgtgtcataccaggccgccccagcctctgagcccctgggactgctgcttcttaaccccagtaagccactgccacacgtctgaccctctccaccccatagtgaccggctgcttttccctaagccaagggcctcttgcggtcccttcttactcacacacaaaatgtacccagtattctaggtagtgccctattttacaattgtaaaactgaggcacgagcaaagtgaagacactggctcatattcctgcagcctggaggccgggtgctcagggctgacacgtccaccccagtgcacccactctgctttgactgagcagactggtgagcagactggtgggatctgtgcccagagatgggactgggagggcccacttcagggttctcctctcccctctaaggccgaagaagggtccttccctctccccaagacttggtgtcctttccctccactcctt

SEQ ID NO: 380956 - DNA, 1449 bp, Homo Sapiens
ttggagcaggatggagaggagacgcatcacctccgctgctcgccgctcctacgtctcctcaggggagatgatggtggggggcctggctcctggccgccgtctgggtcctggcacccgcctctccctggctcgaatgccccctccactcccgacccgggtggatttctccctggctggggcactcaatgctggcttcaaggagacccgggccagtgagcgggcagagatgatggagctcaatgaccgctttgccagctacatcgagaaggttcgcttcctggaacagcaaaacaaggcgctggctgctgagctgaaccagctgcgggccaaggagcccaccaagctggcagacgtctaccaggctgagctgcgagagctgcggctgcggctcgatcaactcaccgccaacagcgcccggctggaggttgagagggacaatctggcacaggacctggccactgtgaggcagaagctccaggatgaaaccaacctgaggctggaagccgagaacaacctggctgcctatagacaggaagcagatgaagccaccctggcccgtctggatctggagaggaagattgagtcgctggaggaggagatccggttcttgaggaagatccacgaggaggaggttcgggaactccaggagcagctggcccgacagcaggtccatgtggagcttgacgtggccaagccagacctcaccgcagccctgaaagagatccgcacgcagtatgaggcaatggcgtccagcaacatgcatgaagccgaagagtggtaccgctccaagtttgcagacctgacagacgctgctgcccgcaacgcggagctgctccgccaggccaagcacgaagccaacgactaccggcgccagttgcagtccttgacctgcgacctggagtctctgcgcggcacgaacgagtccctggagaggcagatgcgcgagcaggaggagcggcacgtgcgggaggcggccagttatcaggaggcgctggcgcggctggaggaagaggggcagagcctcaaggacgagatggcccgccacttgcaggagtaccaggacctgctcaatgtcaagctggccctggacatcgagatcgccacctacaggaagctgctagagggcgaggagaaccggatcaccattcccgtgcagaccttctccaacctgcagattcgagaaaccagcctggacaccaagtctgtgtcagaaggccacctcaagaggaacatcgtggtgaagaccgtggagatgcgggatggagaggtcattaaggagtccaagcaggagcacaaggatgtgatgtgaggcagacccacctggtggcctctgccccgtctcatgaggggcccgagcagaagcacgatagttgctccgcctctgctggcacatttccccagacctgagctccccaccaccccagctgctcccctccctcctctgtccct

SEQ ID NO: 380957 - DNA, 706 bp, Homo Sapiens
ttggcgcggcgtgagaagccatgagcagcaaagtctctcgcgacaccctgtacgaggcggtgcgggaagtcctgcacgggaaccagcgcaagcgccgcaagttcctggagacggtggagttgcagatcagcttgaagaactatgatccccagaaggacaagcgcttctcgggcaccgtcaggcttaagtccactccccgccctaagttctctgtgtgtgtcctgggggaccagcagcactgtgacgaggctaaggccgtggatatcccccacatggacatcgaggcgctgaaaaaactcaacaagaataaaaaactggtcaagaagctggccaagaagtatgatgcgtttttggcctcagagtctctgatcaagcagattccacgaatcctcggcccaggtttaaataaggcaggaaagttcccttccctgctcacacacaacgaaaacatggtggccaaagtggatgaggtgaagtccacaatcaagttccaaatgaagaaggtgttatgtctggctgtagctgttggtcacgtgaagatgacagacgatgagcttgtgtataacattcacctggctgtcaacttcttggtgtcattgctcaagaaaaactggcagaatgtccgggccttatatatcaagagcaccatgggcaagccccagcgcctatattaaggcacatttgaataaattctattaccagttta

SEQ ID NO: 380958 - DNA, 912 bp, Homo Sapiens
tccacaaacccaaaccccaaactctctagcaaaacaagacccccttgatgtataaagtcatcgctgacaggacagtctttttcagttattgcttttgtcgcttgtttcttgagaacatgactccaataaggctcatggctgccaagcccattcctgcaacgcttgcagcgatgatgacatctctgacctggtcactgcgggcgactccatagcgcagctcattcacaaagtgctcgcagttctcactggtcagcttgtagagcacctcctgccccaccagctcctccgcccgctggatgattttgctgcagggcagcggcgagtacttgtcatcatgtttgttgttgacctggtacttgtcactcccggccacatcatacagcaattccttcttcacgatggccttgtcagtcagggcggacatgacactggctgcaccagctcctgcgacctcacttggaggggccagatgaaccacatatccatcgccaacatagatggcccagtgtctgtagaaagggcgaaaaatctcaatcaggtctccaggcttaggctctggaatgggcgcacgcatcttccctcgcggtgtggaccctcaaggccaggctcgatttcactgcgtagatgtctgaggcagggggagcagggatttattgtcattaacaggaaactgcgtctccagaccccacgggactgcggcttctgttgggcagggcgtgagaggcgcgcctcggaccccaggaacaaccacctcgctccctttaacaactttctcgccggggcccggcgggcgcccaggaggctgcaggtgccagcgggcggctcggcaggctagtctacacccgccctacccaattagatctcttcctcgcggaaggggagaagcatcccaggcacctcgcccggccccaa

SEQ ID NO: 380959 - DNA, 775 bp, Homo Sapiens
tcagtgctgagaccaagaggaaggaggaggagaggggtctgcagagatggtgaggacgaaagaaggggaaagggtggagaatcgcagggtgggtgcccacctcccctccactctgcatcttaaagacagtagtggatcctccagatcctcccctgaggctggagaagggaggagagtgaaattaaggcatttccccccaaatcagctgaaaccaaggcaccgacttcccgttccctcctcactcggggagccccagaactggagagtactgtctgggcccccgtgcccaccttgagctggcccaggctccaaggaggaaaaggacagacagaatgcaggaaaatgggtggagggacacatgggacagggctgggaagacaccaccaccccctgcagagggagcaggcttctagagctgaggtggaagccacagggctgggggcctgaggcagcgtagaggagcaggaggggcaaggctgagagacccacacggcacaccttgttgaatgtgtgactttttgtttttaatagaaaaaataaacaaaatcacaatggtgaagcccagagggatgggggccggggcgtcacagggcaggctcctgctccatgggctcctctgccggcctggggctgtgttcccgggctgccgcagcctgggcctgctcggcccccaccgacagcaaggccatggcgctcacagtctcggcctcctcggtctcacctgcttgggcctctcgcagggaccggcccagaccccaacttttttgtacaaagt

SEQ ID NO: 380960 - DNA, 950 bp, Homo Sapiens
ttggctgagccgccgccgaggattcagcagcctcccccttgagccccctcgcttcccgacgttccgttcccccctgcccgccttctcccgccaccgccgccgccgccttccgcaggccgtttccaccgaggaaaaggaatcgtatcgtatgtccgctatccagaacctccactctttcgacccctttgctgatgcaagtaagggtgatgacctgcttcctgctggcactgaggattatatccatataagaattcaacagagaaacggcaggaagacccttactactgtccaagggatcgctgatgattacgataaaaagaaactagtgaaggcgtttaagaaaaagtttgcctgcaatggtactgtaattgagcatccggaatatggagaagtaattcagctacagggtgaccaacgcaagaacatatgccagttcctcgtagagattggactggctaaggacgatcagctgaaggttcatgggttttaagtgcttgtggctcactgaagcttaagtgaggatttccttgcaatgagtagaatttcccttctctcccttgtcacaggtttaaaaacctcacagcttgtataatgtaaccatttggggtccgcttttaacttggactagtgtaactccttcatgcaataaactgaaaagagccatgctgtctagtcttgaagtccctcatttaaacagaggtcaagcaataggcgcctggcagtgtcaagcctgaaaccaagcaataccgtcatgtttcagccaagcccagagccctaagattacaaacaactatggccggaacctcctcagctctccctctgcagagttccctaccctaagagaatgttaccacctgaacagtcctcggtgaatctgagaggagaggatggggtaaggcagatgcaccagctgtactactagaaggagcttttggtggtagatcccctgg

SEQ ID NO: 380961 - DNA, 1482 bp, Homo Sapiens
  misc_feature (1032)..(1040): n is a, c, g, or t
ttggtgcctggatacagcacagtgtgtttatcccttcagcccctcaagagcattcaggttgtttgaaggttttagtgaaatctagtgggtttagctgctatgaacattcatgtactggttattgtataaacataagtttttattaaaatttaaattacttttccctcaaaagattggtggccaatatattcattatagaagccatttccaaaagcatgtaatttatcctttagtatttaaagcaggaaatggaattacagggtcatatggactcacaccacccggcaagaactgctcactatggctccctgccccagaagtcacacggccggacccaagatgaaaaccccgtagtccacttcttcaagaacattgtgacgcctcgcacaccacccccgtcgcagggaaagggggccgaaggccagagaccaggatttggctacggaggcagagcgtccgactataaatcggctcacaagggattcaagggagtcgatgcccagggcacgctttccaaaatttttaagctgggaggaagagatagtcgctctggatcacccatggctagacgctgaaaacccacctggttccggaatcctgtcctcagcttcttaatataactgccttaaaactttaatcccacttgcccctgttacctaattagagcagatgacccctcccctaatgcctgcggagttgtgcacgtagtagggtcaggccacggcagcctaccggcaatttccggccaacagttaaatgagaacatgaaaacagaaaacggttaaaactgtccctttctgtgtgaagatcacgttccttcccccgcaatgtgcccccagacgcacgtgggtcttcagggggccaggtgcacagacgtccctccacgttcacccctccacccttggactttcttttcgccgtggctgcggcacccttgcgcttttgctggtcactgccatggaggcacacagctgcagagacagagaggacgtgggcggcagagaggactgttgacatccaagcttcctttgnnnnnnnnncctgtccttctctcacctcctaaagtagacttcatttttcctaacaggattagacagtcaaggagtggcttactacatgtgggagcttttggtatgtgacatgcgggctgggcagctgttagagtccaacgtggggcagcacagagagggggccacctccccaggccgtggctgcccacacaccccaattagctgaattcgcgtgtggcagagggaggaaaaggaggcaaacgtgggctgggcaatggcctcacataggaaacagggtcttcctggagatttggtgatggagatgtcaagcaggtggcctctggacgtcaccgttgccctgcatggtggccccagagcagcctctatgaacaacctcgtttccaaaccacagcccacagccggagagtccaggaagacttgcgcactcagagcagaaagtaggagtcctcta

SEQ ID NO: 380962 - DNA, 1604 bp, Homo Sapiens
  misc_feature (1023)..(1031): n is a, c, g, or t
tgagcaatgcttttttttaatggccaactttgtacaaaaaagttggagaagacagtgcagccacctccgagagcctggatgtgatggcgtcacagaagagaccctcccagaggcacggatccaagtacctggccacagcaagtaccatggaccatgccaggcatggcttcctcccaaggcacagagacacgggcatccttgactccatcgggcgcttctttggcggtgacaggggtgcgcccaagcggggctctggcaaggactcacaccacccggcaagaactgctcactacggctccctgccccagaagtcacacggccggacccaagatgaaaaccccgtagtccacttcttcaagaacattgtgacgcctcgcacaccacccccgtcgcagggaaagggggccgaaggccagagaccaggatttggctacggaggcagagcgtccgactataaatcggctcacaagggattcaagggagtcgatgcccagggcacgctttccaaaatttttaagctgggaggaagagatagtcgctctggatcacccatggctagacgctgaaaacccacctggttccggaatcctgtcctcagcttcttaatataaccgccttaaaactttaatcccacttgcccctgttacctaattagagcagatgacccctcccctaatgcctgcggagttgtgcacgtagtagggtcaggccacggcagcctaccggcaatttccggccaacagttaaatgagaacatgaaaacagaaaacggttaaaactgtccctttctgtgtgaagatcacgttccttcccccgcaatgtgcccccagacgcacgtgggtcttcagggggccaggtgcacagacgtccctccacgttcacccctccacccttggactttcttttcgccgtggctgcggcacccttgcgcttttgctggtcactgccatggaggcacacagctgcagagacagagaggacgtgggcggcagagaggactgttgacatccaagcttcctttgnnnnnnnnncctgtccttctctcacctcctaaagtagacttcatttttcctaacaggattagacagtcaaggagtggcttactacatgtgggagcttttggtatgtgacatgcgggctgggcagctgttagagtccaacgtggggcagcacagagagggggccacctccccaggccgtggctgcccacacaccccaattagctgaattcgcgtgtggcagagggaggaaaaggaggcaaacgtgggctgggcaatggcctcacataggaaacagggtcttcctggagatttggtgatggagatgtcaagcaggtggcctctggacgtcaccgttgccctgcatggtggccccagagcagcctctatgaacaacctcgtttccaaaccacagcccacagccggagagtccaggaagacttgcgcactcagagcagaagggtaggagtcctctagacagcctcgcagccgcgccagtcgcccatagacactggctgtgaccgggcgtgctggcagcggcagtgcacagtggccagcactaaccctctctgagaagataaccggctcattcacttcctcccagaa

SEQ ID NO: 380963 - DNA, 1175 bp, Homo Sapiens
  misc_feature (1025)..(1033): n is a, c, g, or t
actttgtacaaaaaagttggctgagtccgacgagctccagaccatccaagaagacagtgcagccacctccgagagcctggatgtgatggcgtcacagaagagaccctcccagaggcacggatccaagtacctggccacagcaagtaccatggaccatgccaggcatggcttcctcccaaggcacagagacacgggcatccttgactccatcgggcgcttctttggcggtgacaggggtgcgcccaagcggggctctggcaaggactcacaccacccggcaagaactgctcactacggctccctgccccagaagtcacacggccggacccaagatgaaaaccccgtagtccacttcttcaagaacattgtgacgcctcgcacaccacccccgtcgcagggaaagggggccgaaggccagagaccaggatttggctacggaggcagagcgtccgactataaatcggctcacaagggattcaagggagtcgatgcccagggcacgctttccaaaatttttaagctgggaggaagagatagtcgctctggatcacccatggctagacgctgaaaacccacctggttccggaatcctgtcctcagcttcttaatataaccgccttaaaactttaatcccacttgcccctgttacctaattagagcagatgacccctcccctaatgcctgcggagttgtgcacgtagtagggtcaggccacggcagcctaccggcaatttccggccaacagttaaatgagaacatgaaaacagaaaacggttaaaactgtccctttctgtgtgaagatcacgttccttcccccgcaatgtgcccccagacgcacgtgggtcttcagggggccaggtgcacagacgtccctccacgttcacccctccacccttggactttcttttcgccgtggctgcggcacccttgcgcttttgctggtcactgccatggaggcacacagctgcagagacagagaggacgtgggcggcagagaggactgttgacatccaagcttcctttgnnnnnnnnncctgtccttctctcacctcctaaagtagacttcatttttcctaacaggattagacagtcaaggagtggcttactacatgtgggagcttttggtatgtgacatgcgggctgggcagctgttagagtccaacgtggggcagcac

SEQ ID NO: 380964 - DNA, 1513 bp, Homo Sapiens
  misc_feature (1035)..(1043): n is a, c, g, or t
cccaaaaatgccaactttgtacaaaaaagttgggtgcagccacctccgagagcctggatgtgatggcgtcacagaagagaccctcccagaggcacggatccaagtacctggccacagcaagtaccatggaccatgccaggcatggcttcctcccaaggcacagagacacgggcatccttgactccatcgggcgcttctttggcggtgacaggggtgcgcccaagcggggctctggcaaggactcacaccacccggcaagaactgctcactacggctccctgccccagaagtcacacggccggacccaagatgaaaaccccgtagtccacttcttcaagaacattgtgacgcctcgcacaccacccccgtcgcagggaaaggggagaggactgtccctgagcagatttagctggggggccgaaggccagagaccaggatttggctacggaggcagagcgtccgactataaatcggctcacaagggattcaagggagtcgatgcccagggcacgctttccaaaatttttaagctgggaggaagagatagtcgctctggatcacccatggctagacgctgaaaacccacctggttccggaatcctgtcctcagcttcttaatataaccgccttaaaactttaatcccacttgcccctgttacctaattagagcagatgacccctcccctaatgcctgcggagttgtgcacgtagtagggtcaggccacggcagcctaccggcaatttccggccaacagttaaatgagaacatgaaaacagaaaacggttaaaactgtccctttctgtgtgaagatcacgttccttcccccgcaatgtgcccccagacgcacgtgggtcttcagggggccaggtgcacagacgtccctccacgttcacccctccacccttggactttcttttcgccgtggctgcggcacccttgcgcttttgctggtcactgccatggaggcacacagctgcagagacagagaggacgtgggcggcagagaggactgttgacatccaagcttcctttgnnnnnnnnncctgtccttctctcacctcctaaagtagacttcatttttcctaacaggattagacagtcaaggagtggcttactacatgtgggagcttttggtatgtgacatgcgggctgggcagctgttagagtccaacgtggggcagcacagagagggggccacctccccaggccgtggctgcccacacaccccaattagctgaattcgcgtgtggcagagggaggaaaaggaggcaaacgtgggctgggcaatggcctcacataggaaacagggtcttcctggagatttggtgatggagatgtcaagcaggtggcctctggacgtcaccgttgccctgcatggtggccccagagcagcctctatgaacaacctcgtttccaaaccacagcccacagcccggagagtccaggaagacttgcgcactcagagcagaaggtagagtcctctagacagcctcgcagccgcgccagtcgccc

SEQ ID NO: 380965 - DNA, 1240 bp, Homo Sapiens
  misc_feature (104)..(112): n is a, c, g, or t
gccaactttgtacaaaaaagttggctgccatggaggcacacagctgcagagacagagaggacgtgggcggcagagaggactgttgacatccaagcttcctttgnnnnnnnnncctgtccttctctcacctcctaaagtagacttcatttttcctaacaggattagacagtcaaggagtggcttactacatgtgggagcttttggtatgtgacatgcgggctgggcagctgttagagtccaacgtggggcagcacagagagggggccacctccccaggccgtggctgcccacacaccccaattagctgaattcgcgtgtggcagagggaggaaaaggaggcaaacgtgggctgggcaatggcctcacataggaaacagggtcttcctggagatttggtgatggagatgtcaagcaggtggcctctggacgtcaccgttgccctgcatggtggccccagagcagcctctatgaacaacctcgtttccaaaccacagcccacagccggagagtccaggaagacttgcgcactcagagcagaagggtaggagtcctctagacagcctcgcagccgcgccagtcgcccatagacactggctgtgaccgggcgtgctggcagcggcagtgcacagtggccagcactaaccctccctgagaagataaccggctcattcacttcctcccagaagacgcgtggtagcgagtaggcacaggcgtgcacctgctcccgaattactcaccgagacacacgggctgagcagacggccccgtggatggagacaaagagctcttctgaccatatccttcctaacacccgctggcatctcctttcgcgcctccctcactaacctactgacccaccttttgattttagcgcacctgtgattgataggccttccaaagagtcccacgctggcatcgccctccccgaggacggagatgaggagtagtcagcgtgatgccaaaacgcgtcttcttaatccaattctaattctgaatgtttcgtgtgggcttaataccatgtctattaatatatagcctcgatgatgagagggttacaaagaacaaaactccagacacaaacctccaaatttttcagcagaagcactctgcgtcgctgagctgaggtcggctctgcgatccatacgtggccgcacccacacagcacgtgctgtgacgatggctgaacggaaagtgtacactgttcctgaatattgaaataaaacaataaacttttaagaaa

SEQ ID NO: 380966 - DNA, 1287 bp, Homo Sapiens
  misc_feature (1042)..(1050): n is a, c, g, or t
ttgtacaaaaaagttggctccagaccatccaaaaaagacagtgcagccacctccgagagcctggatgtgatggcgtcacagaagagaccctcccagaggcacggatccaagtacctggccacagcaagtaccatggaccatgccaggcatggcttcctcccaaggcacagagacacgggcatccttgactccatcgggcgcttctttggcggtgacaggggtgcgcccaagcggggctctggcaaggactcacaccacccggcaagaactgctcactacggctccctgccccagaagtcacacggccggacccaagatgaaaaccccgtagtccacttcttcaagaacattgtgacgcctcgcacaccacccccgtcgcagggaaaggggagaggactgtccctgagcagatttagctggggggccgaaggccagagaccaggatttggctacggaggcagagcgtccgactataaatcggctcacaagggattcaagggagtcgatgcccagggcacgctttccaaaatttttaagctgggaggaagagatagtcgctctggatcacccatggctagacgctgaaaacccacctggttccggaatcctgtcctcagcttcttaatataaccgccttaaaactttaatcccacttgcccctgttacctaattagagcagatgacccctcccctaatgcctgcggagttgtgcacgtagtagggtcaggccacggcagcctaccggcaatttccggccaacagttaaatgagaacatgaaaacagaaaacggttaaaactgtccctttctgtgtgaagatcacgttccttcccccgcaatgtgcccccagacgcacgtgggtcttcagggggccaggtgcacagacgtccctccacgttcacccctccacccttggactttcttttcgccgtggctgcggcacccttgcgcttttgctggtcactgccatggaggcacacagctgcagagacagagaggacgtgggcggcagagaggactgttgacatccaagcttcctttgnnnnnnnnncctgtccttctctcacctcctaaagtagacttcatttttcctaacaggattagacagtcaaggagtggcttactacatgtgggagcttttggtatgtgacatgcgggctgggcagctgttagagtccaacgtggggcagcacagagagggggccacctccccaggccgtggctgcccacacaccccaattagctgaattcgcgtgtggcagagggaggaaaaggaggcaaacgtggg

SEQ ID NO: 380967 - DNA, 1380 bp, Homo Sapiens
  misc_feature (1032)..(1040): n is a, c, g, or t
gccaactttgtacaaaaaagttggaagacagtgcagccacctccgagagcctggatgtgatggcgtcacagaagagaccctcccagaggcacggatccaagtacctggccacagcaagtaccatggaccatgccaggcatggcttcctcccaaggcacagagacacgggcatccttgactccatcgggcgcttctttggcggtgacaggggtgcgcccaagcggggctctggcaaggactcacaccacccggcaagaactgctcactacggctccctgccccagaagtcacacggccggacccaagatgaaaaccccgtagtccacttcttcaagaacattgtgacgcctcgcacaccacccccgtcgcagggaaaggggagaggactgtccctgagcagatttagctggggggccgaaggccagagaccaggatttggctacggaggcagagcgtccgactataaatcggctcacaagggattcaagggagtcgatgcccagggcacgctttccaaaatttttaagctgggaggaagagatagtcgctctggatcacccatggctagacgctgaaaacccacctggttccggaatcctgtcctcagcttcttaatataaccgccttaaaactttaatcccacttgcccctgttacctaattagagcagatgacccctcccctaatgcctgcggagttgtgcacgtagtagggtcaggccacggcagcctaccggcaatttccggccaacagttaaatgagaacatgaaaacagaaaacggttaaaactgtccctttctgtgtgaagatcacgttccttcccccgcaatgtgcccccagacgcacgtgggtcttcagggggccaggtgcacagacgtccctccacgttcacccctccacccttggactttcttttcgccgtggctgcggcacccttgcgcttttgctggtcactgccatggaggcacacagctgcagagacagagaggacgtgggcggcagagaggactgttgacatccaagcttcctttgnnnnnnnnncctgtccttctctcacctcctaaagtagacttcatttttcctaacaggattagacagtcaaggagtggcttactacatgtgggagcttttggtatgtgacatgcgggctgggcagctgttagagtccaacgtggggcagcacagagagggggccacctccccaggccgtggctgcccacacaccccaattagctgaattcgcgtgtggcagagggaggaaaaggaagcaaacgtgggctgggcaatggcctcacataggaaacagggtcttgctgtagatttggtgatggagatgtcaagcacgtggcctctggacgtcaccgttgccctgcatggtggc

SEQ ID NO: 380968 - DNA, 1291 bp, Homo Sapiens
  misc_feature (999)..(1007): n is a, c, g, or t
ctttgtacaaaaaagttggggatgtgatggcgtcacagaagagaccctcccagaggcacggatccaagtacctggccacagcaagtaccatggaccatgccaggcatggcttcctcccaaggcacagagacacgggcatccttgactccatcgggcgcttctttggcggtgacaggggtgcgcccaagcggggctctggcaaggactcacaccacccggcaagaactgctcactacggctccctgccccagaagtcacacggccggacccaagatgaaaaccccgtagtccacttcttcaagaacattgtgacgcctcgcacaccacccccgtcgcagggaaaggggagaggactgtccctgagcagatttagctggggggccgaaggccagagaccaggatttggctacggaggcagagcgtccgactataaatcggctcacaagggattcaagggagtcgatgcccagggcacgctttccaaaatttttaagctgggaggaagagatagtcgctctggatcacccatggctagacgctgaaaacccacctggttccggaatcctgtcctcagcttcttaatataactgccttaaaactttaatcccacttgcccctgttacctaattagagcagatgacccctcccctaatgcctgcggagttgtgcacgtagtagggtcaggccacggcagcctaccggcaatttccggccaacagttaaatgagaacatgaaaacagaaaacggttaaaactgtccctttctgtgtgaagatcacgttccttcccccgcaatgtgcccccagacgcacgtgggtcttcagggggccaggtgcacagacgtccctccacgttcacccctccacccttggactttcttttcgccgtggctgcggcacccttgcgcttttgctggtcactgccatggaggcacacagctgcagagacagagaggacgtcggcggcagagaggactgttgacatccaagcttcctttgnnnnnnnnncctgtccttctctcacctcctaaagtagacttcatttttcctaacaggattagacagtcaaggagtggcttactacatgtgggagcttttggtatgtgacatgcgggctgggcagctgttagagtccaacgtggggcagcacagagagggggccacctccccaggccgtggctgcccacacaccccaattagctgaattcgcgtgtggcagagggaggaaaaggaggcaaacgtgggctgggcaatggcctcacataggaaacagggtcttcctggagatttgg

SEQ ID NO: 380969 - DNA, 1404 bp, Homo Sapiens
  misc_feature (1021)..(1029): n is a, c, g, or t
ttggagaagacagtgcagccacctccgagagcctggatgtgatggcgtcacagaagagaccctcccagaggcacggatccaagtacctggccacagcaagtaccatggaccatgccaggcatggcttcctcccaaggcacagagacacgggcatccttgactccatcgggcgcttctttggcggtgacaggggtgcgcccaagcggggctctggcaaggactcacaccacccggcaagaactgctcactacggctccctgccccagaagtcacacggccggacccaagatgaaaaccccgtagtccacttcttcaagaacattgtgacgcctcgcacaccacccccgtcgcagggaaaggggagaggactgtccctgagcagatttagctggcgtgaagggggccgaaggccagagaccaggatttggctacggaggcagagcgtccgactataaatcggctcacaagggattcaagggagtcgatgcccagggcacgctttccaaaatttttaagctgggaggaagagatagtcgctctggatcacccatggctagacgctgaaaacccacctggttccggaatcctgtcctcagcttcttaatataaccgccttaaaactttaatcccacttgcccctgttacctaattagagcagatgacccctcccctaatgcctgcggagttgtgcacgtagtagggtcaggccacggcagcctaccggcaatttccggccaacagttaaatgagaacatgaaaacagaaaacggttaaaactgtccctttctgtgtgaagatcacgttccttcccccgcaatgtgcccccagacgcacgtgggtcttcagggggccaggtgcacagacgtccctccacgttcacccctccacccttggactttcttttcgccgtggctgcggcacccttgcgcttttgctggtcactgccatggaggcacacagctgcagagacagagaggacgtgggcggcagagaggactgttgacatccaagcttcctttgnnnnnnnnncctgtccttctctcacctcctaaagtagacttcatttttcctaacaggattaaacagtcaaggagtggcttactacatgtgggagcttttggtatgtgacatgcgggctgggcagctgttatagtccaacgtggggcagcacagagagagggccacctccccaggccgtggctgcccacacaccccaatagctgaattcccgtgtgggcgagggaggaaagggaggcaaacgtgggctgggcaatgggcttccataggaaacaaggtcttcctgggaaatttggtgatggagatgtcagcatgtggcctcctggacgtcaccgttgctctgctggtggcccaaagcagcctctatgacaacctcgtttccaaacc

SEQ ID NO: 380970 - DNA, 1034 bp, Homo Sapiens
  misc_feature (545)..(553): n is a, c, g, or t
caaattgatgagcaatgcttcaataaaaggccaactttgtacaaaaaagttgggacaatatcgctggaccccccgcggatgcatggaggctcgcccggtgggggggccgtgggtcggggccttcttgctatagctgcctatctaatttcaactcaattgtccctgttacccgcggaagcgccatgacccctcccccaatgcgggcgcacatgggcccttaaaaaggccagggcccaggggccaaccggtgctttggcgccaggggggaagtggtaacatgaaaacagaaaacggttaaaactgtccctttctgtgtgaagatcacgttccttcccccgcaatgtgcccccagacgcacgtgggtcttcagggggccaggtgcacagacgtccctccacgttcacccctccacccttggactttcttttcgccgtggctgcggcacccttgcgcttttgctggtcactgccatggaggcacacagctgcagagacagagaggacgtgggcggcagagaggactgttgacatccaagcttcctttgnnnnnnnnncctgtccttctctcacctcctaaagtagacttcatttttcctaacaggattagacagtcaaggagtggcttactacatgtgggagcttttggtatgtgacatgcgggctgggcagctgttagagtccaacgtggggcagcacagagagggggccacctccccaggccgtggctgcccacacaccccaattagctgaattcgcgtgtggcagagggaggaaaaggaggcaatggcctcacataggaaacagggtcttcctggagatttggtgatggagatgtcaagcaggtggcctctggacgtcaccgttgccctgcatggtggccccagagcagcctctatgaacaacctcgtttccaaaccacagcccacagccggagagtccaggaagacttgcgcactcagagcagaagggtaggagtcctctagacagcctcgcagccgcgccagtcgcccataacactggctgtgaccgggcgtg

SEQ ID NO: 380971 - DNA, 1224 bp, Homo Sapiens
  misc_feature (1001)..(1009): n is a, c, g, or t
ttgtacaaaaaagttggtggatgtgatgcgctataagaagaagagaccctcccagaggcacggatccaagtacctggccacagcaagtaccatggaccatgccaggcatggcttcctcccaaggcacagagacacgggcatccttgactccatcgggcgcttctttggcggtgacaggggtgcgcccaagcggggctctggcaaggactcacaccacccggcaagaactgctcactacggctccctgccccagaagtcacacggccggacccaagatgaaaaccccgtagtccacttcttcaagaacattgtgacgcctcgcacaccacccccgtcgcagggaaaggggagaggactgtccctgagcagatttagctggggggccgaaggccagagaccaggatttggctacggaggcagagcgtccgactataaatcggctcacaagggattcaagggagtcgatgcccagggcacgctttccaaaatttttaagctgggaggaagagatagtcgctctggatcacccatggctagacgctgaaaacccacctggttccggaatcctgtcctcagcttcttaatataaccgccttaaaactttaatcccacttgcccctgttacctaattagagcagatgacccctcccctaatgcctgcggagttgtgcacgtagtagggtcaggccacggcagcctaccggcaatttccggccaacagttaaatgagaacatgaaaacagaaaacggttaaaactgtccctttctgtgtgaagatcacgttccttcccccgcaatgtgcccccagacgcacgtgggtcttcagggggccaggtgcacagacgtccctccacgttcacccctccacccttggactttcttttcgccgtggctgcggcacccttgcgcttttgctggtcactgccatggaggcacacagctgcagagacagagaggacgtgggcggcagagaggactgttgacatccaagcttcctttgnnnnnnnnncctgtccttctctcacctcctaaagtagacttcatttttcctaacaggattagacagtcaaggagtggcttactacatgtgggagcttttggtatgtgacatgcgggctgggcagctgttagagtccacgtggggcagcacagagagggggccacctccccaagccgtggctgcccacacaccccaattaactgaattcgcgtgtggcagaggga

SEQ ID NO: 380972 - DNA, 914 bp, Homo Sapiens
  misc_feature (227)..(236): n is a, c, g, or t
ctcctttcctccctctgccacacgcgaattcagctaattggggtgtgtgggcagccacggcctgggggaggtggccccctctctgtgctgccccacgttggactctaacagctgcccagcccgcatgtcacataccaaaagctcccacatgtagtaagccactccttgactgtctaatcctgttaggaaaaatgaagtctactttaggaggtgagagaaggacaggnnnnnnnnnncaaaggaagcttggatgtcaacagtcctctctgccgcccacgtcctctctgtctctgcagctgtgtgcctccatggcagtgaccagcaaaagcgcaagggtgccgcagccacggcgaaaagaaagtccaagggtggaggggtgaacgtggagggacgtctgtgcacctggccccctgaagacccacgtgcgtctgggggcacattgcgggggaaggaacgtgatcttcacacagaaagggacagttttaaccgttttctgttttcatgttctcatttaactgttggccggaaattgccggtaggctgccgtggcctgaccctactacgtgcacaactccgcaggcattaggggaggggtcatctgctctaattaggtaacaggggcaagtgggattaaagttttaaggcagttatattaagaagctgaggacaggattccggaaccaggtgggttttcagcgtctagccatgggtgatccagagcgactatctcttcctcccagcttaaaaattttggaaagcgtgccctgggcatcgactcccttgaatcccttgtgagccgatttatagtcggacgctctgcctccgtagccaaatcctggtctctggccttcggccccccagctaaatctgctcagggacagtcctgtcccctttccccaacttttttgtacaaa

SEQ ID NO: 380973 - DNA, 1533 bp, Homo Sapiens
  misc_feature (1013)..(1021): n is a, c, g, or t
ctttgtacaaaaaagttgggctccagaccacccaagaagacagtgcagccacctccgagagcctggatgtgatggcgtcacagaagagaccctcccagaggcacggatccaagtacctggccacagcaagtaccatggaccatgccaggcatggcttcctcccaaggcacagagacacgggcatccttgactccatcgggcgcttctttggcggtgacaggggtgcgcccaagcggggctctggcaaggactcacaccacccggcaagaactgctcactacggctccctgccccagaagtcacacggccggacccaagatgaaaaccccgtagtccacttcttcaagaacattgtgacgcctcgcacaccacccccgtcccagggaaagggggccgaaggccagagaccaggatttggctacggaggcagagcgtccgactataaatcggctcacaagggattcaagggagtcgatgcccagggcacgctttccaaaatttttaagctgggaggaagagatagtcgctctggatcacccatggctagacgctgaaaacccacctggttccggaatcctgtcctcagcttcttaatataaccgccttaaaactttaatcccacttgcccctgttacctaattagagcagatgacccctccccctaatgccctgcggagttgtgcacgtagtagggtcaggccacggcagcctaccggcaatttccggccaacagttaaatgagaacatgaaaacagaaaacggttaaaactgtccctttctgtgtgaagatcacgttccttcccccgcaatgtgcccccagacgcacgtgggtcttcagggggccaggtgcacagacgtccctccacgttcacccctccacccttggactttcttttcgccgtggctgcggcacccttgcgcttttgctggtcactgccatggaggcacacagctgcagagacagagaggacgtgggcggcagagaggactgttgacatccaagcttcctttgnnnnnnnnncctgtccttctctcacctcctaaagtagacttcatttttcctaacaggattagacagtcaaggagtggcttactacatgtgggagcttttggtatgtgacatgcgggctgggcagctgttagagtccaacgtggggcagcacagagagggggccacctccccaggccgtggctgcccacacaccccaattagctgaattcgcgtgtggcagagggaggaaaaggaggcaaacgtgggctgggcaatggcctcacataggaaacagggtcttcctggagatttggtgatggagatgtcaagcaggtggcctctggacgtcaccgttgccctgcatggtggccccagagcagcctctatgaacaacctcgtttccaaaccacagcccacagccggagagtccaggaagacttgcgcactcagagcagaagggtaggagtcctctagacagcctcgcagccgcgccagacgcccatagacactggctgtgaccgggcgtgctggcagcggcagtg

SEQ ID NO: 380974 - DNA, 1223 bp, Homo Sapiens
  misc_feature (987)..(995): n is a, c, g, or t
gtacaaaaaagttgggccacctcgacgatagcacataggggatgtcgatggcgtcacagaagagaccctcccagaggcacggatccaagtacctggccacagcaagtaccatggaccatgccaggcatggcttcctcccaaggcacagagacacgggcatccttgactccatcgggcgcttctttggcggtgacaggggtgcgcccaagcggggctctggcaaggactcacaccacccggcaagaactgctcactacggctccctgccccagaagtcacacggccggacccaagatgaaaaccccgtagtccacttcttcaagaacattgtgacgcctcgcacaccacccccgtcgcagggaaagggggccgaaggccagagaccaggatttggctacggaggcagagcgtccgactataaatcggctcacaagggattcaagggagtcgatgcccagggcacgctttccaaaatttttaagctgggaggaagagatagtcgctctggatcacccatggctagacgctgaaaacccacctggttccggaatcctgtcctcagcttcttaatataaccgccttaaaactttaatcccacttgcccctgttacctaattagagcagatgacccctcccctaatgcctgcggagttgtgcacgtagtagggtcaggccacggcagcctaccggcaatttccggccaacagttaaatgagaacatgaaaacagaaaacggttaaaactgtccctttctgtgtgaagatcacgttccttcccccgcaatgtgcccccagacgcacgtgggtcttcagggggccaggtgcacagacgtccctccacgttcacccctccacccttggactttcttttcgccgtggctgcggcacccttgcgcttttgctggtcactgccatggaggcacacagctgcagagacagagaggacgtgggcggcagagaggactgttgacatccaagcttcctttgnnnnnnnnncctgtccttctctcacctcctaaagtagacttcatttttcctaacaggattagacagtcaaggagtggcttactacatgtgggagcttttggtatgtgacatgcgggctgggcagctgttagagtccaacgtggggcagcacagagagggggccacctccccaggccgtggctgcccacacaccccaattagctgatttcgcgtgtggcagagggaggaaaaggaggc

SEQ ID NO: 380975 - DNA, 816 bp, Homo Sapiens
ttggggcccggcctccggcggctccggggaggtagacgagctgttcgacgtaaagaacgccttctacatcggcagctaccagcagtgcataaacgaggcgcagcgggtgaagctgtcaagcccagagagagacgtggagagggacgtcttcctgtatagagcgtacctggcgcagaggaagttcggtgtggtcctggatgagatcaagccctcctcggcccctgagctccaggccgtgcgcatgtttgctgactacctcgcccacgagagtcggagggacagcatcgtggccgagctggaccgagagatgagcaggagcgtggacgtgaccaacaccaccttcctgctcatggccgcctccatctatctccacgaccagaacccggatgccgccctgcgtgcgctgcaccagggggacagcctggagtgcacagccatgacagtgcagatcctgctgaagctggaccgcctggacctcgcccggaaggagctgaagagaatgcaggacctggacgaggatgccaccctcacccagctcgccactgcctgggtcagcctggccacgggtggtgagaagctgcaggatgcctactacatcttccaggagatggctgacaagtgctcgcccaccctgctgctgctcaatgggcaggcggcctgccacatggcccatggccgctgggaggccgctgagggcctgctgcagaggcgctagacaaggatagtggctacccggagacgctggtcaacctcatcgtcctgtcccagcacctgggcaagccccctgaggtgacaaaccgatacctgtcccagctg

SEQ ID NO: 380976 - DNA, 989 bp, Homo Sapiens
ttgggcctcggggctcgtggcgtcgggcctggcgggctccccgttgggcgggggcggcggtccgagcggctgcggcagcggaagcgggtccgggtcgcgcagggcgggggcggcgcagcgggcggaggcggccgtgggccgcctgggcagaatgtcacgatggacgagggcggcacgcccctgctccccgacagcctggtctaccagatcttcctgagcctgggcccggccgacgtgctggccgccgggctggtgtgccgccaatggcaggccgtgtcgcgggacgagttcctgtggagggagcagttctaccgctactaccaggtggcccgcgacgtgccccgacacccagcggccatgtcctggtacgaggagttccagcggctgtatgacacggtgccctgcgtggaggtgcagacgctgcgggaacacacagaccaggtcctgcacctcagcttctcccattccgggtaccagttcgcgtcctgctccaaggactgcactgtgaagatctggagcaacgacctgaccatctcgctgctgcacagcgcggacatgcggccctacaactggagctacacccagttctcccagttcaacaaggacgactcgctactgctggcctcgggggtgttcctggggccgcacaactcctcatccggcgagattgctgtcatcagcctagactccttcgcgctgctgtcccgcgtgcggaacaagccctatgacgtgtttggctgttggctcaccgagaccagcctcatctcggggaacctgcaccgcatcggagatatcacctcctgctcggtgctgtggctcaacaatgccttccaggatgtggagtcagagaacgtcaacgtggtgaagcggctgttcaagatccagaacctcaatgccagcaccgtccgcacggtgatggtggccgactgcagccgcttcgacagccctgacctgctgctggaagccggtgacccggccacgtccccctg

SEQ ID NO: 380977 - DNA, 837 bp, Homo Sapiens
cctccacactcccgccctcctcacggggcccagttcgctgatggcccaggctgccaggaagagcagccacccccgcctttccgcccatgcaatttgcactcagagccacagccgagagacaccgtttccttctgaacatgtttctcatctttgaggggagacggggcagaagaagagcctccactctcgcctctacctccgggggtcctggcgctgcagcagggacaggccagtgagggcccagcttcaggcccagcggggtcacatccgtcacacaggcagtggccgcgacttccctagagactctgcagccccagccgtcaggccgagggctgcagcttcctccggatggatccagggcggctactggtcccagagctgggggctgagtgggcccgtgccgagggctgtggcgtctgacaagccggctcccactctagatgctcctggcttgaccaggacccaagctctgccctgcgtagcccaggccccagctccacagagcgcaccctctcagcaaacttgagggaatagagcgtctcgctagtgttcttctccacgggggacacctgtaccaccatgagggtcttgctgtcaccactaagcgaatcctgcagcaggtaggtgagcttggagttgcggaagggcacgtggccctggcgggagcgcagggcagcaatgacgtcccccagagccgacagcgacttgttgatgtgctgcgcctcccgcaggcggctgccctcggcccccgacttgcccacgcgctccgagccagccaagtccaccaggttcagcttccccgtggtgcggaggcctgtgctgcagtccacgccccaa

SEQ ID NO: 380978 - DNA, 471 bp, Homo Sapiens
actttgtacaaaaaagttggctttccgcgccgccacaatggtgcgcatgaatgtcctggcagatgctctcaagagtatcaacaatgccgaaaagagaggcaaacgccaggtgcttattaggccgtgctccaaagtcatcgtccggtttctcactgtgatgatgaagcatggttacattggcgaatttgaaatcattgatgaccacagagctgggaaaattgttgtgaacctcacaggcaggctaaacaagtgtggggtgatcagccccagatttgacgtgcaactcaaagacctggaaaaatggcagaataatctgcttccatcccgccagtttggtttcattgtactgacaacctcagctggcatcatggaccatgaagaagcaagacgaaaacacacaggagggaaaatcctgggattctttttctagggatgtaatacatatatttacaaataaaatgcctcatggac

SEQ ID NO: 380979 - DNA, 637 bp, Homo Sapiens
  misc_feature (556)..(572): n is a, c, g, or t
ttggggcgcttcgggagccgcggcttatggtgcagacatggccaagtccaagaaccacaccacacacaaccagtcccgaaaatggcacagaaatggtatcaagaaaccccgatcacaaagatacgaatctcttaagggggtggaccccaagttcctgaggaacatgcgctttgccaagaagcacaacaaaaagggcctaaagaagatgcaggccaacaatgccaaggccatgagtgcacgtgccgaggctatcaaggccctcgtaaagcccaaggaggttaagcccaagatcccaaagggtgtcagccgcaagctcgatctacttgcctacattgcccaccccaagcttgggaagcgtgctcgtgcccgtattgccaaggggctcaggctgtgccggccaaaggccaaggccaaggccaaggccaaggatcaaaccaaggcccaggctgcagccccagcttcagttccagctcaggctcccaaacgtacccaggcccctacaaaggcttcagagtagatatctctgccaacatgaggacagaaggactggtgcgannnnnnnnnnnnnnnnntgggctaccatctgcatggggctggggtcctcctgtgctatttgtacaaataaacctgaggcagg

SEQ ID NO: 380980 - DNA, 523 bp, Homo Sapiens
ttggctgtcgccatgaaggtcgagctgtgcagttttagcgggtacaagatctaccccggacacgggaggcgctacgccaggaccgacgggaaggttttccagtttcttaatgcgaaatgcgagtcggctttcctttccaagaggaatcctcggcagataaactggactgtcctctacagaaggaagcacaaaaagggacagtcggaagaaattcaaaagaaaagaacccgccgagcagtcaaattccagagggccattactggtgcatctcttgctgatataatggccaagaggaatcagaaacctgaagttagaaaggctcaacgagaacaagctatcagggctgctaaggaagcaaaaaaggctaagcaagcatctaaaaagactgcaatggctgctgctaaggcacctacaaaggcagcacctaagcaaaagattgtgaagcctgtgaaagtttcagctccccgagttggtggaaaacgctaaactggcagattagatttttaaataaagattggattat

SEQ ID NO: 380981 - DNA, 484 bp, Homo Sapiens
  misc_feature (261)..(273): n is a, c, g, or t
actttgtacaaaaaagttgggtttgacccctccctctgagctgcacttcaccgctgaccttgcctcacctttaaccccccacctgagccccagctcctacctctgaccccaacttctctttgatctctgaatcccctctgactccaacttctctttcaccctctatgagtcccattttacttctacacctgcaagtcctggtttatattggacccctccctccgagctgcagttcacctttgaccttgcctcacctttcannnnnnnnnnnnnacagcgtcagctcctacctctgaccccagcttctctctgattcccacaggccccatgcatcctccctgcctcactcccctcagcccctgccgaccttagcttatctgggagagaaacaaggcctggtgcctgtgaggaagagaggtcacccctaccctccctccccgcttccctgcctcaccctcaataaataaattaattgttgtcatgg

SEQ ID NO: 380982 - DNA, 544 bp, Homo Sapiens
ttggcgccgcgcggtgaggttgtctagtccacgctcggagccatgccgtccaagggtccgctgcagtcggtgcaggtcttcggacgcaagaagacagcgacagctgtggcgcactgcaaacgcggcaatggtctcatcaaggtgaacgggcggcccctggagatgattgagccgcgcacgctacagtacaagctgctggagccagttctgcttctcggcaaggagcgatttgctggtgtagacatccgtgtccgtgtaaagggtggtggtcacgtggcccagatttatgctatccgtcagtccatctccaaagccctggtggcctattaccagaaatatgtggatgaggcttccaagaaggagatcaaagacatcctcatccagtatgaccggaccctgctggtagctgaccctcgtcgctgcgagtccaaaaagtttggaggccctggtgcccgcgctcgctaccagaaatcctaccgataagcccatcgtgactcaaaactcacttgtataataaacagtttttgagggattttaaagtttc

SEQ ID NO: 380983 - DNA, 382 bp, Homo Sapiens
ttggagcagccactggccacccaaaaggatctcactggccaggtgcccactcctgtggtgaaacaaacaaaactgaaacagagggctgatagccgagaaagtctgaagccagccgcaaaaccacttcctagcaaatccgtgcgcaaggagtcaaaagaagaaacccctgaggtcacaaaagtgaatcacgtggaaaagccacccaaagttgaaagcaaagaaaaggtaatggtgaaaaaagacaagccagtaaaaacagagaccaaaccttcagtgactgaaaaggaggttcccagcaaagaagagccatctccagtgaaagccgaggtggctgagaagcaagccacagatgtcaaacccaaagctgccaaggagaagacgg

SEQ ID NO: 380984 - DNA, 883 bp, Homo Sapiens
ctttgtacaaaaaagttggggtcccgcgggtctgtctcttgcttcaacagtgtttggacggaacagatccggggactctcttccagcctccgaccgccctccgatttcctctccgcttgcaacctccgggaccatcttctcggccatctcctgcttctgggacctgccagcaccgtttttgtggttagctccttcttgccaaccaaccatgagctcccagattcgtcagaattattccaccgacgtggaggcagccgtcaacagcctggtcaatttgtacctgcaggcctcctacacctacctctctctgggcttctatttcgaccgcgatgatgtggctctggaaggcgtgagccacttcttccgcgaattggccgaggagaagcgcgagggctacgagcgtctcctgaagatgcaaaaccagcgtggcggccgcgctctcttccaggacatcaagaagccagctgaagatgagtggggtaaaaccccagacgccatgaaagctgccatggccctggagaaaaagctgaaccaggcccttttggatcttcatgccctgggttctgcccgcacggacccccatctctgtgacttcctggagactcacttcctagatgaggaagtgaagcttatcaagaagatgggtgaccacctgaccaacctccacaggctgggtggcccggaggctgggctgggcgagtatctcttcgaaaggctcactctcaagcacgactaagagccttctgagcccagcgacttctgaagggccccttgcaaagtaatagggcttctgcctaagcctctccctccagccaataggcagctttcttaactatcctaacaagccttggaccaaatggaaataaagctttttgatgcagct

SEQ ID NO: 380985 - DNA, 640 bp, Homo Sapiens
ttggcctgcgcaggcttggctgcgccctctcgcgccgcacgctctgcgggttcctcccttcttccgagcctctcctctggccgccgcgcgggagagaggccgagatggcagatgagattgccaaggctcaggtcgctcggcctggtggcgacacgatctttgggaagatcatccgcaaggaaataccagccaaaatcatttttgaggatgaccggtgccttgctttccatgacatttcccctcaagcaccaacacattttctggtgatacccaagaaacatatatcccagatttctgtggcagaagatgatgatgaaagtcttcttggacacttaatgattgttggcaagaaatgtgctgctgatctgggcctgaataagggttatcgaatggtggtgaatgaaggttcagatggtggacagtctgtctatcacgttcatctccatgttcttggaggtcggcaaatgcattggcctcctggttaagcacgttttggggataattttctcttctttaggcaatgattaagttaggcaatttccagtatgttaagtaacacacttatttttgcctgtgtatggagagattcaagaaataattttaaaaccgcatacataataaaagacattgttgcatggct

SEQ ID NO: 380986 - DNA, 504 bp, Homo Sapiens
ttgtacaaaaaagttggggcgccgacaggatgggcaagtgtcgtggacttcgtactgctaggaagctccgtagtcaccgacgagaccagaagtggcatgataaacagtataagaaagctcatttgggcacagccctaaaggccaacccttttggaggtgcttctcatgcaaaaggaatcgtgctggaaaaagtaggagttgaagccaaacagccaaattctgccattaggaagtgtgtaagggtccagctgatcaagaatggcaagaaaatcacagcctttgtacccaatgacggttgcttgaactttattgaggaaaatgatgaagttctggttgctggatttggtcgcaaaggtcatgctgttggtgatattcctggagtccgctttaaggttgtcaaagtagccaatgtttctcttttggccctatacaaaggcaagaaggaaagaccaagatcataaatattaatggtgaaaacactgtagtaataaattttcatatgcc

SEQ ID NO: 380987 - DNA, 477 bp, Homo Sapiens
ttggcaagatggcagaagtagagcagaagaagaagcggaccttccgcaagttcacctaccgcggcgtggacctcgaccagctgctggacatgtcctacgagcagctgatgcagctgtacagtgcgcgccagcggcggcggctgaaccggggcctgcggcggaagcagcactccctgctgaagcgcctgcgcaaggccaagaaggaggcgccgcccatggagaagccggaagtggtgaagacgcacctgcgggacatgatcatcctacccgagatggtgggcagcatggtgggcgtctacaacggcaagaccttcaaccaggtggagatcaagcccgagatgatcggccactacctgggcgagttctccatcacctacaagcccgtaaagcatggccggcccggcatcggggccacccactcctcccgcttcatccctctcaagtaatggctcagctaataaaggcgcacatgactcc

SEQ ID NO: 380988 - DNA, 517 bp, Homo Sapiens
tcagaattaggcagctggactcagtttagatgatcccaattttgttggcaacatccaaagcatcgtaatcaggagccagtcgaacatatgccttcttctctccatcaggccgaatcagggtgttgaccttggccacatcaatgtcatacagcttcttcacagcctgtttaatctggtgcttgttggctttaacatccacaatgaacacaagtgtgttgttgtcttctatcttcttcatggcagactcagtggtcagcggaaacttgatgatagcatagtggtcaagcttgtttctcctgggagcgctcttccgaggatatttgggctgtctccggagtcgcagtgtcttcggccgccggaaggtgggtgacgtgcggatcttcttctttttgtggctgtggacacctttcaacactgccttcttggcctttaaagccttcgctttggcttcagctttaggaggggcaggagcttccttcttcgctttcggccaacttttttgtacaaagttggctat

SEQ ID NO: 380989 - DNA, 879 bp, Homo Sapiens
accaaggggaaacaaagttttcattttattcaggtgctcacaatgaatcggtctccagattcatttgatcaaaaataattccagctgaaaatcatcacatcagagactcttcacatgtactaaaggtgttgttggtcaggctcctaacccagcaacctgaggggggctgctaacgtgttcatgtgtcccactgtagagatgcaacacaggcatagccaagctcctaggcgtcatgagaaggggaaaggaggctccagatgccaccttctcgctgtgcaaacttgccaggccacagggtatcggacatgccctgtgggccacggggatgcttcaggatggagcaatgtgcccaaagccgggttccttgaggctggggatgtcgttcttcctgtagaagtcagcctgcacatggttggcacggccaaagtcccggtttaggggctcaatgggctgattgatgcgcttcccatagacagaagacgtcagcactccaaccggcctctcctgttcctcttcgttaacatgaagtcccaggctttttgcatgttctctgtcatctcggtgcaacttgtgatcataatctaggcgcctcttaaaaatacaatcatagagggaaataattcctgtccgcgccgggcggtagtagtagctgtgctctttggggtccaggcgccgcggcgggatgtagctgaaggcggactgcgccgagacgggcggcggcctgggcttgccccgcagcgtggacgcggtggtctcctcctcgtcgtcctccatgccgccaccgtccagcgcccccgccttggccgcggtccgtcccgcccgcccaggggcccagtcggagtctgcaggcctcaggttgctcagcgccagcgtctccaa

SEQ ID NO: 380990 - DNA, 730 bp, Homo Sapiens
  misc_feature (697)..(707): n is a, c, g, or t
ctttgtacaaaaaagttgggaagaagggcacatcaagagcggtggccagggccggggtcttgggagtccagtggctgcaaagggcatcccggaacgtgatgccgctgggcgcacggacagcctcccacatgaccaaggacatgttcccggggccctatcctaggaccccagaagaacgggccgccgccgccaagaagtataatatgcgtgtggaagactacgaaccttacccggatgatggcatggggtatggcgactacccgaagctccctgaccgctcacagcatgagagagatccatggtatagctgggaccagccgggcctgaggttgaactggggtgaaccgatgcactggcacctagacatgtacaacaggaaccgtgtggatacatcccccacacctgtttcttggcatgtcatgtgtatgcagctcttcggtttcctggctttcatgatattcatgtgctgggtgggggacgtgtaccctgtctaccagcctgtgggaccaaagcagtatccttacaataatctgtacctggaacgaggcggtgatccctccaaagaaccagagcgggtggttcactatgagatctgaggaggcttcgtgggcttttgggtcctctaactaggactccctcattcctagaaatttaaccttaatgaaatccctaataaaactcagtgctgtgttaaagnnnnnnnnnnnggaaaacccaactttcttgtaca

SEQ ID NO: 380991 - DNA, 602 bp, Homo Sapiens
gtacaaaaaagttggcacctgttggacgatcgagaagtgctcgtctcctcccgacgtctacttccctgagtcccttctaccttcggccaccctccttcctgcgggcacccagctggtttgacactggactctcagagatgcgcctggagaaggacaggttctctgtcaacctggatgtgaagcacttctccccagaggaactcaaagttaaggtgttgggagatgtgattgaggtgcatggaaaacatgaagagcgccaggatgaacatggtttcatctccagggagttccacaggaaataccggatcccagctgatgtagaccctctcaccattacttcatccctgtcatctgatggggtcctcactgtgaatggaccaaggaaacaggtctctggccctgagcgcaccattcccatcacccgtgaagagaagcctgctgtcaccgcagcccccaagaaatagatgccctttcttgaattgcattttttaaaacaagaaagtttccccaccagtgaatgaaagtcttgtgactagtgctgaagcttattaatgctaagggcaggcccaaattatcaagctaataaaatatcattcagcaac

SEQ ID NO: 380992 - DNA, 710 bp, Homo Sapiens
ttgggaccagccagctgacccctcacactcacctagccaccatggacatcgccatccaccacccctggatccgccgccccttctttcctttccactcccccagccgcctctttgaccagttcttcggagagcacctgttggagtctgatcttttcccgacgtctacttccctgagtcccttctaccttcggccaccctccttcctgcgggcacccagctggtttgacactggactctcagagatgcgcctggagaaggacaggttctctgtcaacctggatgtgaagcacttctccccagaggaactcaaagttaaggtgttgggagatgtgattgaggtgcatggaaaacatgaagagcgccaggatgaacatggtttcatctccagggagttccacaggaaataccggatcccagctgatgtagaccctctcaccattacttcatccctgtcatctgatggggtcctcactgtgaatggaccaaggaaacaggtctctggccctgagcgcaccattcccatcacccgtgaagagaagcctgctgtcaccgcagcccccaagaaatagatgccctttcttgaattgcattttttaaaacaagaaagtttccccaccagtgaatgaaagtcttgtgactagtgctgaagcttattaatgctaagggcaggcccaaattatcaagctaataaaaatatcattcagcaacag

SEQ ID NO: 380993 - DNA, 541 bp, Homo Sapiens
tttgtacaaaaaagttgggccgccgcccttgaaaaagcagccatgtctctagtgatccctgaaaagttccagcatattttgcgagtactcaacaccaacatcgatgggcggcggaaaatagcctttgccatcactgccattaagggtgtgggccgaagatatgctcatgtggtgttgaggaaagcagacattgacctcaccaagagggcgggagaactcactgaggatgaggtggaacgtgtgatcaccattatgcagaatccacgccagtacaagatcccagactggttcttgaacagacagaaggatgtaaaggatggaaaatacagccaggtcctagccaatggtctggacaacaagctccgtgaagacctggagcgactgaagaagattcgggcccatagagggctgcgtcacttctggggccttcgtgtccgaggccagcacaccaagaccactggccgccgtggccgcaccgtgggtgtgtccaagaagaaataagtctgtaggccttgtctgttaataaatagtttatatacct

SEQ ID NO: 380994 - DNA, 1013 bp, Homo Sapiens
ttggcgcggagggggcggagggagcccgcggcggcggcagcagctacagcgaaatggcggagaccgtggctgacacccggcggctgatcaccaagccgcagaacctgaatgacgcctacggaccccccagcaacttcctcgagatcgatgtgagcaacccgcaaacggtgggggtcggccggggccgcttcaccacttacgaaatcagggtcaagacaaatcttcctattttcaagctgaaagaatctactgttagaagaagatacagtgactttgaatggctgcgaagtgaattagaaagagagagcaaggtcgtagttcccccgctccctgggaaagcgtttttgcgtcagcttccttttagaggagatgatggaatatttgatgacaattttattgaggaaagaaaacaagggctggagcagtttataaacaaggtcgctggtcatcctctggcacagaacgaacgttgtcttcacatgtttttacaagatgaaataatagataaaagctatactccatctaaaataagacatgcctgaaatttggcaagaaggggcaaaaacgtgactattaatgattgataagcaccagtgaagaagttctaacttttagcatgctgcacagaaactggtataacatgccttcagtatactaacactcatatgctcagttttgttttgttttggcagttgacaagaagttaatttgctttagtaaaaatccctcattccagcctttctatataaatagctctttcttgctgttttaatgtggtgcacactatagcctcacaaacctgttattccagtgtaatctgcagtgtcgtaactaaagttactggcttggtcttatttgcacagtttttgcgtcttgtttgcttcttgcatctgattaactagaatatttctctttcccccttttaatttgtgatgtcacttgaccccatttatgtgtaggagcactacaccattggtttccaatactgcacacataagatacatacttgtgtg

SEQ ID NO: 380995 - DNA, 925 bp, Homo Sapiens
ttggttggacaccaaatggcggatgacgccggtgcagcgggggggcccgggggccctggtggccctgggatggggaaccgcggtggcttccgcggaggtttcggcagtggcatccggggccggggtcgcggccgtggacggggccggggccgaggccgcggagctcgcggaggcaaggccgaggataaggagtggatgcccgtcaccaagttgggccgcttggtcaaggacatgaagatcaagtccctggaggagatctatctcttctccctgcccattaaggaatcagagatcattgatttcttcctgggggcctctctcaaggatgaggttttgaagattatgccagtgcagaagcagacccgtgccggccagcgcaccaggttcaaggcatttgttgctatcggggactacaatggccacgtcggtctgggtgttaagtgctccaaggaggtggccaccgccatccgtggggccatcatcctggccaagctctccatcgtccccgtgcgcagaggctactgggggaacaagatcggcaagccccacactgtcccttgcaaggtgacaggccgctgcggctctgtgctggtacgcctcatccctgcacccaggggcactggcatcgtctccgcacctgtgcctaagaagctgctcatgatggctggtatcgatgactgctacacctcagcccggggctgcactgccaccctgggcaacttcgccaaggccacctttgatgccatttctaagacctacagctacctgacccccgacctctggaaggagactgtattcaccaagtctccctatcagagttcactgaccacctcgtcagacccacaccagagtctccgtgcagcggactcaagctccagctgtggctacaacatagggtttttatactagaaaaataaagtgaatt

SEQ ID NO: 380996 - DNA, 1587 bp, Homo Sapiens
ttgggacagcgggtcggcgggccgcaggagggggtcatgggtaaagactactaccagacgttgggcctggcccgcggcgcgtcggacgaggagatcaagcgggcctaccgccgccaggcgctgcgctaccacccggacaagaacaaggagcccggcgccgaggagaagttcaaggagatcgctgaggcctacgacgtgctcagcgacccgcgcaagcgcgagatcttcgaccgctacggggaggaaggcctaaaggggagtggccccagtggcggtagcggcggtggtgccaatggtacctctttcagctacacattccatggagaccctcatgccatgtttgctgagttcttcggtggcagaaatccctttgacaccttttttgggcagcggaacggggaggaaggcatggacattgatgacccattctctggcttccctatgggcatgggtggcttcaccaacgtgaactttggccgctcccgctctgcccaagagcccgcccgaaagaagcaagatcccccagtcacccacgaccttcgagtctcccttgaagagatctacagcggctgtaccaagaagatgaaaatctcccacaagcggctaaaccccgacggaaagagcattcgaaacgaagacaaaatattgaccatcgaagtgaagaaggggtggaaagaaggaaccaaaatcactttccccaaggaaggagaccagacctccaacaacattccagctgatatcgtctttgttttaaaggacaagccccacaatatctttaagagagatggctctgatgtcatttatcctgccaggatcagcctccgggaggctctgtgtggctgcacagtgaacgtccccactctggacggcaggacgatacccgtcgtattcaaagatgttatcaggcctggcatgcggcgaaaagttcctggagaaggcctccccctccccaaaacacccgagaaacgtggggacctcattattgagtttgaagtgatcttccccgaaaggattccccagacatcaagaaccgtacttgagcaggttcttccaatatagctatctgagctccccaaggactgaccagggacctttccagagctcaaggatttctggacctttctaccagttgtggaccatgagagggtgggagggcccagggagggctttcgtactgctgaatgttttccagagcatatattacaatctttcaaagtcgcacactagacttcagtggtttttcgagctatagggcatcaggtggtgggaacagcaggaaaaggcattccagtctgccccactgggtctggcagccctcccgggatgggcccacatccacctccagtccctggccaggggtgagaggcagaccagcagatggacttgatccctctgtgtctttttgcttctggctggtagataatgtcaacctgcagtcttgattcccagaccctgtacactcctccttttctgttgtgtgatcagtttgtgctttattctgtatttgtctcccatgtcttgctcttctcctggagaattctgtcttctctttggccatctcaaattgagaacctaaactattcctgc

SEQ ID NO: 380997 - DNA, 939 bp, Homo Sapiens
gccaactttgtacaaaaaagttggtgcaggcgctttcctcttggaagtggcgactgctgcgggcctgagcgctggtctcacgcgcctcgggagccaggttggcggcgcgatgaggcgcagcaaggctgacgtggagcggtacatcgcctcggtgcagggctccaccccgtcgcctcgacagaagtcaatgaaaggattctattttgcaaagctgtattatgaagctaaagaatatgatcttgctaaaaaatacatatgtacttacattaatgtgcaagagagggatcccaaagctcacagatttctgggtcttctttatgaattggaagaaaacacagacaaagccgttgaatgttacaggcgttcagtggaattaaacccaacacaaaaagatcttgtgttgaagattgcagaattgctttgtaaaaatgatgttactgatggaagagcaaaatactggcttgaaagagcagccaaacttttcccaggaagtcctgcaatttataaactaaaggaacagcttctagattgtgaaggtgaagatggatggaataaactttttgacttgattcagtcagaactttatgtaagacctgatgacgtccatgtgaacatccggctagtggaggtgtatcgctcaactaaaagattgaaggatgctgtggcccactgccatgaggcagagaggaacatagctttgcgttcaagtttagaatggaattcgtgtgttgtacagacccttaaggaatatctggagtctttacagtgtttggagtctgataaaagtgactggcgagcaaccaatacagacttactgctggcctatgctaatcttatgcttcttacgctttccactagagatgtgcaggaaagtagagaattactgcaagttttgatagtgctcttcagtctgtgaaatctttgggtggaaatgatgaa

SEQ ID NO: 380998 - DNA, 958 bp, Homo Sapiens
tacaaaaaagttggcgggtttgccgccagaacacaggtgtcgtgaaaactacccctaaaagccaaaatgggaaaggaaaagactcatatcaacattgtcgtcattggacacgtagattcgggcaagtccaccactactggccatctgatctataaatgcggtggcatcgacaaaagaaccattgaaaaatttgagaaggaggctgctgagatgggaaagggctccttcaagtatgcctgggtcttggataaactgaaagctgagcgtgaacgtggtatcaccattgatatctccttgtggaaatttgagaccagcaagtactatgtgactatcattgatgccccaggacacagagactttatcaaaaacatgattacagggacatctcaggctgactgtgctgtcctgattgttgctgctggtgttggtgaatttgaagctggtatctccaagaatgggcagacccgagagcatgcccttctggcttacacactgggtgtgaaacaactaattgtcggtgttaacaaaatggattccactgagccaccctacagccagaagagatatgaggaaattgttaaggaagtcagcacttacattaagaaaattggctacaaccccgacacagtagcatttgtgccaatttctggttggaatggtgacaacatgctggagccaagtgctaacatgccttggttcaagggatggaaagtcacccgtaaggatggcaatgccagtggaaccacgctgcttgaggctctggactgcatcctaccaccaactcgtccaactgacaagcccttgcgcctgcctctccaggatgtctacaaaattggtggtattggtactgttcctgttggccgagtggagactggtgttctcaaacccggtatggtggtcacctttgctccagtcacgttacacggaagtaaatctgtcgaaatgcacatgaagcttt

SEQ ID NO: 380999 - DNA, 689 bp, Homo Sapiens
  misc_feature (197)..(248): n is a, c, g, or t
gggggctgcttaactgttctgctttctcccctagttatcaaactgttacctagttatggtgtgaaggggagggggcagggacttaggaccaaaggtgggaggtaagctcttttttttaccctggtaaatagccccagccttcttggggctacactgattaagaaatgggatcattcaggaggattgcttgagcccannnnnnnnnnnnnnnnnnnnnnnnnnnnnnnnnnnnnnnnnnnnnnnnnnnnaaatagcaggaccctgtttttaaaaacaaagaaaaaagacaaggagatggaatcaaagcccagaggtcctccccttttcagagccaccactagttttttgtgaccatggaaaactacccccagccccactgccttttgcctccggtcagtgggttttggggggttttgaggtgtctccccactcacccagctttgggcagagcagctgggttgggctggggctgagctaaccagaacctggaagtagggctcggggttttggctgtggccccatccctggcttggcccagccttttcagctttggtccaggttcctgaatggtgcctccctgccccccttgtgttgggagcgtgagcattagaggggaagagggcggacaggaagggagggtcagttattttacaagtttttaaaaagttacaggtaggttaactttgagt

SEQ ID NO: 381000 - DNA, 787 bp, Homo Sapiens
ttggggaggttcctgctgtgccagaaacccttaagaaaaagcgaaggaatttcgcagagctgaagatcaagcgcctgagaaagaagtttgcccaaaagatgcttcgaaaggcaaggaggaagcttatctatgaaaaagcaaagcactatcacaaggaatataggcagatgtacagaactgaaattcgaatggcgaggatggcaagaaaagctggcaacttctatgtacctgcagaacccaaattggcgtttgtcatcagaatcagaggtatcaatggagtgagcccaaaggttcgaaaggtgttgcagcttcttcgccttcgtcaaatcttcaatggaacctttgtgaagctcaacaaggcttcgattaacatgctgaggattgtagagccatatattgcatgggggtaccccaatctgaagtcagtaaatgaactaatctacaagcgtggttatggcaaaatcaataagaagcgaattgctttgacagataacgctttgattgctcgatctcttggtaaatacggcatcatctgcatggaggatttgattcatgagatctatactgttggaaaacgcttcaaagaggcaaataacttcctgtggcccttcaaattgtcttctccacgaggtggaatgaagaaaaagaccacccattttgtagaaggtggagatgctggcaacagggaggaccagatcaacaggcttattagaagaatgaactaaagtgtctaccatgattatttttctaagctggttggttaataaacagtacctgctctcaaatt

SEQ ID NO: 381001 - DNA, 841 bp, Homo Sapiens
  misc_feature (601)..(622): n is a, c, g, or t
tcggaggtacccccgccgtcgcagcccccgcgctggtgcagccaccctcgctccctctgctcttcctcccttcgctcgcaccatggctgatcagctgaccgaagaacagattgctgaattcaaggaagccttctccctatttgataaagatggcgatggcaccatcacaacaaaggaacttggaactgtcatgaggtcactgggtcagaacccaacagaagctgaattgcaggatatgatcaatgaagtggatgctgatggtaatggcaccattgacttccccgaatttttgactatgatggctagaaaaatgaaagatacagatagtgaagaagaaatccgtgaggcattccgagtctttgacaaggatggcaatggttatatcagtgcagcagaactacgtcacgtcatgacaaacttaggagaaaaactaacagatgaagaagtagatgaaatgatcagagaagcagatattgatggagacggacaagtcaactatgaagaattcgtacagatgatgactgcaaaatgaagacctactttcaactcctttttcccccctctagaagaatcaaattgaatcttttacttacctcttgcnnnnnnnnnnnnnnnnnnnnnngttcatttattcattctgtttctatatagcaaaactgaatgtcaaaagtaccttctgtccacacacacaaaatctgcatgtattggttggtggtcctgtcccctaaagatcaagctacacatcagttttacaatataaatacttgtactaccttaatgataagactccttaaagttccatttgctaatgattatacactgtttgggctggccagttttt

SEQ ID NO: 381002 - DNA, 942 bp, Homo Sapiens
cccacagaacgccaggttgccagtgggggcagatcgggattaggggtaggcgtgtccatgactgttactttcacacccacccacttgcgtctccccacttttttgggagaggccccactctctgtaccttgatgtctgtgaggtgcatgggagaggcagcgtccatactccccgcttccctcggggtcctggggagtggcagcaaaaagaccagcgagccttcggagaattataactttatgtgggaggctggggcgcgtcgcacactctcagtcgccgtcaccgcgggaagatggtgccatccacgttctcctccaggatggtctccacgcgcctccgctcttggcggtccagggggtccgggatccgcgcgggcttcagctgcggcggcaggaacagctccagccggatggcggcgcgcgcggacttctgccgctggatgagcagcgcgatctcctcggcccgcatgcgggtgtagcgcagccgcagggcgcggactcgcccgcgggcctccgctgccttgaggacgccgaggagccggttctggcgctcggcgggcagctcgagcgactgcgtccacgggcgcgggtcgggcatgcggtaccccggttccaccgacccgcacgggaaggtggaggccgccgcgcccacgtcctccagcaggtcgccgaagagcagatggcggtggcgctgcgcagggagcatggccgccagtccctgcggcgtcagggcccagcccggcttggggggctctgtcgcgggcgcccccttggcacgctcctcaccctgcgccgtgcctggcgcgctcttcccgcttcgctcccgcgggcccttgcgcccgccctccttcgctggcggcggcatcctcccgccctgcggagggaggagggcgtcccgtcggtgccggggctggcaccgggccctgcccgcccctcggcccaa

SEQ ID NO: 381003 - DNA, 1589 bp, Homo Sapiens
ttgggtggtggagcgccttccgattccattcatggcattttgtgatgtgatgtaattggaatagagctgttgatttaaggcacacacaatccctcacactgtgggttttttttagaacttcccagacgaaaactcacgcccttgccctaacgcgctttgctgtgagcctggcccctgcccagggcttgggtctggtgagctgagcagcttcctgtggatggtgtggggccggcctctggcctggctcacctggccactgtccagccagccttgtgacagactccggcctgaaggcagaatgaacccacacctggagtgaggaagggggcctggcacggttggccaggctctgcctgattgccagccagcgggcatctgaagccgggtccttcgcccgccggaggctgccgtccgtctctcctgctgcgctcgtgccagctccgtgggtgtcctcccagggagcttctcttctcaacaggccttgcgaggctggggtgagaggtgatagaggcagcactgtgcatgattccgagagggtgtggtggcactgccagccgactgctgacagcttgggagctgctgtgcccaggacgtgggttcagcgtgggcgaggaaagcctggcgagcgtggccctgtaaaagctttctgaggcgggaggcgctcacttacctctgactgcctgggcgctgcgtgtagcatcttggcctacaggacagattttaggtgacacctggttatgacagtcagaaatttgagaagcttctcacaagtgatgcactttaaataatctgcatgccattgagacacctgcatgtctggtgtttgtggttcaagtgtcttgccgccggccttcggatgtaaacccactgataacggacagaaagagaatgcccacaagtgggtcttctgtggaagatgcagaaggaggaagttagtgcttacattttagtctttttctccctcaaaaaaataggttaagtttcagtgccagctagaaaatactgctttctgccatcgattgggggtggtttttgtcaaatatactgttgataaatatttatttttgtaaacttgaagtgtgtggtggccgtgggggagggacatgctggcagcaggcgccttcttcagctgtgggtcctaaaggcctttgatcctttgaagaagaaagacatggtatttgttcagcagacgccgaccactcagacggaggggcccctgggattccctgtctcagatggcctggtcttacgcctgtgtagatttcttctccattgggaatgaaggtgtcaggcgggactggaacgttctagatggtatgttccgtgatattaacaactctaacccaggacagaccacaagccacactcagaggcctcactgtgctgggggcttcggtgtccaggcgcccaggtgtggccaccagcaccggtttctgccttcgcgttgctggggtgcagtgagactgccacacgcgtgcacatgtggctctgtgggtgtctcctagagaggacgtggcccctgctgccagcccttgagcagcccgtgtgggggcccgagggacccacacagtgggggccagcctcgctgg

SEQ ID NO: 381004 - DNA, 1649 bp, Homo Sapiens
ttggctcgactcttagcttgtcggggacggtaaccgggacccggtgtctgctcctgtcgccttcgcctcctaatccctagccactatgcgtgagtgcatctccatccacgttggccaggctggtgtccagattggcaatgcctgctgggagctctactgcctggaacacggcatccagcccgatggccagatgccaagtgacaagaccattgggggaggagatgactccttcaacaccttcttcagtgagacgggcgctggcaagcacgtgccccgggctgtgtttgtagacttggaacccacagtcattgatgaagttcgcactggcacctaccgccagctcttccaccctgagcagctcatcacaggcaaggaagatgctgccaataactatgcccgagggcactacaccattggcaaggagatcattgaccttgtgttggaccgaattcgcaagctggctgaccagtgcaccggtcttcagggcttcttggttttccacagctttggtgggggaactggttctgggttcacctccctgctcatggaacgtctctcagttgattatggcaagaagtccaagctggagttctccatttacccagcaccccaggtttccacagctgtagttgagccctacaactccatcctcaccacccacaccaccctggagcactctgattgtgccttcatggtagacaatgaggccatctatgacatctgtcgtagaaacctcgatatcgagcgcccaacctacactaaccttaaccgccttattagccagattgtgtcctccatcactgcttccctgagatttgatggagccctgaatgttgacctgacagaattccagaccaacctggtgccctacccccgcatccacttccctctggccacatatgcccctgtcatctctgctgagaaagcctaccatgaacagctttctgtagcagagatcaccaatgcttgctttgagccagccaaccagatggtgaaatgtgaccctcgccatggtaaatacatggcttgctgcctgttgtaccgtggtgacgtggttcccaaagatgtcaatgctgccattgccaccatcaagaccaagcgtaccatccagtttgtggattggtgccccactggcttcaaggttggcatcaactaccagcctcccactgtggtgcctggtggagacctggccaaggtacagagagctgtgtgcatgctgagcaacaccacagccattgctgaggcctgggctcgcctggaccacaagtttgacctgatgtatgccaaacgtgcctttgttcactggtacgttggggaggggatggaggaaggtgagttttcagaggcccgtgaggacatggctgcccttgagaaggattatgaggaggttggtgtggattctgttgaaggagagggtgaggaagaaggagaggaatactaaagttaaaacgtcacaaaggtgctgcttttacagggaagcttattctgttttaaacattgaaaagttgtggtctgatcagttaatttgtatgtagcagtgtatgctctcatatacaattactgacctatgctctaaaacatgaatgctttgttacagacccaagctgtccatttctgtgatgggttttgaataaagtattccctgtctt

SEQ ID NO: 381005 - DNA, 1104 bp, Homo Sapiens
ttggcttacatcgaccgcctaagagtcgcgctgtaagaagcaacaacctctcctcttcgtctccgccatcagctcggcagtcgcgaagcagcaaccatgcgtgagtgcatctccatccacgttggccaggctggtgtccagattggcaatgcctgctgggagctctactgcctggaacacggcatccagcccgatggccagatgccaagtgacaagaccattgggggaggagatgattccttcaacaccttcttcagtgagacgggggctggcaagcatgtgccccgggcagtgtttgtagacttggaacccacagtcattgatgaagttcgcactggcacctaccgccagctcttccaccctgagcaacttatcacaggcaaggaagatgctgccaataactatgcccgagggcactacaccattggcaaggagatcattgacctcgtgttggaccgaattcgcaagctggccgaccagtgcacgggtctccagggcttcttggttttccacagctttggtgggggaactggttctgggttcacctccctgctcatggaacgtctctcagttgattatggcaagaagtccaagctggagttctctatttacccggcgccccaggtttccacagctgtagttgagccctacaactccatcctcaccacccacaccaccctggagcactctgattgtgccttcatggtagacaatgaggccatctatgacatctgtcgtagaaacctcgatattgagcgtccaacctatactaacctgaataggttaataggtcaaattgtgtcctccatcactgcttccctgagatttgatggagccctgaatgttgacctgacagaattccagaccaacctggtgccctatccccgcatccacttccctctggccacatatgcccctgtcatctctgctgagaaagcctaccatgaacagctttctgtagcagagatcaccaatgcttgctttgagccagccaaccagatggtgaaatgtgaccctcgccatggtaaatacatggcttgctgcctgttgtaccgtggtgacgtggttcccaagatgtcaatgctgccattgccaccatcaaga

SEQ ID NO: 381006 - DNA, 1339 bp, Homo Sapiens
  misc_feature (782)..(817): n is a, c, g, or t
  misc_feature (968)..(976): n is a, c, g, or t
ttggggctgggagcagctgctcaccaccatcgccaggaccatcaatgaggtagagaaccagatcctgacccgggatgccaagggcatcagccaggagcagatgaatgagttccgggcctccttcaaccactttgaccgggatcactccggcacactgggtcccgaggagttcaaagcctgcctcatcagcttgggttatgatattggcaacgacccccagaagaagacaggcatgatggacacggatgatttccgcgcctgcctgatctccatgggttacaacatgggagaagcagaatttgcccgcatcatgagcattgtggaccccaaccgcctgggggtagtgacattccaggccttcattgacttcatgtcccgcgagacagccgacacagatacagcagaccaagtcatggcttccttcaagatcctggctggggacaagaactacattaccatggacgagctgcgccgcgagctgccacccgaccaggctgagtactgcatcgcgcggatggccccctacaccggccccgactccgtgccaggtgctctggactacatgtccttctccacggcgctgtacggcgagagtgacctctaatccaccccgcccggccgccctcgtcttgtgcgccgtgccctgccttgcacctccgccgtcgcccatctcctgcctgggttcggtttcagctcccagcctccacccgggtgagctggggcccacgtggcatcgatcctccctgcccgcgaagtgacagtttacaaaattattttctgcnnnnnnnnnnnnnnnnnnnnnnnnnnnnnnnnnnnnctacatattttattatagaaaaagtattttttctccaccagacaaatggaaaaaaagaggaaagattaactatttgcaccgaaatgtcttgttttgttgcgacataggaaaataaccaagcacaaagttatattccatcctttttactgannnnnnnnncttctatctgttccatctgctgtattcatttctccaatctcatgtccattttggtgtgggagtcggggtagggggtactcttgtcaaaaggcacattggtgcatgtgtgtttgctagctcacttgtccatgaaaatattttatgatattaaagaaaatcttttgaaatggctgttttttaaggaagagaatttatgtggcttctcatttttaaatcccctcagaggtgtgactagtctctttatcagcacacacttaaaaaatttttaatattgtctattaaaaataggacaaacttggagagtatggacaactttgatattgcttggcacagatggtattaaaaaaaccacactcctatgac

SEQ ID NO: 381007 - DNA, 782 bp, Homo Sapiens
ttggcttggttccgcgttccctgcacaaaatgcccggcgaagccacagaaaccgtccctgctacagagcaggagttgccgcagccccaggctgagacagggtctggaacagaatctgacagtgatgaatcagtaccagagcttgaagaacaggattccacccaggcaaccacacaacaagcccagctggcggcagcagctgaaatcgatgaagaaccagtcagtaaagcaaaacagagtcggagtgaaaagaaggcacggaaggctatgtccaaactgggtcttcggcaggttacaggagttactagagtcactatccggaaatctaagaatatcctctttgtcatcacaaaaccagatgtctacaagagccctgcttcagatacttacatagtttttggggaagccaagatcgaagatttatcccagcaagcacaactagcagctgctgagaaattcaaagttcaaggtgaagctgtctcaaacattcaagaaaacacacagactccaactgtacaagaggagagtgaagaggaagaggtcgatgaaacaggtgtagaagttaaggacatagaattggtcatgtcacaagcaaatgtgtcgagagcaaaggcagtccgagccctgaagaacaacagtaatgatattgtaaatgcgattatggaattaacaatgtaaccatatggaagcaactttttttggggtctcaaagagtaactgcagcttggtttgaaattttgtactggttctatcataaataaagttatggcttcttgttggatg

SEQ ID NO: 381008 - DNA, 991 bp, Homo Sapiens
ttggcgggggagcagcgagcgggcttccgcgagccggagaaggcacaggcctgtcccgggtcccggcaggtctgcgcgtctgttcccagcgctctgcgaggcctaaaaaggaggagcaacctgtccagaatccctgcaggacaggaaaaggaggggaaatctcgacatggaaaaaccctacaataaaaatgaaggaaacctggaaaacgagggaaagccagaagatgaagtagagcctgatgatgaaggaaagtcagacgaggaagaaaagccagacgtggaggggaagacagaatgcgagggaaagagagaggatgagggagagccaggtgatgagggacaactggaagatgagggaagccaggaaaagcagggcaggtccgaaggtgagggcaagccacaaggcgagggcaagccagcctcccaggcaaagccagagagccagccgcgggccgccgaaaagcgcccggctgaagattatgtgccccggaaagcaaaaagaaaaacggacagggggacggacgattcccccaaggactctcaggaggacttacaggaaaggcatctgagcagtgaggagatgatgagagaatgtggagatgtgtcaagggctcaagaggagctaaggaaaaaacagaaaatgggtggttttcattggatgcaaagagatgtacaggatccattcgccccaaggggacaacggggtgtcaggggagtgaggggtggaggtaggggccagaggggcttacacgatatcccatacctttaatgcctttggccttccattctgatttctctgatgagaatattgctggccctgctttccctggtaggtatttgccaggcccaatgctttaaccttaagctgatactttgctttagatgtcagtctcgttaccagcagccttttgacccaactacggcgctctatattttagtagaaggatttttcacccatgtgcatggaaaaagatgttcatgggtacattgt

SEQ ID NO: 381009 - DNA, 844 bp, Homo Sapiens
  misc_feature (92)..(141): n is a, c, g, or t
ttggcggaacccggcgctcgttccccaccccggccggccgcccatagccagccctccgtcacctcttcaccgcaccctcggactgccccaannnnnnnnnnnnnnnnnnnnnnnnnnnnnnnnnnnnnnnnnnnnnnnnnntctccttagtcgccgccatgacgaccgcgtccacctcgcaggtgcgccagaactaccaccaggactcagaggccgccatcaaccgccagatcaacctggagctctacgcctcctacgtttacctgtccatgtcttactactttgaccgcgatgatgtggctttgaagaactttgccaaatactttcttcaccaatctcatgaggagagggaacatgctgagaaactgatgaagctgcagaaccaacgaggtggccgaatcttccttcaggatatcaagaaaccagactgtgatgactgggagagcgggctgaatgcaatggagtgtgcattacatttggaaaaaaatgtgaatcagtcactactggaactgcacaaactggccactgacaaaaatgacccccatttgtgtgacttcattgagacacattacctgaatgagcaggtgaaagccatcaaagaattgggtgaccacgtgaccaacttgcgcaagatgggagcgcccgaatctggcttggcggaatatctctttgacaagcacaccctgggagacagtgataatgaaagctaagcctcgggctaatttccccatagccgtggggtgacttccctggtcaccaagcagtgcatgcatgttggggtttcctttacttttctataagttgtaccaaaacatccacttaagttctttgatttgtaccattc

SEQ ID NO: 381010 - DNA, 869 bp, Homo Sapiens
  misc_feature (94)..(156): n is a, c, g, or t
ttgggaacccggcgctcgttccccaccccggccggccgcccatagccagccctccgtcacctcttcaccgcaccctcggactgccccaaggccnnnnnnnnnnnnnnnnnnnnnnnnnnnnnnnnnnnnnnnnnnnnnnnnnnnnnnnnnnnnnnnatgacgaccgcgtccacctcgcaggtgcgccagaactaccaccaggactcagaggccgccatcaaccgccagatcaacctggagctctacgcctcctacgtttacctgtccatgtcttactactttgaccgcgatgatgtggctttgaagaactttgccaaatactttcttcaccaatctcatgaggagagggaacatgctgagaaactgatgaagctgcagaaccaacgaggtggccgaatcttccttcaggatatcaagaaaccagactgtgatgactgggagagcgggctgaatgcaatggagtgtgcattacatttggaaaaaaatgtgaatcagtcactactggaactgcacaaactggccactgacaaaaatgacccccatttgtgtgacttcattgagacacattacctgaatgagcaggtgaaagccatcaaagaattgggtgaccacgtgaccaacttgcgcaagatgggagcgcccgaatctggcttggcggaatatctctttgacaagcacaccctgggagacagtgataatgaaagctaagcctcgggctaatttccccatagccgtggggtgacttccctggtcaccaaggcagtgcatgcatgttggggtttcctttaccttttctataagttgtaccaaaacatccacttaagttctttgatttgtaccattccttcaaataaagaaatttggtaccc

SEQ ID NO: 381011 - DNA, 853 bp, Homo Sapiens
  misc_feature (114)..(179): n is a, c, g, or t
ttggcctgcttcaacagtgcttggacggaacccggcgctcgttccccaccccggccggccgcccatagccagccctccgtcacctcttcaccgcaccctcggactgccccaagnnnnnnnnnnnnnnnnnnnnnnnnnnnnnnnnnnnnnnnnnnnnnnnnnnnnnnnnnnnnnnnnnnatgacgaccgcgtccacctcgcaggtgcgccagaactaccaccaggactcagaggccgccatcaaccgccagatcaacctggagctctacgcctcctacgtttacctgtccatgtcttactactttgaccgcgatgatgtggctttgaagaactttgccaaatactttcttcaccaatctcatgaggagagggaacatgctgagaaactgatgaagctgcagaaccaacgaggtggccgaatcttccttcaggatatcaagaaaccagactgtgatgactgggagagcgggctgaatgcaatggagtgtgcattacatttggaaaaaaatgtgaatcagtcactactggaactgcacaaactggccactgacaaaaatgacccccatttgtgtgacttcattgagacacattacctgaatgagcaggtgaaagccatcaaagaattgggtgaccacgtgaccaacttgcgcaagatgggagcgcccgaatctggcttggcggaatatctctttgacaagcacaccctgggagacagtgataatgaaagctaagcctcgggctaatttccccatagccgtggggtgacttccctggtcaccaaggcagtgcatgcatgttggggtttcctttaccttttctataagttgtaccaaaacatccacttaagttcttt

SEQ ID NO: 381012 - DNA, 925 bp, Homo Sapiens
gtacaaaaaagttgggacttcccggtggagtgaggaacccagcaacacgctcctgacttcccttcccaaggactcgacctgagaaccgccatgtactcggagatccagagggagcgggcagacattgggggcctgatggcccggccagaatacagagagtggaatccggagctcatcaagcccaagaagctgctgaaccccgtgaaggcctctcggagtcaccaggagctccaccgggagctgctcatgaaccacagaaggggccttggtgtggacagcaagccagagctgcagcgtgtcctagagcaccgccggcggaaccagctcatcaagaagaagaaggaggagctggaagccaagcggctgcagtgcccctttgagcaggagctgctgagacggcagcagaggctgaaccagctggaaaaaccaccagagaaggaagaggatcacgcccccgagtttattaaagtcagggaaaacctgcggagaattgccacactgaccagcgaagagagagagctgtagggccagctgccgggctcaggccactgcccaccctggcctggacagcctccttcagcccttctgtacctggcagccctgggccccaggccctgggacgtctgtgatgttcccacctgcttctgtagaaatgtgtcaccccagagggcctggctctccctgggaggctggggcccctaagctcctaggttttccttccaagcacccagccctcctgctccaagagggataacctgcacccctccctgcaaggggttcagagcccagcacaggagctttctctggcagaattgaggaggaagaggtggccctctgacttgacaagccttctgttctgcccaggccttcccaccaggaatctccgaggctccccagggcgcgcttctccgtacaccccagctcc

SEQ ID NO: 381013 - DNA, 1351 bp, Homo Sapiens
ttgtacaaaaaagttggaaggactcgacctgaaaaccgccatgtactcggagatccagagggagcgggcagacattgggggcctgatggcccggccagaatacagagagtggaatccggagctcatcaagcccaagaagctgctgaaccccgtgaaggcctctcggagtcaccaggagctccaccgggagctgctcatgaaccacagaaggggccttggtgtggacagcaagccagagctgcagcgtgtcctagagcaccgccggcggaaccagctcatcaagaagaagaaggaggagctggaagccaagcggctgcagtgcccctttgagcaggagctgctgagacggcaacagaggctgaaccagctggaaaaaccaccagagaaggaagaggatcacgcccccgagtttattaaagtcagggaaaacctgcggagaattgccacactgaccagcgaagagagagagctgtagggccagctgccgggctcaggccactgcccaccctggcctggacagcctccttcagcccttctgtacctggcagccctgggccccaggccctgggacgtctgtgatgttcccacctgcttctgtagaaatgtgtcaccccagagggcctggctctccctgggaggctggggcccctaagctcctaggttttccttccaagcacccagccctcctgctccaagagggataacctgcacccctccctgcaaggggttcagagcccagcacaggagctttctctggcagaattgaggaggaagaggtggccctctgacttgacaagccttctgttctgcccaggccttcccaccaggaatctccgaggctccccagggccccgcttctccgtacaccccagctcctaggtctcagagaactcccccacctgtggttttacctgcagccagcagagcttagcttcaaggacacctgccttcaaagccactgaggggaggaagggcagggcagactgcaggtggccttgttgctggcatcccggccaggtgggcggggactaacaaagacagctgtttagggtcttctcccctcacccatgctttcatcatcccctccgcacagcctccccgtccaggccttctaaccacacctacccagggctgccgcattcctgcactcagaagtctgcagcggtgcctcacaaacttgattgtgcataaaaatcactggggatcttgttaatacagcttctaactcaatagatctgggagatcctgcatttctaacaagctcccaggtaaggcggaggctgctggtgtgaggaccatgctgtgagcagcacggccgagagtgcccagggcatatatatattggaaatat

SEQ ID NO: 381014 - DNA, 940 bp, Homo Sapiens
actttgtacaaaaaagttggggcagcggctgcagcgctctcgtcttctgcggctctcggtgccctctccttttcgtttccggaaacatggcctccggtgtggctgtctctgatggtgtcatcaaggtgttcaacgacatgaaggtgcgtaagtcttcaacgccagaggaggtgaagaagcgcaagaaggcggtgctcttctgcctgagtgaggacaagaagaacatcatcctggaggagggcaaggagatcctggtgggcgatgtgggccagactgtcgacgatccctacgccacctttgtcaagatgctgccagataaggactgccgctatgccctctatgatgcaacctatgagaccaaggagagcaagaaggaggatctggtgtttatcttctgggcccccgagtctgcgccccttaagagcaaaatgatttatgccagctccaaggacgccatcaagaagaagctgacagggatcaagcatgaattgcaagcaaactgctacgaggaggtcaaggaccgctgcaccctggcagagaagctggggggcagtgccgtcatctccctggagggcaagcctttgtgagccccttctggccccctgcctggagcatctggcagccccacacctgcccttgggggttgcaggctgcccccttcctgccagaccggaggggctggggggatcccagcagggggagggcaatcccttcaccccagttgccaaacagaccccccaccccctggattttccttctccctccatcccttgacggttctggccttcccaaactgcttttgatcttttgattcctcttgggctgaagcagaccaagttccccccaggcaccccagttgtgggggaagcctgtattttttttaacaacatccccattccccacctggtcctcccccttcccatgctgccaacttctaacc

SEQ ID NO: 381015 - DNA, 983 bp, Homo Sapiens
tttatttttttaaagcaggtgattattcctctgtgttctgcatcttgattcacttcctgcaggtgttctcttgcttcttgagagagaattcataaatgcaggaaggcctttgccagaaaacatctttaataaataaagagaactctggtcctggggagatttgagaaagtttctggcatcttccgaacttttgcataattgataaatcctctgagaaacaggagaaagcctaaaacaaggaacacccaccagagccagtactgaccatcaaaatatccagggaaataggtggaaaacctgacaatcaggatccatttaattagagagagaccaaatcctgaaatggccccataccttcctgcagctgaagtggtcaggcaaaaagacaggaaaaacccaatccagttaaagaggaatgccatgaaaaaagttaacatgaaaatcccatcatttcctatcctcagctggtcagcatcatcaaaatcatcccgacccacaaaatcctcatctctcccaggaaccaaagggatagtagcttcagccttggtcctctccgcttcatcataactgggcagtgttgtagctacattgtaagatgggggctttggaaacccagactcatccttgtagtcaaaatatgctgcgctctctgcagaaatgctgctgtaaggtggaggagcatcacctgcagcctgttcaggttctccagactcttcttcattctgcaactgctggtaccggctgccgcaggccggctcgaccgccgccagcgccgccaacgccaacgccatggcgcagccggcagcagggaagcagagcgagcgagcgagctagctgaaggggcgcggccgctgcggcttgggagcgctgggaggccgagggggacgcgccttgggtgggtctcgatggccgccgccgctcccgggcgagacgctcttctcaggctgtaagcaccgccgccgccgccgaggctccgacgccaa

SEQ ID NO: 381016 - DNA, 1114 bp, Homo Sapiens
aaaaactcaaggaaaatataggcatccccactgttttaagaacagtcagaaatgtattaaggtgtcaaatgaagattgttactaacgaacaaaaaaggagagtcatttgaactgtcagtaagatggcaacgtggggaagggtgtcctaagtgcctggaaacacgcacagcaatgctaaggacatgggagggtagagtgatgctgaaacacagtcaacaccaaccagaaaggacgggaatgtctgtgaggctgctgaaaagagacccccaacgctaatgtgccttatgggtccatgggcagacgctgaacgctggcaaaaccgggtggccgttcttgcactactcgggttctgactgcaggaggggcagagggtggtcgatgtcctagtccctgtgtctaaaaagtcatgaggggacagagtacaacaggcagcacgttaagtccctgggctcttttccaaagccaagaggaggctccctggagaagcgagctttgcgaatgctcaggcccggagccgcacactaacgcggcgtgcagcaggtgtggctgggtgtgcacagctggcgtccagcgacagccatgccgggcctatgcctatagcgagtgtacaccccatgcacggccatcccccaggatgctgctgcttctctggccagatgggttctggaatgaggcttctgctactgctccatattcaccttcaatctggcctggccactcccatggcatccgtattactgaagatgagacttgccaactttaagttgctagtaccaatatttcagcagggatatgaatgaaagaaataacaacttagctcatggtcataaaatatacgtatgggtaaataaagtatacacacatactagagattcatcaatggagaaattctatcatcacatgacattgtcatgaaaattatatcattccctccctggaaaactgtgactattatcctgggtagaaatgttattttgctatatggaaatactgcaatattcatgcataaaccaagttgtcatcatgaaagtcggtattctacagcataaagcaaaacctctgtgcgaatttgttaccatgaaaacgggaaaccatcaggacccatgatgcccaa

SEQ ID NO: 381017 - DNA, 489 bp, Homo Sapiens
ttggcggaggtggcagccatctccttctcggcatcatggccgccctcagaccccttgtgaagcccaagatcgtcaaaaagagaaccaagaagttcatccggcaccagtcagaccgatatgtcaaaattaagcgtaactggcggaaacccagaggcattgacaacagggttcgtagaagattcaagggccagatcttgatgcccaacattggttatggaagcaacaaaaaaacaaagcacatgctgcccagtggcttccggaagttcctggtccacaacgtcaaggagctggaagtgctgctgatgtgcaacaaatcttactgtgccgagatcgctcacaatgtttcctccaagaaccgcaaagccatcgtggaaagagctgcccaactggccatcagagtcaccaaccccaatgccaggctgcgcagtgaagaaaatgagtaggcagctcatgtgcacgttttctgtttaaataaatgtaaaaactgcc

SEQ ID NO: 381018 - DNA, 677 bp, Homo Sapiens
gtacaaaaaagttggcggctgggaacctataaaacaagctgacggatgagatggtgatgatcatggggggcaagatggaggccacacccttcaagtggttcatggagatgtgtgtccgaggctacctggctgtgcggccctacatggatgtggtcgtctccctggtcactatcatgttggacacgggcctgccctgttttcgcggccaatcaagttcttgaagcacaggtttagccccaacatgactgagcgcgaggctgcaaatttcatcatgaaggtcatccagagctgcttcctcagcaacaggagccggacctacaacatgatccagtactatcagaatgacatcccctactgaggaggggaccttcgagggcctctgccccatgtgcccttgaagctgccccacaatcatggagccctgcgacctacccgccctgccgccacatgcagtggaggagaggcctgtggcccgaagagcctggtagcgcctcctggggcagcacgtgggtggcgcaggcttagtaacgccgtggactgcagcgacaatcaatggatggtgctgtctatgcacaggtgtgagtcctctgtttgcactggacatattccctaactgttttatttcataacgtacatgaagtattgtgtataataaaagaaataagatttaacccaac

SEQ ID NO: 381019 - DNA, 951 bp, Homo Sapiens
ttggctgaggagctgctgcgacagtccactacctttttcgagagtgactcccgttgtcccaaggcttcccagagcgaacctgtgcggctgcaggcaccggcgcgtcgagtttccggcgtccggaaggaccgagctcttctcgcggatccagtgttccgtttccagcccccaatctcagagccgagccgacagagagcagggaaccggcatggccaaagccgcggcgatcggcatcgacctgggcaccacctactcctgcgtgggggtgttccaacacggcaaggtggagatcatcgccaacgaccagggcaaccgcaccacccccagctacgtggccttcacggacaccgagcggctcatcggggatgcggccaagaaccaggtggcgctgaacccgcagaacaccgtgtttgacgcgaagcggctgatcggccgcaagttcggcgacccggtggtgcagtcggacatgaagcactggcctttccaggtgatcaacgacggagacaagcccaaggtgcaggtgagctacaagggggagaccaaggcattctaccccgaggagatctcgtccatggtgctgaccaagatgaaggagatcgccgaggcgtacctgggctacccggtgaccaacgcggtgatcaccgtgccggcctacttcaacgactcgcagcgccaggccaccaaggatgcgggtgtgatcgcggggctcaacgtgctgcggatcatcaacgagcccacggccgccgccatcgcctacggcctggacagaacgggcaagggggagcgcaacgtgctcatctttgacctgggcgggggcaccttcgacgtgtccatcctgacgatcgacgacggcatcttcgaggtgaaggcacggccggggacacccacctgggtggggaggactttgacaacaggctggtgaaccacttcgtggaggagttcaagagaaaa

SEQ ID NO: 381020 - DNA, 1059 bp, Homo Sapiens
ttggcactgggaagcctggtctggggcccgggacaggccagcccaccagtcggtggcatgctgtccctccacagcacactctggggtcggtccccggcagcagcatcgccctcaggccccgcccaggagagccaggcagggacttggcctccagtgaaaatggcactgagtgccgcagtggctttgtgcggcataacggctcctgccggtcagtgtgcgacctcttcccaagttactgtcacaatggcggccagtgctacctggtggagaacataggggccttctgcaggtgcaacacgcaggactacatctggcacaaggggatgcgctgcgagtccatcatcaccgacttccaggtgatgtgcgtggccgtgggctcggctgccctcgtcctgctcctgctcttcatgatgacggtgttctttgccaagaagctctacctgctcaagacggagaataccaagctgcgtaggaccaacaaattccggaccccatctgagctccacaatgataacttctccctctccaccattgccgagggctctcacccaaatgtaaggaaactttgcaacactccccgtacctcctccccccatgcccgtgccttggctcactatgataacgttatctgtcaggatgatcctagtgctccccacaaaatccaggaggttctcaagtcctgcctgaaagaggaggagtcatttaacatccagaactccatgtcgcccaaacttgagggtggcaaaggtgaccaggctgacttggatgtgaactgtcttcagaataatttaacctaaagcagagcaagaagagaggaagcgggggtagtgggtggggggtaggggaagaaacattatctcctcttgtacagagtctatttcttgtaaccatttgttaaactcttttctttttctgatctcatggcatgcttttatgtattttgtacaggaggcaaaaaatacttaaaataagcaaagaaactgaccagaattgcatacattgggttgttttttctgtgctgtctgtacattgcttctgctgctgtgatttctaaaactg

SEQ ID NO: 381021 - DNA, 933 bp, Homo Sapiens
attactctgatcgatattaaatcgtattgaaaacaaaatggactaaaaagcaaatactactctatgttggggtggaagtgggaggaaagaatgagtccttcgaagcaggaagggagatagcaggggaaaggttctgtgcctgtgacttgggcggtcactcacgttgctccatttttactttcggtggtctcaggaaggtccgatttttcttctctttcttccccttcgtattggcttggaagtttcgccagctgtccacacgaccatctcgactttcctcaaagtttttctgccactctctttcccgtttggctttttcttgagcttcaatctcttcttccctttgtcgtttcctttcatgcatctctttggcttctctctctttccttttaatttccagctctgcaaagagtttcattgtctgtttatatacagcttgtttgaacagctcaggatcatcctcctctacaattgtaggttttccttccttctttaattgtttttttcgctctttcacagtgtgttccacgtattcttttcctgcctgaattacatccagggccctcttcttttgctcctgatccagtagcaacttgtaagctttgtccacagcttcaaaagccttttgtgctctgtcagcatcatcttgatttttgtcaggatgcaccaagatggataactgccgaaacctcttttttatttcttcatctgtaacttcaggatctatctgaagaacctcaaatgggttcaaattgaagtaagaggaaccaggacgggtcagtctttcaatctgatttttcgaagttagaaccgagtctctcttctctatttgtttcacctcactgtagaaggtcataaatgcttcctcggtgctgcctccgccgcctgaagtcccgctctctcctgaagccgccccaacttttttgtacaaag

SEQ ID NO: 381022 - DNA, 578 bp, Homo Sapiens
ttggcgcctcggaggcgttcagctgcttcaagatgaagctgaacatctccttcccagccactggctgccagaaactcattgaagtggacgatgaacgcaaacttcgtactttctatgagaagcgtatggccacagaagttgctgctgacgctctgggtgaagaatggaagggttatgtggtccgaatcagtggtgggaacgacaaacaaggtttccccatgaagcagggtgtcttgacccatggccgtgtccgcctgctactgagtaaggggcattcctgttacagaccaaggagaactggagaaagaaagagaaaatcagttcgtggttgcattgtggatgcaaatctgagcgttctcaacttggttattgtaaaaaaaggagagaaggatattcctggactgactgatactacagtgcctcgccgcctgggccccaaaagagctagcagaatccgcaaacttttcaatctctctaaagaagatgatgtccgccagtatgttgtaagaaagcccttaataaagaaggtaagaaacctaggaccaaagcacccaagattcagcgtcttgttactccac

SEQ ID NO: 381023 - DNA, 1268 bp, Homo Sapiens
  misc_feature (1071)..(1081): n is a, c, g, or t
tggacaaaaaagttgggccggagccggagccggagcgcgcgagctcgcagggcgcgaggaacgagcggtggctggctacgcacccgagacccgggcactgctgcgctcctgctcaggacccgcgacccgagcgcctgatcccggccctatccctcctccggcccctggtccaccccggcctggcctagcggagcccccgcgtccgcccgccgcagccgccgctccatccccagccccggccccgcatccaggccgccaggatggacgtgttcatgaagggcctgtccatggccaaggagggcgttgtggcagccgcggagaaaaccaagcagggggtcaccgaggcggcggagaagaccaaggagggcgtcctctacgtcggaagcaagacccgagaaggtgtggtacaaggtgtggcttcagtggctgaaaaaaccaaggaacaggcctcacatctgggaggagctgtgttctctggggcagggaacatcgcagcagccacaggactggtgaagagggaggaattccctactgatctgaagccagaggaagtggcccaggaagctgctgaagaaccactgattgagcccctgatggagccagaaggggagagttatgaggacccaccccaggaggaatatcaggagtatgagccagaggcgtaggggcccaggagagcccccaccagcagcacaattctgtccctgtccctgccccgccccccagagccagggctgtccttagactccttctccccaatcacgagatcttccttccgctctgaggcaaccccctcggagcctgtgttagtgtctgtccatctgtctgtcctacccgcccgcgtccaaccccggggcatggacagggccagggttgcggtcgcggctgggagcctcgcccctccagtgttgcctcctcccatccagcgtctgcgcggatgtagcatgttctatgtgtttttaaacgaagatccgagcgacggctcctccccgatccccgacagtggctctccaagcggcccccgggcagccccagagcaccccgcccgactcccattaacctcgagaaccnnnnnnnnnnnaaccaaaaccaggagccaggctgtgccatgtcccccgccccccatcccagccggcccggtccgaacgcgggcgtcgtgtgttgtgattgtggcatggagagtccccatcccccccatgtgagcgtgtcccgggcgggtgggcccggccgccccccgagagtccatgaataaagctaatctgtctgta

SEQ ID NO: 381024 - DNA, 920 bp, Homo Sapiens
ctttgtacaaaaaagttggggcggttgggccttttgggtgagcttgtttgtgtccctgtgggtggacgtggttggtgattggcaggatcctggtatccgctaacaggtcaaaatgcagatcttcgtgaaaacccttaccggcaagaccatcacccttgaggtggagcccagtgacaccatcgaaaatgtgaaggccaagatccaggataaggaaggcattccccccgaccagcagaggctcatctttgcaggcaagcagctggaagatggccgtactctttctgactacaacatccagaaggagtcgaccctgcacctggtcctgcgtctgagaggtggtatgcagatcttcgtgaagaccctgaccggcaagaccatcaccctggaagtggagcccagtgacaccatcgaaaatgtgaaggccaagatccaggataaagaaggcatccctcccgaccagcagaggctcatctttgcaggcaagcagctggaagatggccgcactctttctgactacaacatccagaaggagtcgaccctgcacctggtcctgcgtctgagaggtggtatgcagatcttcgtgaagaccctgaccggcaagaccatcactctggaggtggagcccagtgacaccatcgaaaatgtgaaggccaagatccaagataaagaaggcatcccccccgaccagcagaggctcatctttgcaggcaagcagctggaagatggccgcactctttctgactacaacatccagaaagagtcgaccctgcacctggtcctgcgcctgaggggtggctgttaattcttcagtcatggcattcgcagtgcccagtgatggcattactctgcactatagccatttgccccaacttaagtttagaaattacaagtttcagtaatagctgaacctgttcaaaatg

SEQ ID NO: 381025 - DNA, 1002 bp, Homo Sapiens
ttggtgggtcgcggttcttgtttgtggatcgctgtgatcgtcacttgacaatgcagatcttcgtgaagactctgactggtaagaccatcaccctcgaggttgagcccagtgacaccatcgagaatgtcaaggcaaagatccaagataaggaaggcatccctcctgaccagcagaggctgatctttgctggaaaacagctggaagatgggcgcaccctgtctgactacaacatccagaaagagtccaccctgcacctggtgctccgtctcagaggtgggatgcaaatcttcgtgaagacactcactggcaagaccatcacccttgaggtggagcccagtgacaccatcgagaacgtcaaagcaaagatccaggacaaggaaggcattcctcctgaccagcagaggttgatctttgccggaaagcagctggaagatgggcgcaccctgtctgactacaacatccagaaagagtctaccctgcacctggtgctccgtctcagaggtgggatgcagatcttcgtgaagaccctgactggtaagaccatcaccctcgaggtggagcccagtgacaccatcgagaatgtcaaggcaaagatccaagataaggaaggcattcctcctgatcagcagaggttgatctttgccggaaaacagctggaagatggtcgtaccctgtctgactacaacatccagaaagagtccaccttgcacctggtactccgtctcagaggtgggatgcaaatcttcgtgaagacactcactggcaagaccatcacccttgaggtcgagcccagtgacactatcgagaacgtcaaagcaaagatccaagacaaggaaggcattcctcctgaccagcagaggttgatctttgccggaaagcagctggaagatgggcgcaccctgtctgactacaacatccagaaagagtctactcctgcacctggtgctccgtctcagaagtgggatgcagatcttcgtgaagaccctgactggtaagaccatc

SEQ ID NO: 381026 - DNA, 1310 bp, Homo Sapiens
atagccaactttgtacaaaaaagttggccagagcggtgctcaccgccgccgcgtccaccctcagcgccaccgccatgcgggagatcgtgcacctgcaggccggccagtgcggcaaccagatcggggccaagttttgggaggttatcagtgacgaacatggcatcgaccccacaggcacataccatggggacagtgacctgcaactggagaggatcaacgtgtactacaacgaggccacaggaggaaattatgtccccagagcggtgctggtggacctggaacccggcaccatggactctgtccgttctggccccttcggtcagatctttcggccggacaacttcgtgtttggccaatccggagccggcaacaactgggcaaaggggcactacacggagggcgcagagctggtggacgctgtcctggacgtagtccggaaggaggccgagagctgcgactgccttcagggcttccagctgacccactcgctggggggtggcacggggtccggaatgggcacgctgctcatcagtaagatccgcgaggagttcccagaccgcatcatgaacaccttcagcgtggtgccctcgcccaaagtgtcagacacggtggtggagccctacaacgccacgctgtctgtgcaccagctggtggagaatacggatgagacctactgcatcgacaacgaggcactctacgacatctgtttccgcaccctcaagctgaccacccccacctacggggacctcaaccacctggtgtcggccaccatgagcggggtcaccacctgcctgcgcttcccgggccagctgaacgccgacctgcgcaagctggccgtcaacatggttccctttcctcgcctgcacttcttcatgcccggcttcgcacccctgaccagccggggcagccagcagtaccgggccctgacggtgcccgagctcacccagcagatgttcgatgccaagaacatgatggcggcgtgcgacccgcgccacggccgctacctgaccgtggccgccgtgttccggggccgcatgtccatgaaggaggtggacgagcagatgctgagcgtgcagagcaagaacagcagctacttcgtggagtggatccccaacaacgtgaagacggccgtgtgcgacatcccgccccgcggcctgaagatggccgcgaccttcatcggcaacagcacggccatcaaggagctgttcaagcgcatctccgagcagttcacggccatgttccggcgcacggccttcttgcactggtacacgggcgagggcatgggacgagatggagttcaccgaggccga

SEQ ID NO: 381027 - DNA, 878 bp, Homo Sapiens
ttggaaatagttctgcaggttgaagccatgtctacatgaaagtcctcagtaagtgttagagggaacagggcggagatatccttatgccacccccgctggaggatgtgggcagcttagggccctggaggcggtgcggcagggaagaggggtgcagaggctgtggctggtgagccggtcaggcacacaaggggcccttggagcgtggactggttggttttgccattttgttgtgtgtatgctgcttttcttttctaaccaagaggctggttttggcatctctgtcccattccctgggatctggtggtcagccctaggataaaaagccagggctggagaacaagaaagggccaggagatggaattccttcaggccggcacccacaccctaggacatgtaagccctcatgtccaagagagcctcatgcagatagtaggaaatcaggtctggaaatttaaaaataaaaggcatgagactaaggctatctgcttcccttatgccctgactggagaggggagggaggagaggcaaggcccacagagggcatcccagctaggccttgggatggctgcagtgaggagaaatcccgggaactgtattgacacaaagattcttattgcacttgtattttttgtattaaagtttgcatggtttctaataaaggattcaaacataagtttgtagtgaaatggcctgggagattccaagggcttctctggagggggattggctgcagtgtagatttgcctctgaggaggctgccccagacttggcctcctcatgccccctcctgacctctgcccttctctggtcctggcatccctggagaagtaggggtcttgacctaagtttagatttgatctccatgtgcacggaggctg

SEQ ID NO: 381028 - DNA, 828 bp, Homo Sapiens
ttggcaagacctgccatctgccagtgctcacacaccaatctctctagccctcagtacagtcctgcaagaggggggtcatgaggcccattccacagataaggaaactgaggcccaaagtctgggcatgctgcgttgctctgggaaggtgatctgcagggtaaatggagtgagggcagggggccgaatggggagaggctgggagccgaggaggtaggagtcattgtgccctcagagccaaccacctgatttctgcatctgtcaaatagtaatagccccttcctatgcctcaaaggatttttttcaagaatgaaactgtaaaattcactttaaagtgacatgatccgttcccggagggacaggggaatccccagtgcaccatacaccaataacccctgctaaggcagcagtattaattgctcaaccttccgcacctgtgcactaactgctcacgttgttcccaccctaccccacccaggactatgctgtggggtacatgttgaggctgggggctcctgccagtaagctggtgatgggcatccccaccttcgggaggagcttcactctggcttcttctgagactggtgttggagccccaatctcaggaccgggaattccaggccggttcaccaaggaggcagggacccttgcctactatgaggtaatggagttggggagaaggtaggattcccccacaccaccagcagccctggggaaaggtgattccccaccacgttcttgctttttctcctttgggaataaagaaaatgtccggttgccccaccatgcctgaagaagtggaaaggagagttaggacatttgttgctgaaa

SEQ ID NO: 381029 - DNA, 1306 bp, Homo Sapiens
ttggttgtggccgcgttgccgacctccagcagcagtcggcttctctacgcagaacccgggagtaggagactcagaatcgaatctcttctccctccccttcttgtgagatttttttgatcttcagctacattttcggctttgtgagaaaccttaccatcaaacacgatggccagcaacgttaccaacaagacagatcctcgctccatgaactcccgtgtattcattgggaatctcaacactcttgtggtcaagaaatctgatgtggaggcaatcttttcgaagtatggcaaaattgtgggctgctctgttcataagggctttgccttcgttcagtatgttaatgagagaaatgcccgggctgctgtagcaggagaggatggcagaatgattgctggccaggttttagatattaacctggtgcagagccaaaagtgaaccgaggaaaagcaggtgtgaaacgatctgcagcggagatgtacggctcctcttttgacttggactatgactttcaacgggactattatgataggatgtacagttacccagcacgtgtacctcctcctcctcctattgctcgggctgtagtgccctcgaaacgtcagcgtgtatcaggaaacacttcacgaaggggcaaaagtggcttcaattctaagagtggacagcggggatcttccaagtctggaaagttgaaaggagatgaccttcaggccattaagaaggagctgacccagataaaacaaaaagtggattctctcctggaaaacctggaaaaaattgaaaaggaacagagcaaacaagcagtagagatgaagaatgataagtcagaagaggagcagagcagcagctccgtgaagaaagatgagactaatgtgaagatggagtctgaggggggtgcagatgactctgctgaggagggggacctactggatgatgatgataatgaagatcggggggatgaccagctggagttgatcaaggatgatgaaaaagaggctgaggaaggagaggatgacagagacagcgccaatggcgaggatgactcttaagcacatagtggggtttagaaatcttatcccattatttctttacctaggcgcttgtctaagatcaaatttttcaccagatcctctcccctagtatcttcagcacatgctcactgttctccccatccttgtccttcccatgttcattaattcatattgccccgcgcctagtcccattttcacttcctttgacgctcctagtagttttgttaagtcttaccctgtaatttttgcttttaattttgatacctctttatgactta

SEQ ID NO: 381030 - DNA, 637 bp, Homo Sapiens
ttgtacaaaaaagttggttcttccccaaccgagtctaaagccttcaccaccggctctgacgacgccacgtgccgcctcttcgacctgcgggccgatcaggagctcctcatgtactcccatgacaacatcatctgtggcatcacctctgttgccttctcgcgcagcggacggctgctgctcgctggctacgacgacttcaactgcaacatctgggatgccatgaagggcgaccgtgcaggagtcctcgctggccacgacaaccgcgtgagctgcctcggggtcaccgacgatggcatggctgtggccacgggctcctgggactccttcctcaagatctggaactaatggccccacccccactgggcccaggccaggaggggccctgcccatgcccacactacaggccagggctgcggggctggcgcaatcccagcccccttccccgggccacggggccttgggtccctgccctcccacccaggtttggttcctcccggggcccccactgtggagataagaaggggatggaatgggggaagaggaggagcaggaggccctcatccttctgctgccctggggttggggcctcacccctctggagggccggaggcaggaggtggaaaccccaggggctggc

SEQ ID NO: 381031 - DNA, 313 bp, Homo Sapiens
tttgtacaaaaaagttgggtcgcggcgacctggccaaacgtaccaagaaagtcgggatcgtcggtaaatacgggacccgctatggggcctccctccggaaaatggtgaagaaaattgaaatcagccagcacgccaagtacacttgctctttctgtggcaaaaccaagatgaagagacgagctgtggggatctggcactgtggttcctgcatgaagacagtggctggcggtgcctggacgtacaatacctcttccgctgtcacggtaaagtccgccatcagaaaaatgaaggagttgaaagaccactacaccct

SEQ ID NO: 381032 - DNA, 1324 bp, Homo Sapiens
ggcaaggggcaccagtcttgatctgcccagtgcacagccccacaaccaggtcagcgatgaaggtatcttcagtctcccccgaacgatgagacaccatgacgccccaaccattggcctgggccagcttgcacgcatgaagagactcggtcacggagccaatctggttgactttgagcaggaggcagttgcaggacttctcgttcacggccttggcgatcctctttgggttggtcactgtgagatcatcccccactacctggattcctgcactggctgtgaacttctgccaagctccccagtcatcctggtcaaagggatcttcgatagacaccactgggtagtccttgatgaaggacttgtacaggtcagccagctggtcaggcgagatgtacctgctggggtcatcgggagacttgaagtccaggtcatacttcccagacctgaagaactcggaggccgctacgtccatgccgatgaccaccttatcagtgtagccagctttcccaatagcagtcttcagcagctccaggccttctttattctccaggatgttgggagcaaacccgccttcatcccccacattggtggcatctttcccatatttctccttgatgacattcttcaggttgtggtaaacctctgctccaatgcgcatggcttccctgaagtttgctgcaccgactgggaggatcatgaactcctgcatggccagcttgttgccagcatgagaaccgccattgatgacattgaacgccgggactggcaggatgacttcagagttgccagccaagtcagcgatgtggcggtacagggggacccccttctcaacggcaccagctttgcagacggcaagggacacccccagaatggcgttcgcaccaaacttagatttattttctgttccatccatctcgatcatcagtttgtcaatcttctcttgttctgtgacgttcagtttcttgctaaccagggcaggcgcaatagttttattgatgtgctcaacagcctttgagacacccttccccatatagcgagtcttatcattgtcccggagctctagggcctcatagataccagttgaagcaccactgggcacagcagctctgaagagaccttttgaggtgaagagatcaacctcaacagtgggattcccgcgagagtcaaagatctccctggcatggatcttgagaatagacatggtgaacttctagccactgggtctcgtcgcctaggagaggaagcggagggtgctgcagacaccgaggtgaacgtaaagccggcgagatctcctttgctgccgggtacccccaacttttttgtacaa

SEQ ID NO: 381033 - DNA, 470 bp, Homo Sapiens
ttggggcccgggtggtcgctgccgaaatgggcaagttcatgaaacctgggaaggtggtgcttgtcctggctggacgctactccggacgcaaagctgtcatcgtgaagaacattgatgatggcacctcagatcgcccctacagccatgctctggtggctggaattgaccgctacccccgcaaagtgacagctgccatgggcaagaagaagatcgccaagagatcaaagataaaatcttttgtgaaagtgtataactacaatcacctaatgcccacaaggtactctgtggatatccccttggacaaaactgtcgtcaataaggatgtcttcagagatcctgctcttaaacgtaaggcccgacgggaggccaaggtcaagtttgaagagagatacaagacaggcaagaacaagtggttcttccagaaactgcggttttagatgctttgttttgatcattaaaaattataaaga

SEQ ID NO: 381034 - DNA, 1664 bp, Homo Sapiens
ttgtacaaaaaagttggggggaggagcgcgcgggcacagggtgccgctgaccgaggcgtgcaaagactccagaattggaggcatgatgaagactctgctgctgtttgtggggctgctgctgacctgggagagtgggcaggtcctgggggaccagacggtctcagacaatgagctccaggaaatgtccaatcagggaagtaagtacgtcaataaggaaattcaaaatgctgtcaacggggtgaaacagataaagactctcatagaaaaaacaaacgaagagcgcaagacactgctcagcaacctagaagaagccaagaagaagaaagaggatgccctaaatgagaccagggaatcagagacaaagctgaaggagctcccaggagtgtgcaatgagaccatgatggccctctgggaagagtgtaagccctgcctgaaacagacctgcatgaagttctacgcacgcgtctgcagaagtggctcaggcctggttggccgccagcttgaggagttcctgaaccagagctcgcccttctacttctggatgaatggtgaccgcatcgactccctgctggagaacgaccggcagcagacgcacatgctggatgtcatgcaggaccacttcagccgcgcgtccagcatcatagacgagctcttccaggacaggttcttcacccgggagccccaggatacctaccactacctgcccttcagcctgccccaccggaggcctcacttcttctttcccaagtcccgcatcgtccgcagcttgatgcccttctctccgtacgagcccctgaacttccacgccatgttccagcccttccttgagatgatacacgaggctcagcaggccatggacatccacttccacagcccggccttccagcacccgccaacagaattcatacgagaaggcgacgatgaccggactgtgtgccgggagatccgccacaactccgcgggctgcccgcggatgaaggaccagtgtgacaagtgccgggagatcttgtctgtggactgttccaccaacaacccctcccaggctaagctgcggcgggagctcgacgaatccctccaggtcgctgagaggttgaccaggaaatacaacgagctgctaaagtcctaccagtggaagatgctcaacacctcctccttgctggagcagctgaacgagcagtttaactgggtgtcccggctggcaaacctcacgcaaggcgaagaccagtactatctgcgggtcaccacggtggcttcccacacttctgactcggacgttccttccggtgtcactgaggtggtcgtgaagctctttgactctgatcccatcactgtgacggtccctgtagaagtctccaggaagaaccctaaatttatggagaccgtggcggagaaagcgctgcaggaataccgcaaaaagcaccgggaggagtgagatgtggatgttgcttttgcacctacgggggcatctgagtccagctccccccaagatgagctgcagccccccagagagagctctgcacgtcaccaagtaaccaggccccagcctccaggcccccaactccgcccagcctctccccgctctggatcctgcactctaacactcgactctgctgctcatgggaagaacagaattgctcctgcatgcaactaattcaataaaactg

SEQ ID NO: 381035 - DNA, 827 bp, Homo Sapiens
ttgggcgaggagcagcgatggacggtcgggtgcagctgataaaggccctcctggccttgccgatccggcctgcgacgcgtcgctggaggaacccgattccctttcccgagacgtttgacggcgataccgaccgactcccggagttcatcgtgcagacgggctcctacatgttcgtggacgagaacacgttctccagcgacgccctgaaggtgacgttcctcatcacccgcctcacagggcccgccctgcagtgggtgatcccctacatcaagaaggagagccccctcctcaatgattaccggggctttctggccgagatgaagcgagtctttggatgggaggaggacgaggacttctaggccgggagaccctcgggcctgggggcgggtgctctggggagggtccgctgtgttactggccgccgccagggtcgccaccggcgccctccctccgcgcctccctccccctcgagccgccgcgatgtcccctgcgctcctgttccctcccgcgtagtgcttgcctttgttccaggaatagcgctccaggctcctgctgccgcccctgggcctcactctggagcgagccgccgccctctccttccagccagccagcccctcccatgtacatttggacgctgtcctgcgctccagctgcaagctgggctcctgttacacactggacagaccacccactgccgccgctgccaagccctctcctctccaccagactgccagacgactacatcattctgcccacagacctgcgctgccacagccatcgccatccatcgcatcccaccgacagactgctgctcctagtgatctgga

SEQ ID NO: 381036 - DNA, 868 bp, Homo Sapiens
tttgtacaaaaaagttggcccaagatgcccataagagaaagaaggccaagggaaagaaggtggctccggccccagctgtcgtgaagaagcaggaggctaagaaagtggtgaatcccctgtttgagaaaaggcctaagaattttggcattggacaggacatccagcccaaaagagacctcacccgctttgtgaaatggccccgctatatcaggttgcagcggcagagagccatcctctataagcggctgaaagtgcctcctgcgattaaccagttcacccaggccctggaccgccaaacagctactcagctgcttaagctggcccacaagtacagaccagagacaaagcaagagaagaagcagagactgttggcccgggccgagaagaaggctgctggcaaaggggacgtcccaacaaagagaccacctgtccttcgagcaggagttaacaccgtcaccaccttggtggagaacaagaaagctcagctggtggtgattgcacacgacgtggatcccatcgagctggttgtcttcttgcctgccctgtgtcgtaaaatgggggtcccttactgcattatcaagggaaaggcaagactgggacgtctagtccacaggaagacctgcaccactgtcgccttcacacaggtgaactcggaagacaaaggcgctttggctaagctggtggaagctatcaggaccaattacaatgacagatacgatgagatccgccgtcactggggtggcaatgtcctgggtcctaagtctgtggctcgtatcgccaagctcgaaaaggcaaaggctaaagaacttgccactaaactgggttaaatgtacactgttgagttttctgtacataaaaataattgaaa

SEQ ID NO: 381037 - DNA, 1336 bp, Homo Sapiens
ttggcagctgaggccgctactggagaaggtgcagaacatgtctcaatccatagaggtcttggacaggcggacccagagagacttgcagtacgtggagaagatggagaaccaaatgaaaggactggagtccaagttcaaacaggtggaggagagtcataagcaacacctggccaggcagtttaaggcgataaaagcgaaaatggatgaacttaggcctttgatacctgtgttggaagagtacaaggccgatgccaaattggtattgcagtttaaagaggaggtccagaatctgacgtcagtgcttaacgagctgcaagaggaaattggcgcctatgactacgatgaacttcagagcagagtgtccaatcttgaagaaaggctccgtgcatgcatgcaaaaactagcttgcgggaagttgacgggcatcagtgaccccgtgactgtcaagacctccggctcgaggttcggatcctggatgacagaccctctcgcccctgaaggcgataaccgggtgtggtacatggacggctatcacaacaaccgcttcgtacgtgagtacaagtccatggttgacttcatgaacacggacaatttcacctcccaccgtctcccccacccctggtcgggcacggggcaggtggtctacaacggttctatctacttcaacaagttccagagccacatcatcatcaggtttgacctgaagacagagaccatcctcaagacccgcagcctggactatgccggttacaacaacatgtaccactacgcctggggtggccactcggacatcgacctcatggtggacgagagcgggctgtgggccgtgtacgccaccaaccagaacgctggcaacatcgtggtcagtaggctggaccccgtgtccctgcagaccctgcagacctggaacacgagctaccccaagcgcagcgccggggaggccttcatcatctgcggcacgctgtacgtcaccaacggctactcagggggtaccaaggtccactatgcataccagaccaatgcctccacctatgaatacatcgacatcccattccagaacaaatactcccacatctccatgctggactacaaccccaaggaccgggccctgtatgcctggaacaacggccaccagatcctctacaacgtgaccctcttccacgtcatccgctccgacgagttgtagctccctcctcctggaagccaagggcccacgtcctcaccacaaagggactcctgtgaaactgctgccaaaaagataccaataacactaacaataccgatcttgaaaaatcatcagcagtgcggattctgacatcgagggatggcattacct

SEQ ID NO: 381038 - DNA, 987 bp, Homo Sapiens
ctttgtacaaaaagttggaggtgaaggacgtccttccccaggagccgactggccaatcacaggcaggaagatgaaggttctgtgggctgcgttgctggtcacattcctggcaggatgccaggccaaggtggagcaagcggtggagacagagccggagcccgagctgcgccagcagaccgagtggcagagcggccagcgctgggaactggcactgggtcgcttttgggattacctgcgctgggtgcagacactgtctgagcaggtgcaggaggagctgctcagctcccaggtcacccaggaactgagggcgctgatggacgagaccatgaaggagttgaaggcctacaaatcggaactggaggaacaactgaccccggtggcggaggagacgcgggcacggctgtccaaggagctgcaggcggcgcaggcccggctgggcgcggacatggaggacgtgtgcggccgcctggtgcagtaccgcggcgaggtgcaggccatgctcggccagagcaccgaggagctgcgggtgcgcctcgcctcccacctgcgcaagctgcgtaagcggctcctccgcgatgccgatgacctgcagaagcgcctggcagtgtaccaggccggggcccgcgagggcgccgagcgcggcctcagcgccatccgcgagcgcctggggcccctggtggaacagggccgcgtgcgggccgccactgtgggctccctggccggccagccgctacaggagcgggcccaggcctggggcgagcggctgcgcgcgcggatggaggagatgggcagccggacccgcgaccgcctggacgaggtgaaggagcaggtggcggaggtgcgcgccaagctggaggagcaggcccagcagatacgcctgcaggccgaggccttccaggcccgcctcaagagctggttcgagcccctggtggaagacatgcagcgccagtgggccgggctggtggagaagtgcaaggctgccgtggg

SEQ ID NO: 381039 - DNA, 937 bp, Homo Sapiens
ttgggtcgccgccgtcgctgccgctgccgctgccgccgtcgttgttgttgtgctcggtgcgctgagctccgcggctccgcgagccggttccgtccccttcccgccgccgccatgaagtggatgttcaaggaggaccactcgctggaacacagatgcgtggagtccgcgaagattcgagcgaaatatcccgacagggttccggtgattgtggaaaaggtctcaggctctcagattgttgacattgacaaacggaagtacttggttccatctgatatcactgtggctcagttcatgtggatcatcaggaaaaggatccagcttccttctgaaaaggcgatcttcctgtttgtggataagacagtcccacagtccagcctaactatgggacagctttacgagaaggaaaaagatgaagatggattcttatatgtggcctacagcggagagaacacttttggcttctgagggccattgctgggctaggtgcaccgtaactgcttgtgtatcttgtaaatagccagccattttcagttattataccagaacctcttcacatagacctattagtgcatttgtaactggatttatttcttaatatattggaaggttttgtttccttagactagtaaattatcatacagagttttattttgagtttttctttttgtgcattgtcctcatgcctgtattctccaggaaacttgtccttctggaaatcatattgaatgatatttctatatcgaagtgaggtaggtgcggtattaaagtgaaagggaagtgatgcatttattctgggttatgcttgaagtgttagatggctaagtattaaaattatccaaattaaatccttagcagtcagaacacttgcttcactagaatatgccaactgccaatcatgttggactgagctaatttgttcctctttctgaaactatta

SEQ ID NO: 381040 - DNA, 880 bp, Homo Sapiens
aactttgtacaaaaaagttggcatggctcgtggtcccaagaagcatctgaagcgggtggcagctccaaagcattggatgctggataaattgaccggtgtgtttgctcctcgtccatccaccggtccccacaagttgagagagtgtctccccctcatcattttcctgaggaacagacttaagtatgccctgacaggagatgaagtaaagaagatttgcatgcagcggttcattaaaatcgatggcaaggtccgaactgatataacctaccctgctggattcatggatgtcatcagcattgacaagacgggagagaatttccgtctgatctatgacaccaagggtcgctttgctgtacatcgtattacacctgaggaggccaagtacaagttgtgcaaagtgagaaagatctttgtgggcacaaaaggaatccctcatctggtgactcatgatgcccgcaccatccgctaccccgatcccctcatcaaggtgaatgataccattcagattgatttagagactggcaagattactgatttcatcaagttcgacactggtaacctgtgtatggtgactggaggtgctaacctaggaagaattggtgtgatcaccaacagagagaggcaccctggatcttttgacgtggttcacgtgaaagatgccaatggcaacagctttgccactcgactttccaacatttttgttattggcaagggcaacaaaccatggatttctcttccccgaggaaagggtatccgcctcaccattgctgaagagagagacaaaagactggcggccaaacagagcagtgggtgaaatgggtccctgggtgacatgtcagatctttgtacgtaattaaaatattgtggcatgattaatagc

SEQ ID NO: 381041 - DNA, 946 bp, Homo Sapiens
aaaaagaaaaaacacaagtccactctgaagtcagcctctgtaacctccccacaagaaaaccgttttacatcagtcactaaccaaacaaccaacagtgcttcaacacagaaagtaaagcattatccagggcttggactgtctttcaagaaagccccaaatcccctggcaggaggaagtcacagcagtgaagccccatcccaggcccagttgttcccacgaaacacaccacgtggagacccagcatgactgccgactgattccaagtccccaggagggctttattttttcttttcaacatcctgttctgcggcttccttggctctttttgcccgtatgccgaagagccgggcgttggcacgggccatacggagactagcgaaggctttgaaattcttctcttcctcagtgatgactcgagctttctccttcttatagacgttccggacgggcatgaccggtccggtcagctgggtggccagtttcagttcttcagcagaactgtctcccttcttgggggccgagggcttcctggggaagaggatgagtttggagcggtactccttcagccgctgcacgttggcctgcagggactccgtggacttgttccgcctcctcggatccacagaaatgccgatggtccgggccaccttcttgtgaatgccggccaccctgagctcctccaggctgaagccgcggccggcgcgcaccttcgtgtggtaccgaaccgtggggcagcgcacgatgggccggatgggacccgacgcggggcgcggggcgatgcggcgcgccttggcttgccgggccttacgtctgcggatcttacgggccggctggttgaaccacgtggccacgcgccgctgccagtccttgtggaagtggggcttcaagaccatgccattccggctgggcgccatggctgcctacggccctgcggctcctgcgccaa

SEQ ID NO: 381042 - DNA, 1017 bp, Homo Sapiens
ttggctggcatagcggctgccgacccgccctcgttcctccaccccctgcacgggactgctgggcccgccccgccccgcctgcaggtgaagcggccgcagccgccgagtaggtgcgtggggatgatctcactcgcgcgctccgcgccaggaggaggaggagcgggagcggatccaacttccgggtagtggagccgcaagccaccggcatcttgctttttcttccccctcctcctgtgtgccccgcgccgctccctctttcccttttattcccggccccacccgccaaaatgaacagctcggacgaagagaagcagctgcagctcattaccagtctgaaggagcaagcaataggcgaatatgaagaccttagagcagagaaccagaaaacaaaggagaagtgtgacaaaattaggcaagaacgagatgaagccgttaaaaaactggaagaatttcagaaaatttctcacatggtcatagaggaagttaatttcatgcagaaccatcttgaaatagagaagacttgtcgagaaagtgctgaagctttggcaacaaagctaaataaagaaaataaaacgttgaaaagaatcagcatgttgtacatggccaagctgggaccagatgtaataactgaagagataaacattgatgatgaagattcgactacagacacagacggtgccgccgagacttgtgtctcagtacagtgtcagaagcaaattaaagaacttcgagatcaaattgtatctgttcaggaggaaaagaagattttagccattgagctggaaaatctcaagagcaaactcgtagaagtaattgaagaagtaaataaagttaaacaagaaaagactgttttaaattcagaagttcttgaacagagaaaagtcttagaaaaatgcaatagagtgtccatgttagctgtagaagagtatgaggagatgcaagtaaacctggagctggagaaggaccttcgaaagaaagcagagtcatttgcacaagagatgttcattgagcaaaaca

SEQ ID NO: 381043 - DNA, 1484 bp, Homo Sapiens
  misc_feature (402)..(414): n is a, c, g, or t
ttgggtgtcatgtggcacaccttgtcccttcccgcagcatttcctggttccccccagacccttgagcgctctttgggacccagaaggagtccttgcacagggaaggcttgaggtgagaagccgcttcccagactgtcagggccaggcctgggtctagaattcttgctgctgctttgcagagtcaacagcccatcagcccatgttttagaggggacactttggtcctcggttcccaccctcagcaagcaggcctccagcccgaggaaggcctctgccgtagtgacgttgccgtgtggggctgcgtggctgttccccttggctggagcattcagccaaccccagcgtcccccctgaggcgttcattggcagccccctaggactgcacgctggccccacggtaannnnnnnnnnnnnaccaacatcctgcagggatggggtcagtggttccaccttcacaggccactttgaagggtggattctttgaggcccctgccagtcggctccctgctcagctgctggcccgggcgacctgggactcagcaccaacggctgaagtttctcagctgggctctgacctggggtctggggcagggaacgaacatggtggctttgggctgagaggatgagggaggtctttcccaggtcaaattactttcctttggcctctgcctgaggctcgatttgcctctctggtccaatgggactgacactgttgtacaacctgacctgtggctgagggtgtctgggcttaagcatgtggaccccttcggtgtgtccggccttcctccatcgtcctgccctttggccttttggtttgaagccacaggtgtggcttctggccttagcagatggtatgcttgcggaccgcagcccagcatgccggtgggcccacagcccgagccagcccagagctgccggaagggccgcccttcccggccctggcggggtgctggacactggccattttcactagagtttgcctggcagggaccgatctctgccccctcctctccccaggcctctggctgcagtgatgccgcagaatcctgagccaggtgcctcctgagcagcccgtgcgcctctccacagcggcgtttgccacccaatgcggctcgcttcagatgctctgatgcagagggcacgcccatagtccctctgcagagcctcgcactggggccagggcaggcaccagccccaggcagccagtcggccacggcctgtcctcttcctcgtagcgtctgctcctcactttgtgttgatggtgacttaggagaatgttccgattttccatgatctaagcaggccacgtttaaaataacatcaaggcaagcgtacgtgtcaccctctgtactgacatctcttcccctgaaatgcttttcagtttgacagcccgtttcctagacaagtgcacctggggtttcagaactttgtgttttttcggagggggttggtggggaggtcgggatgcctgggatcccttcctg

SEQ ID NO: 381044 - DNA, 1241 bp, Homo Sapiens
agcctagcgcccgtgggcgggctggggcgggccgggggcgggtctgcgggaagcccgagccggggcgggcccgagtcaaaggcaagtgaaggtggaagcggccgcggcggcagcaggccaccatggcggagctgcaggaggtgcagatcacagaggagaagccactgttgccaggacagacgcctgaggcggccaagactcactctgtggagacaccatacggctctgtcactttcactgtctatggcacccccaaacccaaacgcccagcgatccttacctaccacgatgtgggactcaactataaatcttgcttccagccactgtttcagttcgaggacatgcaggaaatcattcagaactttgtgcgggttcatgtggatgcccctggaatggaagagggagcccctgtgttccctttgggatatcagtacccatctctggaccagcttgcagacatgatcccttgcgtcctgcagtacctaaatttctctacaataattggagttggtgttggagctggagcctacatcctggcgagatatgctcttaaccacccggacactgttgaaggtcttgtcctcatcaacattgatcccaatgccaagggttggatggattgggcagcccacaagctaacaggcctcacctcttccattccggagatgatccttggacatcttttcagccaggaagagctctctggaaattctgagttgatacaaaagtacagaaatatcattacacatgcacccaacctggataacattgaattgtactggaacagctacaacaaccgccgagacctgaactttgagcgtggaggtgatatcaccctcaggtgtcctgtgatgctggtggtaggagaccaagcacctcatgaagatgcagtggtggaatgtaactcaaaactggaccccacccagacctcgttcctcaagatggctgactccggaggtcagccccagctgactcagccaggcaagctgaccgaggccttcaagtacttcctgcaaggcatgggctacatggcctcatcctgcatgactcgcctgtcccggtctcgtacagcctctctgaccagtgcagcatccgttgatggcaaccggtcccgctctcgcaccctgtcccagagcagcgagtctggaactctttcttcggggcccccggggcacaccatggaggtctcctgttgaatggcccttgttgccctagagtgggacccagccctcacctccccc

SEQ ID NO: 381045 - DNA, 1321 bp, Homo Sapiens
gtgtccatgggagatgccggtccgcaccgccgagcgcacggccgcattcatgccagccgccggggcccccacattcaggatggccagggagaagttagacttctccttggggggcttctggtgggcgaggagcttgtaaatgttccagttgttctcgaagctcccaccacggagctgggtggcctcgtcaaacctcttgtcatccatggctttctgcacttccttggtcatctgcacgcactccatgaggggcagccgcactgactggttccccgagagggtgaccacgcaggccggcgtgtcaggcgtggcttccagcagcgccatcaccgcctccatgcccatcttgctgctcaggatccggtcgaaggcagagggcgtccctccccgctgcacgtggcccagcacagttacacgggtgtcgaagcccagcctctgaaccaccaggtccttcacgtagctggacgagatgggcttcccgttgcggtcaatggcaccctcagcgatgatgatgatgttcagtcgggacccacggctccgagtctcacccagcctctcacacatgaagttctcccagccgacctcgggtggagcctcggggatgaacagccagtcggcccctgaggccagtgcagataccagcgccaggtacccgcagtgccggcccatcacttccagcacgaaggtcctctggtggctctgggcagtggtggtgatggcatcgatgacctccatgatgcggtggagggccgagtccgtgccgatggtcatgtcggtgccgcagaagtcgttatcgatggagcccactaggcccgcgatgttcaggtgcgagtaggtccgggctgtagtctctgagatcttaccttccgccaccagctcctccagcaggctgccccactcgctgcggaagatgttggcacctgtgaggctgccatccccgccgatgacgcacaggttggtgatgccgtgctggaccaggttgtaggccgctgcccggcgcccctccctggtggtaaaggccttgcagcgagcgctgccaatgatagtgccgcccagctggatgatgttggagacgctcagccagttggcctgcttgatgttctcacctccctccacgaggccctcatagccctcgtagatgaggaagactttggcacccacataaatgcccatgcgcgtcacagcccggacagcagcgttcatgccttgcgcgtcgccgccgctggtcaggacgccgatggccttgcccgcgcccgacgcccgcagcttctccaggtccaccgcggccatggcggcggccgaaacacgggcccagctccaa

SEQ ID NO: 381046 - DNA, 888 bp, Homo Sapiens
ttggccctagcgccgctgggcctgcaggtctctgtcgagcagcggacgccggtctctgttccgcaggatggggtttgttaaagttgttaagaataaggcctactttaagagataccaagtgaaatttagaagacgacgagagggtaaaactgattattatgctcggaaacgcttggtgatacaagataaaaataaatacaacacacccaaatacaggatgatagttcgtgtgacaaacagagatatcatttgtcagattgcttatgcccgtatagagggggatatgatagtctgcgcagcgtatgcacacgaactgccaaaatatggtgtgaaggttggcctgacaaattatgctgcagcatattgtactggcctgctgctggcccgcaggcttctcaataggtttggcatggacaagatctatgaaggccaagtggaggtgactggtgatgaatacaatgtggaaagcattgatggtcagccaggtgccttcacctgctatttggatgcaggccttgccagaactaccactggcaataaagtttttggtgccctgaagggagctgtggatggaggcttgtctatccctcacagtaccaaacgattccctggttatgattctgaaagcaaggaatttaatgcagaagtacatcggaagcacatcatgggccagaatgttgcagattacatgcgctacttaatggaagaagatgaagatgcttacaagaaacagttctctcaatacataaagaacagcgtaactccagacatgatggaggagatgtataagaaagctcatgctgctatacgagagaatccagtctatgaaaagaagcccaagaaagaagttaaaagaagagtggaaccgtcccaaaatgtcccttgctc

SEQ ID NO: 381047 - DNA, 843 bp, Homo Sapiens
ttgggcacgcctccctcgctctcccacaccactggcaccaggccccggacacccgctctgctgcaggagaatggctactcatcacacgctgtggatgggactggccctgctgggggtgctgggcgacctgcaggcagcaccggaggcccaggtctccgtgcagcccaacttccagcaggacaagttcctggggcgctggttcagcgcgggcctcgcctccaactcgagctggctccgggagaagaaggcggcgttgtccatgtgcaagtctgtggtggcccctgccacggatggtggcctcaacctgacctccaccttcctcaggaaaaaccagtgtgagacccgaaccatgctgctgcagcccgcggggtccctcggctcctacagctaccggagtccccactggggcagcacctactccgtgtcagtggtggagaccgactacgaccagtacgcgctgctgtacagccagggcagcaagggccctggcgaggacttccgcatggccaccctctacagccgaacccagacccccagggctgagttaaaggagaaattcaccgccttctgcaaggcccagggcttcacagaggataccattgtcttcctgccccaaaccgataagtgcatgacggaacaataggactccccagggctgaagctgggatcccggccagccaggtgacccccacgctctggatgtctctgctctgttccttccccgagcccctgccccggctccccgccaaagcacccctgcccactcgggcttcatcctgcacaataaactccggaagcaagtcagtacaagaaagagaaaagagaacccaactttcttgtaca

SEQ ID NO: 381048 - DNA, 850 bp, Homo Sapiens
ttggtcgctccgaggtccccgcgccagagacgcagccgcgctcccaccacccacacccaccgcgccctcgttcgcctcttctccgggagccagtccgcgccaccgccgccgcccaggccatcgccaccctccgcagccatgtccaccaggtccgtgtcctcgtcctcctaccgcaggatgttcggcggcccgggcaccgcgagccggccgagctccagccggagctacgtgactacgtccacccgcacctacagcctgggcagcgcgctgcgccccagcaccagccgcagcctctacgcctcgtccccgggcggcgtgtatgccacgcgctcctctgccgtgcgcctgcggagcagcgtgcccggggtgcggctcctgcaggactcggtggacttctcgctggccgacgccatcaacaccgagttcaagaacacccgcaccaacgagaaggtggagctgcaggagctgaatgaccgcttcgccaactacatcgacaaggtgcgcttcctggagcagcagaataagatcctgctggccgagctcgagcagctcaagggccaaggcaagtcgcgcctgggggacctctacgaggaggagatgcgggagctgcgccggcaggtggaccagctaaccaacgacaaagcccgcgtcgaggtggagcgcgacaacctggccgaggacatcatgcgcctccgggagaaattgcaggaggagatgcttcagagagaggaagccgaaaacaccctgcaatctttcagacaggatgttgacaatgcgtctctggcacgtcttgaccttgaacgcaaagtggaatctttgcaagaagagattgcctttttgaagaaactcc

SEQ ID NO: 381049 - DNA, 835 bp, Homo Sapiens
  misc_feature (244)..(328): n is a, c, g, or t
  misc_feature (424)..(454): n is a, c, g, or t
  misc_feature (674)..(710): n is a, c, g, or t
ggactccggcagctttatcgccagagtccctgaactctcgctttctttttaatcccctgcatcggatcaccggcgtgccccaccatgtcagacgcagccgtagacaccagctccgaaatcaccaccaaggacttaaaggagaagaaggaagttgtggaagaggcagaaaatggaagagacgcccctgctaacgggaatgctgaatgaggaaaatggggagcaggaggctgacaatgaggtagannnnnnnnnnnnnnnnnnnnnnnnnnnnnnnnnnnnnnnnnnnnnnnnnnnnnnnnnnnnnnnnnnnnnnnnnnnnnnnnnnnnngctgagtcagctacgggcaagcgggcagctgaagatgatgaggatgacgatgtcgataccaagaagcagaagaccgacgaggatgactagacagcnnnnnnnnnnnnnnnnnnnnnnnnnnnnnnnggccgccgtgacctattcaccctccacttcccgtctcagaatctaaacgtggtcaccttcgagtagagaggcccgcccgcccaccgtgggcagtgccacccgcagatgacacgcgctctccaccacccaacccaaaccatgagaatttgcaacaggggaggaaaaaagaaccaaaacttccaaggccctgctttttttcttaaagtactttaaaaaggannnnnnnnnnnnnnnnnnnnnnnnnnnnnnnnnnnnngtacatattgttagggtcagccatttttaatgatctcggatgaccaaaccagccttcggagcgttctctgtcctacttctgactttacttgtggtgtgaccatgttcattataatctcaaaggag

SEQ ID NO: 381050 - DNA, 488 bp, Homo Sapiens
ttggcaggtcgccgctgcggagggagccgccgccatgtctgcgcatctgcaatggatggtcgtgcggaactgctccagtttcctgatcaagaggaataagcagacctacagcactgagcccaataacttgaaggcccgcaattccttccgctacaacggactgattcaccgcaagactgtgggcgtggagccggcagccgacggcaaaggtgtcgtggtggtcattaagcggagatccggccagcggaagcctgccacctcctatgtgcggaccaccatcaacaagaatgctcgcgccacgctcagcagcatcagacacatgatccgcaagaacaagtaccgccccgacctgcgcatggcagccatccgcagggccagcgccatcctgcgcagccagaagcctgtgatggtgaagaggaagcggacccgccccaccaagagctcctgagccccctgcccccagagcaataaagtcagctggctttctc

SEQ ID NO: 381051 - DNA, 1519 bp, Homo Sapiens
  misc_feature (232)..(288): n is a, c, g, or t
ttgatgagcaatgcttacccaataaagggccgactttgtacaaaaaagttgggagagagggaggtggaggaggagatgcgggatggagacctggagttaggtggcttgggagagcttaatgaaaagagaacggagaggaggtgtgggttaggaaccaagaggtagccctgggggcagcagaaggctgagaggagtaggaagatcaggagctagagggagactggagggttcnnnnnnnnnnnnnnnnnnnnnnnnnnnnnnnnnnnnnnnnnnnnnnnnnnnnnnnnntgggtttgaagggcggatctcagtccctggctgctttggcatttggggaactgggactccctgtggggaggagaggaaagctggaagtcctggagggacagggtcccagaaggaggggacagatgagctgagagaggggggcagggcgttgggcaggggtccctcggaggcctcctggggatgggggctgcagctcgtctgagcgcccctcgagcgctggtactctgggctgcactgggggcagcagctcacatcggaccagcacctgaccccgaggactggtggagctacaaggataatctccagggaaacttcgtgccagggcctcctttctggggcctggtgaatgcagcgtggagtctgtgtgctgtggggaagcggcagagccccgtggatgtggagctgaagagggttctttatgacccctttctgcccccattaaggctcagcactggaggagagaagctccggggaaccttgtacaacaccggccgacatgtctccttcctgcctgcaccccgacctgtggtcaatgtgtctggaggtcccctcctttacagccaccgactcagtgaactgcggctgctgtttggagctcgcgacggagccggctcggaacatcagatcaaccaccagggcttctctgctgaggtgcagctcattcacttcaaccaggaactctacgggaatttcagcgctgcctcccgcggccccaatggcctggccattctcagcctctttgtcaacgttgccagtacctctaacccattcctcagtcgcctccttaaccgcgacaccatcactcgcatctcctacaagaatgatgcctactttcttcaagacctgagcctggagctcctgttccctgaatccttcggcttcatcacctatcagggctctctcagcaccccgccctgctccgagactgtcacctggatcctcattgaccgggccctcaatatcacctcccttcagatgcactccctgagactcctgagccagaatcctccatctcagatcttccagagcctcagcggtaacagccggcccctgcagcccttggcccacagggcactgaggggcaacagggacccccggcaccccgagaggcgctgccgaggccccaactaccgcctgcatgggatggtccagtctgcaccccctctaagtcttgagctaaccctcttatatgtgtctccccttggtgtctcagtgtgattcagtcccatcc

SEQ ID NO: 381052 - DNA, 676 bp, Homo Sapiens
ctttgtacaaaaaagttgggaagtgctgaggcggtatctgaaccgcctgcagcagatccgggacaccctggaggtatccgagttcttcaggaggcacgaggtgatcggcagctcgctcctctttgtgcacgatcactgccatcgcgccggcgtgtggctcatcgacttcggcaagaccacgcccctccccgatggccagatcctggaccaccggcggccctgggaggagggcaaccgcgaggacggctatttgctggggctggacaatctcattggcatcctggccagcctggctgagagatgaggctggactcctgtccccgcgggccgctcacctgacatgtggacctgcagctttgtccccactgtgcatgccggcttgagactggagccccgcggtgcagggcagttcaccgggtcctgcaggaccaggtgccagccactaagggggggcaccgccgatgccaggggttttgcccacccgggccccagcgttcccagagccaaatgacactaacttatagaaggggagggggcaaagggcttcttcctcaggccagctcttctgaggaggctctgccctctccagaggtgccagaccgcggattttatttagcaagcccagaccttccggtctaacgtctcacaccacgacggactcccccttcataataaa

SEQ ID NO: 381053 - DNA, 928 bp, Homo Sapiens
cccccaatccaacccccagcaagtccctccgctccagcattcagtccccttgctgcctgccagcaagagcgaggggccattcttggtgtcaggatttctagtccatgccagcggcccctctgcgcagccaggacggcgtccaggtcccgaggtccacagcggtcccggggctcggggagcaatccgggcgggcgtcggcgtggaggaagcagtgccttcaatcatcgggggaacaggccaggggcaactgatccggactgcccacgctgccagtgctggagcttccatcgcctaggtcgcggggcccgcacgggggcaaggcaagctcgggtgctggcccggctcctgatcccccggcgccgctggggccgccgcgggggccccattcttcgcccagcgccaggcagagctccttaagcgctaggttctcccgcagcagctcctcctggcggccctccagctcggccagcttctgccaacagccgcccaggtcctcgcgcacggcccgggatgcttgggtcccgaagagctgccactggcgtgcggcgcgccgcccgcgctggcgctccgagtccaggaagcagcagaggtcgcgcagctcacggttctctgcctgcagacgccggttgagctgcttgagctcgcggatctcgcccaggtggccctgcagctgccgattcacctcctgcatgaggcggccgcgctgcaccagtgccgccaggcgcgccgcctcctcccgccgcaggcgccgcactagctcttccttgcctagcgccgccatctcctcgtccgtcagctcctccaggccgcctgcctcggcctccatggctggtcaggcctctggagcatcgcccgcccgccgccgcggcccaggagccccacgtcgggcccggcgccactcaggctcgggctccggccccgcacccaa

SEQ ID NO: 381054 - DNA, 1249 bp, Homo Sapiens
tgaccggcggcaggagccgccaccatggagttccgccaggaggagtttcggaagctagcgggtcgtgctctcgggaagctgcaccgccttctggagaagcggcaggaaggcgcggagacgctggagctgagtgcggatgggcgcccggtgaccacgcagacccgggacccgccggtggtggactgcacctgcttcggcctccctcgccgctacattatcgccatcatgagtggtctgggcttctgcatcagctttggcatccgctgcaacctgggcgtggccatcgtctccatggtcaataacagcacgacccaccgcgggggccacgtggtggtgcagaaagcccagttcagctgggatccagagactgtcggcctcatacacggctcctttttctggggctacattgtcactcagattccaggaggatttatctgtcaaaaatttgcagccaacagagttttcggctttgctattgtggcaacatccactctaaacatgctgatcccctcagctgcccgcgtccactatggctgtgtcatcttcgtgaggatcctgcaggggttggtagagggggtcacataccccgcctgccatgggatctggagcaaatgggccccacccttagaacggagtcgcctggcgacgacagccttttgtggttcctatgctggggcggtggtcgcgatgcccctcgccggggtccttgtgcagtactcaggatggagctctgttttctacgtctacggcagcttcgggatcttctggtacctgttctggctgctcgtctcctacgagtcccccgcgctgcaccccagcatctcggaggaggagcgcaagtacatcgaggacgccatcggagagagcgcgaaactcatgaaccccctcacgaagtttagcactccctggcggcgcttcttcacgtctatgccagtctatgccatcatcgtggccaacttctgccgcagctggacgttctacctgctgctcatctcccagcccgcctacttcgaagaagtgttcggcttcgagatcagcaaggtaggcctggtgtccgcgctgccccacctggtcatgaccatcatcgtgcccatcggcggccagatcgcggacttcctgcggagccgccgcatcatgtccaccaccaacgtgcgcaagttgatgaactgcggagcttcggcatggaagccacgctgctgttggtggtcgctactcgcactccaggcgtggcatctcttctggtcctagc

SEQ ID NO: 381055 - DNA, 826 bp, Homo Sapiens
ttggagaccggaagcgctccgctgtacctggatcctgctcctctgggttgaaacccgggcgccgccaagatgccggcttaccactcttctctcatggatcctgataccaaactcatcggaaacatggcactgttgcctatcagaagtcaattcaaaggacctgcccccagagagacaaaagatacagatattgtggatgaagccatctattacttcaaggccaatgtcttcttcaaaaactatgaaattaagaatgaagctgataggaccttgatatatataactctctacatttctgaatgtctgaagaaactgcaaaagtgcaattccaaaagccaaggtgagaaagaaatgtatacgctgggaatcactaattttcccattcctggagagcctggttttccacttaacgcaatttatgccaaacctgcaaacaaacaggaagatgaagtgatgagagcctatttacaacagctaaggcaagagactggactgagactttgtgagaaagttttcgaccctcagaatgataaacccagcaagtggtggacttgctttgtgaagagacagttcatgaacaagagtctttcaggacctggacagtgaagggagcccgggcagccaccgtctccagagccctgggcagcattttccagcaagatgtacacaatcttttgcctttatttcgtaaagttttatacagaagagagaagagcatgtctttacttgaaaaactcttgatcaagaatttgggtgggagaaaagaaagtgggttatcaacggtgatttgaaattttctgcagcattaaagctggcgcttaataag

SEQ ID NO: 381056 - DNA, 849 bp, Homo Sapiens
gtcataagtacaaaattttattaaaggtctttagagagcaacatccagactccagaatacagctgccaaggagaccctgttatgctgtggggactggctggggcatggcaggcggctctggcttcccacccttctgttctgagatgggggtggtgggcagtatctcatctttgggttccacaatgctcacgtggtcaggcaggggcttcttagggccaatcttaccagttgggtcccagggcagcatgatcttcaccttgatgcccagcacaccctgtctgagcaacacgtggcgcacagcagtgtcaacgtagtagttaacagggtctccgctgtggatcatcaggccatccacaaacttcatggatttagccctctgtcctcggagtttcccagacaccacaacctcgcagcctttggccccactctccatgatgaaccgcagcacaccatagcaggccctccgcacagcaagccctcctaggagtttgtaacgcagagactctgcctgggcaatggcacacagacctctagtggccaccttttcagcataaagctctacactgccctctggaaagccaaacctcttctgaactacagcagtcagttcccgaatccgccggcccttctcaccaagaacattctgtgttctggtggctaagataatgatttctgtcctggttggtgtaactcgcacctcaactccagagtagccatcttcagccagctcccgagtaagaaactcattcagttcagctttgaagatgccatcagcgacaaacttcctcttcttggatatttgcactgccatcttgccgccgcgctccgccaacttttttgtacaaagtt

SEQ ID NO: 381057 - DNA, 956 bp, Homo Sapiens
ttggggaagggactgtcgggcacccccttccccgcccccacccctgggacgttaaagtgaccagagcggatgttcgatggcgcctcggggcagtttggggttctgggtcggttccagcggctttaggcagaaagtgctcgctctcacccagcacatctctctccttgtccctggagttgcgcgcttcgcggggccgatgtagaacttagggcgccttgccgtggttggcgcgccccgggtgcagcgagaggccatccccgagcgctacctccccggagcggagcacgccggctcccagtactaggggctgcgctcgagcagtggcgggggcggaggggtggttcttttccttctcctccgccagaggccacgggcgcccttgttcccgccggccaggtcctatcaaaggaggctgccggaactcaagaggcagaaaaagaccagttaggcggtgcagacggtctgggacgtggcagacggacggaccctcggcggacaggtggtcggcgtcggggtgcggtgggtaggggcgaggacaacgcagggtgcgctgggttgggacgtgggtccacttttgtagaccagctgtttggagagctgtatttaagactcgcgtatccagtgttttgtcgcagagagttttcgctcttaaatcctgggggtttcttagaaagcaacttagaactcgagattcacctttcgtttccctttccccaaaagtagcgtaaccaacatttaagcttgcttaaaaacgaaaaccaaccgccttgcatccagtgttcccgatttactaaaataggtaaccaggcgtctcacagtcgccgtcctgtcaagagcgctaatgaacgttctcattaacacgcaggagtaccgggagccctgaaccgcccgctgctcggcggatcccagctgcggtggcgacggcgggaaggcgctttccgctgttcctcagcggg

SEQ ID NO: 381058 - DNA, 887 bp, Homo Sapiens
ctttgtacaaaaaagttggagcgccccgagcgccgctccggctgcaccgcgctcgctccgagtttcaggctcgtgctaagctagcgccgtcgtcgtctcccttcagtcgccatcatgattatctaccgggacctcatcagccacgatgagatgttctccgacatctacaagatccgggagatcgcggacgggttgtgcctggaggtggaggggaagatggtcagtaggacagaaggtaacattgatgactcgctcattggtggaaatgcctccgctgaaggccccgagggcgaaggtaccgaaagcacagtaatcactggtgtcgatattgtcatgaaccatcacctgcaggaaacaagtttcacaaaagaagcctacaagaagtacatcaaagattacatgaaatcaatcaaagggaaacttgaagaacagagaccagaaagagtaaaaccttttatgacaggggctgcagaacaaatcaagcacatccttgctaatttcaaaaactaccagttctttattggtgaaaacatgaatccagatggcatggttgctctattggactaccgtgaggatggtgtgaccccatatatgattttctttaaggatggtttagaaatggaaaaatgttaacaaatgtggcaattattttggatctatcacctgtcatcataactggcttctgcttgtcatccacacaacaccaggacttaagacaaatgggactgatgtcatcttgagctcttcatttattttgactgtgatttatttggagtggaggcattgtttttaagaaaaacatgtcatgtaggttgtctaaaaataaaatgcatttaaactcatttgagagaatgccttttagtttaatgcatatttaaactaaattg

SEQ ID NO: 381059 - DNA, 533 bp, Homo Sapiens
ttggcggaacagccacctaaggcaagaatggaacggacacaccttgctcctttctgagcccgtttcccaaaaccccccttccaggtgcttctaatgggtgttgccatagcagacgctgctaatgcatcacagcattctttgaaatggaaccagacacagcctgcctctcaatcctcagctgggggctcctagcagcctcttgtatttactcagagttgacacatcacacagatcctgtttggcattcctaccttacggacgtctcaggggtgacaggaccagggcagagccccggtacaaacagacaaggctgcagtcaaatgggagggtccaggtgtccgtgttggagggctgggatcttgtagggcctgtgcgtcctggctgaggatcaaaccacatatgttattgggagaaacgatttctgttgacgtagatattgaaagaataatgaaggcagaagagaaaaacgaagtgtggaatttggggttgtcctgtgtaaattacaccataaagcaaaagtcagttattgtaaa

SEQ ID NO: 381060 - DNA, 922 bp, Homo Sapiens
ttggggcagagcacagcatcgtcgggaccagactcgtctcaggccagttgcagccttctcagccaaacgccgaccaaggaaaactcactaccatgagaattgcagtgatttgcttttgcctcctaggcatcacctgtgccataccagttaaacaggctgattctggaagttctgaggaaaagcagctttacaacaaatacccagatgctgtggccacatggctaaaccctgacccatctcagaagcagaatctcctagccccacagacccttccaagtaagtccaacgaaagccatgaccacatggatgatatggatgatgaagatgatgacgaccatgtggacagccaggactccattgactcgaacgactctgatgatgtagatgacactgatgattctcaccagtctgatgagtctcaccattctgatgaatctgatgaactggtcactgattttcccacggacctgccagcaaccgaagttttcactccagttgtccccacagtagacacatatgatggccgaggtgatagtgtggtttatggactgaggtcaaaatctaagaagtttcgcagacctgacatccagtaccctgatgctacagacgaggacatcacctcacacatggaaagcgaggagttgaatggtgcatacaaggccatccccgttgcccaggacctgaacgcgccttctgattgggacagccgtgggaaggacagttatgaaacgagtcagctggatgaccagagtgctgaaacccacagccacaagcagtccagattatataagcggaaagctaatgatgagagcaatgagcattccgatgtgattgatagtcaggaactttccaaagtcagccgtgaattccacagccatgaatttcacagccatgcaggatatggctggttgtagacccaaaa

SEQ ID NO: 381061 - DNA, 865 bp, Homo Sapiens
aaaaagttggggaggcagagcacagcatcgtcgggaccagactcgtctcaggccagttgcagccttctcagccaaacgccgaccaaggaaaactcactaccatgagaattgcagtgatttgcttttgcctcctaggcatcacctgtgccataccagttaaacaggctgattctggaagttctgaggaaaagcagctttacaacaaatacccagatgctgtggccacatggctaaaccctgacccatctcagaagcagaatctcctagccccacagaatgctgtgtcctctgaagaaaccaatgactttaaacaagagacccttccaagtaagtccaacgaaagccatgaccacatggatgatatggatgatgaagatgatgatgaccatgtggacagccaggactccattgactcgaacgactctgatgatgtagatgacactgatgattctcaccagtctgatgagtctcaccattctgatgaatctgatgaactggtcactgattttcccacggacctgccagcaaccgaagttttcactccagttgtccccacagtagacacatatgatggccgaggtgatagtgtggtttatggactgaggtcaaaatctaagaagtttcgcagacctgacatccagtaccctgatgctacagacgaggacatcacctcacacatggaaagcgaggagttgaatggtgcatacaaggccatccccgttgcccaggacctgaacgcgccttctgattgggacagccgtgggaagggacagttatgaaacgagtcagctggatgaccagagtgctgaaacccacagccacaagcagtccagatatataagcggaaagccaatgatgagagcca

SEQ ID NO: 381062 - DNA, 731 bp, Homo Sapiens
  misc_feature (474)..(501): n is a, c, g, or t
aggatggaaacacccttctacggcgatgaggcgctgagcggcctgggcggcggcgccagtggcagcggcggcagcttcgcgtccccgggccgcttgttccccggggcgcccccgacggccgcggccggcagcatgatgaagaaggacgcgctgacgctgagcctgagtgagcaggtggcggcagcgctcaagcctgcggccgcgccgcctcctacccccctgcgcgccgacggcgccccctgcgcggcaccccccgacggcctgctcgcctctcccgacctggggctgctgaagctggcctcccccgagctcgagcgcctcatcatccattccaacgggctggtcaccaccacgccgacgagctcacagttcctctaccccaaggtggcggccagcgaggagcaggagttcgccgagggcttcctcaggccctggaggatttacacaagcagaaccagctcggcgcgggcgcgnnnnnnnnnnnnnnnnnnnnnnnnnnnngggggccctcgggcacggccacgggctccgcgccccccggcgagttggccccggcggcggccgcgcccgaaatgcctgtctacgcgaacctgagcagctccgcgggcggcgtcgggggcgcggggggagacgcgaaggaagccttcttcgtttgaacctgtgcccttcctgctgccgcgactctcaggggcctcccccccgccacgcctggctgcgctcaaggatgagcc

SEQ ID NO: 381063 - DNA, 590 bp, Homo Sapiens
  misc_feature (516)..(535): n is a, c, g, or t
cccaccacctccccacccactccatggagaggcagaggaggagcctggaggccagggggacaatggaaaagcccagcacgggaagtcagccactgtcatctcagagtgggtggggctgtgcgtatctcctggattctgaggctcggaaaactcggtgggaactgccttcaactgactacaccactccctgatgatgcttgagggccggctttggctctgggacctgtcacttctccgacacggacccgacccgttcctctccaggcaggtggtgggtgggggcaggaacaggaggccgggcaggccctggcgtctggctcctgtagcctggtgttgtcaggggagcatctggcagcctgaaggttgggggcagcgggcaccacaagggggcaagaatcctcagtgctgagggcatctcatcttcttgccattggcaaagaaatcaaagaaacaaactccatcgtcggttttgtgctgggtttttttgttgttcttttgagtggtttatttttgccnnnnnnnnnnnnnnnnnnnnaaagaaaatacagtgaagacactagaagggagaagggaaaagacaggtgagccaa

SEQ ID NO: 381064 - DNA, 792 bp, Homo Sapiens
ttggagcgccccgcacttttctgagcagacgtccagagcagagtcagccagcatgaccgagcgccgcgtccccttctcgctcctgcggggccccagctgggaccccttccgcgactggtacccgcatagccgcctcttcgaccaggccttcgggctgccccggctgccggaggagtggtcgcagtggttaggcggcagcagctggccaggctacgtgcgccccctgccccccgccgccatcgagagccccgcagtggccgcgcccgcctacagccgcgcgctcagccggcaactcagcagcggggtctcggagatccggcacactgcggaccgctggcgcgtgtccctggatgtcaaccacttcgccccggacgagctgacggtcaagaccaaggatggcgtggtggagatcaccggcaagcacgaggagcggcaggacgagcatggctacatctcccggtgcttcacgcggaaatacacgctgccccccggtgtggaccccacccaagtttcctcctccctgtcccctgagggcacactgaccgtggaggcccccatgcccaagctagccacgcagtccaacgagatcaccatcccagtcaccttcgagtcgcgggcccagcttgggggcccagaagctgcaaaatccgatgagactgccgccaagtaaagccttagcccggatgcccacccctgctgccgccactggctgtgcctcccccgccacctgtgtgttcttttgatacatttatcttctgtttttctcaaataaagttcaaagcaaccacctga

SEQ ID NO: 381065 - DNA, 1194 bp, Homo Sapiens
ttggccaagccaggcctttctggaggccgagagagctcaatccattgcctatcacctcaaaattgaggagcaaagagaaaaagtacatgaaaatgaaaatataggtaccactgagcctggagagcaccaagaggccaagaaagcagagaactcatcaaatgaggaggaaacgtcaagtgaaggcaacatgagggtgcatgctgtggattcttgcatgagcttccagtgtaaaagaggccacatctgtaaggcagaccaacagggaaaacctcactgtgtctgccaggatccagtgacttgtcctccaacaaaaccccttgatcaagtttgtggcactgacaatcagacctatgctagttcctgtcatctattcgctactaaatgcagactggaggggaccaaaaaggggcatcaactccagctggattattttggagcctgcaaatctattcctacttgtacggactttgaagtgattcagtttcctctacggatgagagactggctcaagaatatcctcatgcagctttatgaagccaactctgaacacgctggttatctaaatgagaagcagagaaataaagtcaagaaaatttacctggatgaaaagaggcttttggctggggaccatcccattgaccttctcttaagggactttaagaaaaactaccacatgtatgtgtatcctgtgcactggcagtttagtgaacttgaccaacaccctatggatagagtcttgacacattctgaacttgctcctctgcgagcatctctggtgcccatggaacactgcataacccgtttctttgaggagtgtgaccccaacaaggataagcacatcaccctgaaggagtggggccactgctttggaattaaagaagaggacatagatgaaaatctcttgttttgaacgaagattttaaagaactcaactttccagcatcctcctctgttctaaccacttcagaaatatatgcagctgtgatacttgtagatttatatttagcaaaatgttagcatgtatgacaagacaatgagagtaattgcttgacaacaacctatgcacattaactttggaaacaaaaatgtacaattaagtaaagtcaacatatgcaaaatactgtacattgtgaacagaagtttaattcatagtaatttcactctctgcattgacttatgagataattaatgatt

SEQ ID NO: 381066 - DNA, 1517 bp, Homo Sapiens
ttggctgctctcccccgcttccttgtaaccactgccctgggccaaggcacccaggactcccagaaagcgcgagagccagcaagaaggccccactcagccttgagactggtggtcacacctccctgtcagagtcgcctgctgggctgaaggggcaatggattgtcattgttgaaattgtttggctcaggttataaggaggaacttgggaagtagaaagtgacttgaccatgtgcatccttggtagcttcctgtaactaacaaatggaacagagagcacacccccgccccgccccaccccaagcagatgttcccgtcagcgctgccctgagtcagtcggtcccccgtttctgctctcctcccttttgtgttcctgctcacttcaagcttcttccatggactttccagggcacagtcatctctagcccccaaatcatctcttcatcctctgtgtgtgcatttttttaaccaaatgaaatagacaagaaagtcatactttggggcagcagaatttctaatttagtagaatcactgtatagagatagatgttgatatatatgtttgtgtatatatatcaaaccaaattggataggagaagtatagctttacagatgaggagaaggagctctttagaggtcggagtcaagactggtgtcttggacgtgcatgggctgtgtcccaggccactccgcacacatggggctgaggcgtggcgccgggcccttgtcatccacctcaccacggcagagccagcaggccctgtagggtgctgctgctgtctcactgggtcccagcttcaagcgcatcagtgggtgacgggggcaacaaatcagagtgactggaagtttccatcccgttttgctttgaccacgtgtactgagctgcagcctctgatactctgtcacgtttccaaaaatggtatccattaggatagaaagagaatggatctgcagaaatgtttacctttcaactgctcatgaattcaggacactggatagaaagactcactccccaaaatgagaacagggaagaggagacccggcgacactaagtcaccaggtccaaggaacgtggctccctccccagggtcatctcacctagatctttctctcccaggtcatctcagctcaatctcaataaccctatgaaagccctggtctgttgtgttccttcaccgtacggtttctgtaataaaaagtgttaatccatgttaatctgtgtgaaaattattgcgtgcaacagtattttctcgtgtacctctttttcctatgtgaattgtccctcttttttatttataaatgtctacttttgtttttttaaagacaaaccaatgtgttgtagacctatatgtaacctattccttagtctcatattataggtatgttataagaatggatattttacttggctttagaatgttttacaagaaaactaattcttaactgatcaagtccttgctactaaaatgcttgtgtttttcatcatgacgtcgtgtgcttctaaattaatcattttcgttg

SEQ ID NO: 381067 - DNA, 1620 bp, Homo Sapiens
ttggcgcagctggcagcggcggaaagcttagatcagcctttccacagctgttagcagcatctgccccaatttcagctgaagattcaggtgccccagggactggaagaaattacagtgcctacttggaaagaagaagagatagcgacttgccccagtccaaccccagagcgggagctgtggctaaaggaagtggaggggccgtgggatgcggagagccgagggctaactcccggacagcggaacagagagagctgccgacaaacagacgcaggcggaggagccgtcacctcccagaatgactagtgccgcccctgctaagaaaccctaccgtaaggcaccaccagagcatcgggagctgcgtttggaaattcctggatcccggcttgagcaggaggaacccctgactgatgcagaaaggatgaagctcttacaggaggagaatgaagagcttcgccggcgcctggcctccgccaccagacgcactgaggccctggaacgtgagctggaaattgggcaggactgcctggagctggagctgggccagagccgcgaggagctggacaaatttaaggataagttccgcaggctgcagaacagctacacggcttcccagcggaccaaccaggagttggaggacaagctgcacacactgatcaagaaggctgagatggataggaagacgctggactgggagattgtggagctgaccaacaagctgctggatgccaagaacaccatcaacaagctggaagagctcaatgagcggtaccggctggactgcaacctggctgtacagctcctcaagtgcaacaagtcccacttccgaaaccacaagtttgccgatctgccctgtgagctacaggacatggttcggaaacatttgcacagtggtcaagaggccgccagcccaggtcctgctcccagcctagccccaggggctgtggtgcctacctcagtcattgcccgagtgttagagaagccggagtctctactgctcaattcagcccagtcaggcagcgccgggcgccccttggctgaggatgtctttgtgcatgtggacatgagtgagggtgtcccaggtgatccagccagtcccccggcccctggcagccccaccccacaacccaatggggagtgccactctctgggtactgccaggggctccccggaggaagagctgcccctgccagcctttgagaagctgaacccctacccaaccccgtctccaccacacccactgtatcctggccgcagggtaatagagttctctgaggataaggttcggatcccccgcaacagccccctgcccaactgcacttacgctacccgccaggccatttccctgagcctggtagaggaggggagtgagcgggcccgccccagcccagtgcccagcacccctgcctcagcccaggcctcaccccaccaccagcccagcccagcacccctaacactcagtgccccagctagctctgccagctctgaagaggacctgctggtcagctggcagcgggcatttgtggaccgtactccaccacctgctgctgtggcccagcgcacagcctttggacgcgatgccctccctgagctgcagcgccattttgcccatagccccgctga

SEQ ID NO: 381068 - DNA, 679 bp, Homo Sapiens
ttggcacgtgacggacccggcgctggcctacttcacggcgcgccagggccacagcacgcacacgctgcgcctgctctcctgctgggagatcaccaaccacggcgtggtcaacgtggtgcacagcctgcccaacctcaccgcgctcagcctctcgggctgctccaaggtcaccgacgacggcgtggagctcgtggccgagaacctgcgcaagctgcgcagccttgacctctcgtggtgcccacgcatcaccgacatggcgctggagtacgtggcctgcgacctgcaccgcctagaggagctcgtgctcgacaggtgtgtacgcatcacggacactggcctcagctatctgtccaccatgtcgtccctccgcagcctctacctgcgatggtgctgccaggtgcaagacttcgggctgaagcacctcctggccctggggagtttgcgcctcctgtctggcaggctgcccgctgctcaccaccaccgggctgtcgggcctggtgcagctgcaggagctggaggagctggagctgaccaactgccccggggccacccccgagctcttcaagtatttctcgcagcacctgccccgctgcctcgtcattgagtagcgcgaggcccccgccccggtcgcgggaacccggccatgacctgggcgggggcctcgcgctactccatgacg

SEQ ID NO: 381069 - DNA, 868 bp, Homo Sapiens
ttggaggccaccgacttcctcacctgccacggcctcaccgtttccgacggctgtgtggagctgaaccggtctgcattcctggaaccagagggattatccaagaccaggaagtcggtgtttattactaggaagctgacggtgtcagtcggggaaattgtgaacggagggccattgccccccgtccctcgtcatacccctgtgtgcagcttcaactcccagaacaagtacatcggggagagcctggccgcggagctgcccgtcagcacccagagacccggctccgacacagtgggcggagggagaggagaggagtgtggtgtagagccggatgcacccctgtccagtctcccacagtctctaccagcccctgcgccctcaccagtgcctctgcctcctgtcctggcactgaccccgtctgtggcgcccagcctcttccagctgtctgtgcagcctgaaccaccgcctccagagcccgtgcccatgtactctgacgaggacctggcgcaggtggtggacgagctcatccaggaggccctgcagagggactgtgaggaagttggctctgcgggtgctgcctacgcagctgccgccctgggtgtttctaatgctgctatggaggatttgttaacagctgcaaccacgggcattttgaggcacattgcagctgaagaagtgtctaaggaaagagagcgaagggagcacgagaggcagcgggctgaagaggaaaggttgaaacaagagagagagctggtgttaagtgagctgagccagggcctggccgtggagctgatggaacgcgtgatgatggagtttgtgagggaaacctgctcccaggagttgaagaatgcagtagagacagaccagaggg

SEQ ID NO: 381070 - DNA, 869 bp, Homo Sapiens
  misc_feature (717)..(764): n is a, c, g, or t
ttggcgccgccgaagaagcatcgttaaagtctctcttcaccctgccgtcatgtctaagtcagagtctcctaaagagcccgaacagctgaggaagctcttcattggagggttgagctttgaaacaactgatgagagcctgaggagccattttgagcaatggggaacgctcacggactgtgtggtaatgagagatccaaacaccaagcgctccaggggctttgggtttgtcacatatgccactgtggaggaggtggatgcagctatgaatgcaaggccacacaaggtggatggaagagttgtggaaccaaagagagctgtctccagagaagattctcaaagaccaggtgcccacttaactgtgaaaaagatatttgttggtggcattaaagaagacactgaagaacatcacctaagagattattttgaacagtatggaaaaattgaagtgattgaaatcatgactgaccgaggcagtggcaagaaaaggggctttgcctttgtaacctttgacgaccatgactccgtggataagattgtcattcagaaataccatactgtgaatggccacaactgtgaagttagaaaagccctgtcaaagcaagagatggctagtgcttcatccagccaaagaggtcgaagtggttctggaaactttggtggtggtcgtggaggtggtttcggtgggaatgacaacttcggtcgtggaggaaacttcannnnnnnnnnnnnnnnnnnnnnnnnnnnnnnnnnnnnnnnnnnnnnnngcagtggggatggctataatggatttggtaatgatggaagcaattttggaggtggtggaagctacaatgattttgggaattacaacaatcagtcttcaaattttg

SEQ ID NO: 381071 - DNA, 1034 bp, Homo Sapiens
atgcccttctccaacagccacaacgcactgaagctgcgcttcccggccgaggacgagttccccgacctgagcgcccacaacaaccacatggccaaggtgctgacccccgagctgtacgcggagctgcgcgccaagagcacgccgagcggcttcacgctggacgacgtcatccagacaggcgtggacaacccgggccacccgtacatcatgaccgtgggctgcgtggcgggcgacgaggagtcctacgaagtgttcaaggatctcttcgaccccatcatcgaggaccggcacggcggctacaagcccagcgatgagcacaagaccgacctcaaccccgacaacctgcagggcggcgacgacctggaccccaactacgtgctgagctcgcgggtgcgcacgggccgcagcatccgtggcttctgcctccccccgcactgcagccgcggggagcgccgcgccatcgagaagctcgcggtggaagccctgtccagcctggacggcgacctggcgggccgatactacgcgctcaagagcatgacggaggcggagcagcagcagctcatcgacgaccacttcctcttcgacaagcccgtgtcgcccctgctgctggcctcgggcatggcccgcgactggcccgacgcccgcggtatctggcacaatgacaataagaccttcctggtgtgggtcaacgaggaggaccacctgcgggtcatctccatgcagaaggggggcaacatgaaggaggtgttcacccgcttctgcaccggcctcacccagattgaaactctcttcaagtctaaggactatgagttcatgtggaaccctcacctgggctacatcctcacctgcccatccaacctgggcaccgggctgcgggcaggtgtgcatatcaagctgcccaacctgggcaagcatgagaagttctcggaggtgcttaagcggctgcgacttcagaagcgaggcacaggcggtgtggacacggctgcggtgggcggggtcttcgacgtctccaacgctgaccgcctgggcttctc

SEQ ID NO: 381072 - DNA, 859 bp, Homo Sapiens
  misc_feature (125)..(173): n is a, c, g, or t
ttgggcggccatttcctgtttctctgcagttttcctcagctttgggtggtggccgctgccgggcatcggcttccagtccgcggagggcgaggcggcgtggacagcggccccggcacccagcgccnnnnnnnnnnnnnnnnnnnnnnnnnnnnnnnnnnnnnnnnnnnnnnnnnttcctatctcagcgccctgccgccgccgccgcggcccagcgagcggccctgatgcaggccatcaagtgtgtggtggtgggagacggagctgtaggtaaaacttgcctactgatcagttacacaaccaatgcatttcctggagaatatatccctactgtctttgacaattattctgccaatgttatggtagatggaaaaccggtgaatctgggcttatgggatacagctggacaagaagattatgacagattacgccccctatcctatccgcaaacagatgtgttcttaatttgcttttcccttgtgagtcctgcatcatttgaaaatgtccgtgcaaagtggtatcctgaggtgcggcaccactgtcccaacactcccatcatcctagtgggaactaaacttgatcttagggatgataaagacacgatcgagaaactgaaggagaagaagctgactcccatcacctatccgcagggtctagccatggctaaggagattggtgctgtaaaatacctggagtgctcggcgctcacacagcgaggcctcaagacagtgtttgacgaagcgatccgagcagtcctctgcccgcctcccgtgaagaagaggaagagaaaatgcctgctgttgtaaatgtctcagcccctcgttcttggtcctgtcccttggaacctttgtacgctttgctc

SEQ ID NO: 381073 - DNA, 1401 bp, Homo Sapiens
ttggggtagatggaaccctccttttactcctctcggaggccctggcccttacccagacctgggcgggctcccactccttgaagtatttccacacttccgtgtcccggcccggccgcggggagccccgcttcatctctgtgggctacgtggacgacacccagttcgtgcgcttcgacaacgacgccgcgagtccgaggatggtgccgcgggcgccgtggatggagcaggaggggtcagagtattgggaccgggagacacggagcgccagggacaccgcacagattttccgagtgaacctgcggacgctgcgcggctactacaatcagagcgaggccgggtctcacaccctgcagtggatgcatggctgcgagctggggcccgacaggcgcttcctccgcgggtatgaacagttcgcctacgacggcaaggattatctcaccctgaatgaggacctgcgctcctggaccgcggtggacacggcggctcagatctccgagcaaaagtcaaatgatgcctctgaggcggagcaccagagagcctacctggaagacacatgcgtggagtggctccacaaatacctggagaaggggaaggagacgctgcttcacctggagcccccaaagacacacgtgactcaccaccccatctctgaccatgaggccaccctgaggtgctgggccctgggcttctaccctgcggagatcacactgacctggcagcgggatggggaggaccagacccaggacacggagctcgtggagaccaggcctgcaggggatggaaccttccagaagtgggcggctgtggtggtgccttctggagaggagcagagatacacctgccatgtgcagcatgagggtctgcccaagcccctcaccctgagatgggagctgtcttcccagcccaccatccccatcgtgggcatcattgctggcctggttctccttggagctgtgatcactggagctgtggtcgctgccgtgatgtggaggaggaagagctcagatagaaaaggagggagttacactcaggctgcaagcagtgacagtgcccagggctctgatgtgtctctcacagcttgtaaagtgtgagacagctgccttgtgtgggactgagaggcaagagttgttcctgcccttccctttgtgacttgaagaaccctgactttgtttctgcaaaggcacctgcatgtgtctgtgttcgtgtaggcataatgtgaggaggtggggagagcaccccacccccatgtccaccatgaccctcttcccacgctgacctgtgctccctctccaatcatctttcctgttccagagaggtggggctgaggtgtctccatctctgtctcaacttcatggtgcactgagctgtaacttcttccttctctattaaaattagaacctg

SEQ ID NO: 381074 - DNA, 856 bp, Homo Sapiens
ttggtctctgaccagcaccatggcggttggcaagaacaagcgccttacgaaaggcggcaaaaagggagccaagaagaaagtggttgatccattttctaagaaagattggtatgatgtgaaagcacctgctatgttcaatataagaaatattggaaagacgctcgtcaccaggacccaaggaaccaaaattgcatctgatggtctcaagggtcgtgtgtttgaagtgagtcttgctgatttgcagaatgatgaagttgcatttagaaaattcaagctgattactgaagatgttcagggtaaaaactgcctgactaacttccatggcatggatcttacccgtgacaaaatgtgttccatggtcaaaaaatggcagacaatgattgaagctcacgttgatgtcaagactaccgatggttacttgcttcgtctgttctgtgttggttttactaaaaaacgcaacaatcagatacggaagacctcttatgctcagcaccaacaggtccgccaaatccggaagaagatgatggaaatcatgacccgagaggtgcagacaaatgacttgaaagaagtggtcaataaattgattccagacagcattggaaaagacatagaaaaggcttgccaatctatttatcctctccatgatgtcttcgttagaaaagtaaaaatgctgaagaagcccaagtttgaattgggaaagctcatggagcttcatggtgaaggcagtagttctggaaaagccactggggacgagacaggtgctaaagttgaacgagctgatggatatgaaccaccagtccaagaatctgtttaaagttcagacttcaaatagtggcaaataaaaagtgctatttgt

SEQ ID NO: 381075 - DNA, 388 bp, Homo Sapiens
gtcgaccgacagccttccaaatgttcttcgggtgatgctgccaacttagtcgaccgacagccttccaaatgttcttctcaaacggaatcgtcgtatccagcctactcgctattgtcctcaatgccgtattaaatcataaaaagaaataaggaaaagaggtgcgagcctcttttttgtgtgacaaaataaaaacatctacctattcatatacgctagtgtcatagtcctgaaaatcatctgcatcaagaacaatttcacaactcttatacttttctcttacaagtcgttcggcttcatctggattttcagcctctatacttactaaacgtgataaagtttctgtaatttctactgtatcgacctgcagactggctgtgtataagggagc

SEQ ID NO: 381076 - DNA, 1210 bp, Homo Sapiens
  misc_feature (254)..(316): n is a, c, g, or t
  misc_feature (1020)..(1058): n is a, c, g, or t
ttggctgccccagagcccccacccggcaccacacagaccccacccccgccctgcgccagccttcgtccccgcagaggaccccccgacaccagcatggactgctgcaccgagaacgcctgctccaagccggacgacgacattctagacatcccgctggacgatcccggcgccaacgcggccgccgccaaaatccaggcgagttttcggggccacatggcgcggaagaagataaagagcggagagcgcggccggannnnnnnnnnnnnnnnnnnnnnnnnnnnnnnnnnnnnnnnnnnnnnnnnnnnnnnnnnnnnnnccagcggagactaggccagaactgagcattttcaaagttcccgaggagagatggatgccgcgtccccttcgcagcgacaagacttccctgccgtgtttgtgaccccctcctgcccagcaacctgccagctacaggagccccctgcgtcccagagactccctcacccaggcaggctccgtcgcggagtcgctgagtccgtgcccttttagttagttctgcagtctagtatggtccccatttgcccttccactccaccccaccctaaaccatgcgctcccaatcttccttcttttgcttctcgcccacctcttcccgcacccagcatgcagctctgcctccgcagcctcagtgcgctttcctgcgcgcactgcggagggcgccctaagcgtcacccaagcacactcacttaaagaaaaaacgagttctttcgttctgtgcgcagctaaaaggggcgccctacatctccgtgccactcccgccccagcctagccccaagactttggatccggggcgagatgaagggaagagggttgttttggtttcggacgacccttgctctgaccggaagagaagtccctatcccacacctgcctgtcacgttccctcccctttccccagcgcactgttgagggcagcctctccagctctcttgtttatgcaaacgcctagcgcctgggaggctcggtaggaggagtcttccacgnnnnnnnnnnnnnnnnnnnnnnnnnnnnnnnnnnnnnnncgggctcctggggctgtggcgaaaaggtttctgatctccctgtgtgcatgtgactgtgctgggtaggaaggctaacgatataaaagaatgtccagccccctttcaattctgagtcccagaggttacccaaggcacccctctgacatccggcc

SEQ ID NO: 381077 - DNA, 850 bp, Homo Sapiens
ggggctaggctggggcgggagtggcacggagatgtagggcgccccttttagctgcgcacagaacgaaagaactcgttttttctttaagtgagtgtgcttgggtgacgcttagggcgccctccgcagtgcgcgcaggaaagcgcactgaggctgcggaggcagagctgcatgctgggtgcgggaagaggtgggcgagaagcaaaagaaggaagattgggagcgcatggtttagggtggggtggagtggaagggcaaatggggaccatactagactgcagaactaactaaaagggcacggactcagcgactccgcgacggagcctgcctgggtgagggagtctctgggacgcagggggctcctgtagctggcaggttgctgggcaggagggggtcacaaacacggcagggaagtctcgtcgctgcgaaggggacgcggcatccatctctcctcgggaactttgaaaatgctcagttctggcctagtctccgctggggccgccgcccgcgcctccccgggccaccccagctccgccaggccccccagggcccgggcccttccggccgcgctctccgctctttatcttcttccgcgccatgtggccccgaaaactcgcctggattttggcggcggccgcgttggcgccgggatcgtccagcgggatgtctagaatgtcgtcgtccggcttggagcaggcgttctcggtgcagcagtccatgctggtgtcggggggtcctctgcggggacgaaggctggcgcagggcgggggtggggtctgtgtggtgccgggtgggggctctggggcagtcggccgccagccgacccgcgccgaaacagcagctctgccaccaa

SEQ ID NO: 381078 - DNA, 790 bp, Homo Sapiens
tggacgtggtgccggaggggaagaaaataaagaaaacgaacgcccttcggccggatcgaaggcaaacaaagaatttggggatagcctgagtttggagattcttcagattattaaggaatcccagcagcagcatggtttacggcatggagattttcagaggtacaggggctactgttcccgtagacaaagacgtcttcgaaaaacactcaacttcaagatgggtaacagacacaaattcacagggaagaaagtgactgaagagcttctgaccgataatagatacttgcttctggttctgatggatgctgaaagagcctggagctacgccatgcagctgaaacaggaagccaacactgaaccccgaaaacggtttcacttgttatctcgcctacgcaaagccgtgaagcatgcagaggaattggaacgcttgtgtgagagcaatcgcgtggatgccaagaccaaattagaggctcaggcttacacagcttacctctcaggaatgctacgttttgaacatcaagaatggaaagctgccattgaggcttttaacaaatgcaaaactatctatgagaagctagccagtgctttcacagaggagcaggctgtgctgtataaccaacgtgtggaagagatttcacccaacatccgctattgtgcatataatattggggaccagtcagccatcaatgaactcatgcagatgagattgaggtctgggggcactgaaggtctcttggctgaaaaattggaggctttgatcactcagactcgagccaaacaggcagctacc

SEQ ID NO: 381079 - DNA, 581 bp, Homo Sapiens
ttggggcgctgcggcagtccaaatcaaaaatggcggtagttggtgtgtcctcggtttctcggctgctgggtcggtcccgcccacagctggggcggcctatgtcgagtggcgcccatggcgaagagggctcagctcgcatgtggaagactctcaccttcttcgtcgcgctccccggggtggcagtcagcatgctgaatgtgtacctgaagtcgcaccacggagagcacgagagacccgagttcatcgcctacccccatctccgcatcaggaccaagccgtttccctggggagatggtaaccatactctattccataaccctcatgtgaatccacttccaactggctacgaagatgaataaagagaatctggaccactacccgggcaccagggaccacagcactggtttggaccgttactctgcacatggaccagaaaaagtatatgggaccttaagctcaccttctttacttgtatcaaatgatgactggtatactggtctcccatccctttgcttgtggcaggagatggcttaaataaataacttaaactttaaaaaaagaaacatctaagaaaagcatat

SEQ ID NO: 381080 - DNA, 484 bp, Homo Sapiens
ttgtacaaaaaagttggcaaggacccgcctttatgggccgcgttcgcaccaaaaccgtgaagaaggcggcccgggtcatcatagaaaagtactacacgcgcctgggcaacgacttccacacgaacaagcgcgtgtgcgaggagatcgccattatccccagcaaaaagctccgcaacaagatagcaggttacgtcacgcatctgatgaagcgaattcagagaggcccagtaagaggtatctccatcaagctgcaggaggaggagagagaaaggagagacaattatgttcctgaggtctcagccttggatcaggagattattgaagtagatcctgacactaaggaaatgctgaagcttttggacttcggcagtctgtccaaccttcaggtcactcagcctacagttgggatgaatttcaaaacgcctcggggacctgtttgaattttttctgtagtgctgtattattttcaataaatctgggacaa

SEQ ID NO: 381081 - DNA, 950 bp, Homo Sapiens
ttggccgttggccagctctcgcactctgttcttccgccgctccgccgtcgcgtttctctgccggtcgcaatggaagaagagatcgccgcgctggtcattgacaatggctccggcatgtgcaaagctggttttgctggggacgacgctccccgagccgtgtttccttccatcgtcgggcgccccagacaccagggcgtcatggtgggcatgggccagaaggactcctacgtgggcgacgaggcccagagcaagcgtggcatcctgaccctgaagtaccccattgagcatggcatcgtcaccaactgggacgacatggagaagatctggcaccacaccttctacaacgagctgcgcgtggccccggaggagcacccagtgctgctgaccgaggcccccctgaaccccaaggccaacagagagaagatgactcagattatgtttgagaccttcaacaccccggccatgtacgtggccatccaggccgtgctgtccctctacgcctctgggcgcaccactggcattgtcatggactctggagacggggtcacccacacggtgcccatctacgagggctacgccctcccccacgccatcctgcgtctggacctggctggccgggacctgaccgactacctcatgaagatcctcactgagcgaggctacagcttcaccaccacggccgagcgggaaatcgtgcgcgacatcaaggagaagctgtgctacgtcgccctggacttcgagcaggagatggccaccgccgcatcctcctcttctctggagaagagctacgagctgcccgatggccaggtcatcaccattggcaatgagcggttccggtgtccggaggcgctgttccagccttccttcctgggtatggaatcttgcggcatccacgaaaccacctttcaactccatcatgaagtgtgacgtgggacatccgcaaagacctg

SEQ ID NO: 381082 - DNA, 1809 bp, Homo Sapiens
  misc_feature (1762)..(1770): n is a, c, g, or t
ttggcgccccgcgagcacagagcctcgcctttgccgatccgccgcccgtccacacccgccgccagctcaccatggatgatgatatcgccgcgctcgtcgtcgacaacggctccggcatgtgcaaggccggcttcgcgggcgacgatgccccccgggccgtcttcccctccatcgtggggcgccccaggcaccagggcgtgatggtgggcatgggtcagaaggattcctatgtgggcgacgaggcccagagcaagagaggcatcctcaccctgaagtaccccatcgagcacggcatcgtcaccaactgggacgacatggagaaaatctggcaccacaccttctacaatgagctgcgtgtggctcccgaggagcaccccgtgctgctgaccgaggcccccctgaaccccaaggccaaccgcgagaagatgacccagatcatgtttgagaccttcaacaccccagccatgtacgttgctatccaggctgtgctatccctgtacgcctctggccgtaccactggcatcgtgatggactccggtgacggggtcacccacactgtgcccatctacgaggggtatgccctcccccatgccatcctgcgtctggacctggctggccgggacctgactgactacctcatgaagatcctcaccgagcgcggctacagcttcaccaccacggccgagcgggaaatcgtgcgtgacattaaggagaagctgtgctacgtcgccctggacttcgagcaagagatggccacggctgcttccagctcctccctggagaagagctacgagctgcctgacggccaggtcatcaccattggcaatgagcggttccgctgccctgaggcactcttccagccttccttcctgggcatggagtcctgtggcatccacgaaactaccttcaactccatcatgaagtgtgacgtggacatccgcaaagacctgtacgccaacacagtgctgtctggcggcaccaccatgtaccctggcattgccgacaggatgcagaagagatcactgccctggcacccagcacaatgaagatcaagatcattgctcctcctgagcgcaagtactccgtgtggatcggcggctccatcctggcctcgctgtccaccttccagcagatgtggatcagcaagcaggagtatgacgagtccggcccctccatcgtccaccgcaaatgcttctaaacggactcagcagatgcgtagcatttgctgcatgggttaattgagaatagaaatttgcccctggcaaatgcacacacctcatgctagcctcacgaaactggaataagccttcgaaaagaaattgtccttgaagcttgtatctgatatcagcactggattgtagaacttgttgctgattttgaccttgtattgaagttaactgttccccttggtattaacgtgtcagggctgagtgttctgggatttctctagaggctggcaagaaccagttgttttgtcttgcgggtctgtcagggttggaaagtccaagccgtaggacccagtttcctttcttagctgatgtctttggccagaacaccgtgggctgttacttgctttgagttggaagcggtttgcatttacgcctgtaaatgtattcattcttaatttatgtaaggttttttttgtacgcaattctcaattctttgaagagatgacaacaaattttggttttctactgtcatgtgagaacattaggccccagcaacacgtcattgtgtaaggaaaataaaagtgctgccgttnnnnnnnnntccaataatagagagtgggagaaggagcaactggagagg

SEQ ID NO: 381083 - DNA, 412 bp, Homo Sapiens
  misc_feature (191)..(236): n is a, c, g, or t
actttgtacaaaaaagttggcgctgtccaccttccagcagatgtggatcagcaagcaggagtatgacgagtccggcccctccatcgtccaccgcaaatgcttctaggcggactatgacttagttgcgttacaccctttcttgacaaaacctaacttgcgcagaaaacaagatgagattggcatggctttannnnnnnnnnnnnnnnnnnnnnnnnnnnnnnnnnnnnnnnnnnnnnggcttgactcaggatttaaaaactggaacggtgaaggtgacagcaatcggttggagcaagcatcccccaaaattcacaatgtgggccaagactttgaatgcacattgttgtttttttaatagtccttcccaatatgaaatgcgttgttacaggaattcccttgccatcctaaaagc

SEQ ID NO: 381084 - DNA, 1197 bp, Homo Sapiens
ttgtacaaaaaagttggctgttcgacagtcagccgcatcttcttttgcgtcgccagccgagccacatcgctcagacaccatggggaaggtgaaggtcggagtcaacggatttggtcgtattgggcgcctggtcaccagggctgcttttaactctggtaaagtggatattgttgccatcaatgaccccttcattgacctcaactacatggtttacatgttccaatatgattccacccatggcaaattccatggcaccgtcaaggctgagaacgggaagcttgtcatcaatggaaatcccatcaccatcttccaggagcgagatccctccaaaatcaagtggggcgatgctggcgctgagtacgtcgtggagtccactggcgtcttcaccaccatggagaaggctggggctcatttgcaggggggagccaaaagggtcatcatctctgccccctctgctgatgcccccatgttcgtcatgggtgtgaaccatgagaagtatgacaacagcctcaagatcatcagcaatgcctcctgcaccaccaactgcttagcacccctggccaaggtcatccatgacaactttggtatcgtggaaggactcatgaccacagtccatgccatcactgccacccagaagactgtggatggcccctccgggaaactgtggcgtgatggccgcggggctctccagaacatcatccctgcctctactggcgctgccaaggctgtgggcaaggtcatccctgagctgaacgggaagctcactggcatggccttccgtgtccccactgccaacgtgtcagtggtggacctgacctgccgtctagaaaaacctgccaaatatgatgacatcaagaaggtggtgaagcaggcgtcggagggccccctcaagggcatcctgggctacactgagcaccaggtggtctcctctgacttcaacagcgacacccactcctccacctttgacgctggggctggcattgccctcaacgaccactttgtcaagctcatttcctggtatgacaacgaatttggctacagcaacagggtggtggacctcatggcccacatggcctccaaggagtaagacccctggaccaccagccccagcaagagcacaagaggaagagagagaccctcactgctggggagtccctgccacactcagtcccccaccacactgaatctcccctcctc

SEQ ID NO: 381085 - DNA, 711 bp, Homo Sapiens
ttggggctaccagctccccgctgccctgagctcggcgggctggcattcggcccggggaaaagcggagcaggtctgcgaggctaagtgtctccgcggcgcacctcgcggcgagaatccggaggagaaggagactgcaaggataggcccaggaaaacgaagagatggagcagcctatgcagaatggagaggaagaccgccctttgggaggaggtgaaggccaccagcctgcaggaaatcgacggggacaggctcgccgacttgcccctaattttcgatgggccatacccaataggcagatcaatgatgggatgggtggagatggagatgatatggaaatattcatggaggagatgagagaaatcagaagaaaacttagggagctgcagttgaggaattgtctgcgtatccttatgggggagctctctaatcaccatgaccatcatgatgaattttgccttatgccttgactcctgccatttatcatgagattaatactgtgattcccgctgttttctttttccttgcattttcctaatatgcctttactgatccgtttgctgtgaaccctatgttatttccatgtgtcaagtgggtcttgtgttgccagcttctatttgaagattgcctttgcactcagtgtaagtttctgtcagcagtagtttcacccatttgcatggaaaaatttaaagctaataaagcaatttaaaaagc

SEQ ID NO: 381086 - DNA, 337 bp, Homo Sapiens
ttgggtgttgtgttttacagccgttcctgagcatgctgcccgcctgcagcgcttggcccagatccacattcagcagcaggaccagtgtgtggaaatcactgaggagtccaaggctctcctggaggaatacaacaagactacaatgcttctctccaagcaattcgtgcagtgggatgagctactttgccagctagaggccgccacgcaagtgaagccagcagaggagtgatagctgctccccatcccaaagtgggcctgggcagtcaggctccagggccctatgccaacctgcctttgttacaaggcagaggaagctttgtatttattggcttcaagg

SEQ ID NO: 381087 - DNA, 916 bp, Homo Sapiens
ctttgtacaaaaaagttggatttctgccgggcgctccgcgaagatgcagctcaagccgatggagatcaaccccgagatgctgaacaaagtgctgtcccggctgggggtcgccggccagtggcgcttcgtggacgtgctggggctggaagaggagtctctgggctcggtgccagcgcctgcctgcgcgctgctgctgctgtttcccctcacggcccagcatgagaacttcaggaaaaagcagattgaagagctgaagggacaagaagttagtcctaaagtgtacttcatgaagcagaccattgggaattcctgtggcacaatcggacttattcacgcagtggccaataatcaagacaaactgggatttgaggatggatcagttctgaaacagtttctttctgaaacagagaaaatgtcccctgaagacagagcaaaatgctttgaaaagaatgaggccatacaggcagcccatgatgccgtggcacaggaaggccaatgtcgggtagatgacaaggtgaatttccattttattctgtttaacaacgtggatggccacctctatgaacttgatggacgaatgccttttccggtgaaccatggcgccagttcagaggacaccctgctgaaggacgctgccaaggtctgcagagaattcaccgagcgtgagcaaggagaagtccgcttctctgccgtggctctctgcaaggcagcctaatgctctgtgggagggactttgctgatttcccctcttcccttcaacatgaaaatatatacccccccatgcagtctaaaatgcttcagtacttgtgaaacacagctgttcttctgttctgcagacacgccttcccctcagccacacccaggcacttaagcacaagcagagtgcacagctgtccactgggccattgtggtgtga

SEQ ID NO: 381088 - DNA, 792 bp, Homo Sapiens
  misc_feature (433)..(463): n is a, c, g, or t
  misc_feature (574)..(601): n is a, c, g, or t
ttgggttaatgaccccagtccggtgccctcctcctccagcacctaccacgccatcatcggtgggatcgtggctttcattgtcttcctgctgctcatcatgctcatcttcctcggccactacttgatccggcacaaaggaacctacctgacacatgaggcaaaaggctccgacgatgctccagacgcggacacggccatcatcaatgcagaaggcgggcagtcaggaggggacgacaagaaggaatatttcatctagaggcgcctgcccacttcctgcgccccccaggggccctgtggggactgctggggccgtcaccaacccggacttgtacagagcaaccgcagggccgcccctcccgcttgctccccagcccacccacccccctgtacagaatgtctgctttgggtgcggttttgtactcggtttggaatnnnnnnnnnnnnnnnnnnnnnnnnnnnnnnnttgccctcagccctttccgtggcttctctgcatttgggttattattatttttgtaacaatcccaaagcaaatctgtctccaggctggagaggcaggagccctggggtgagnnnnnnnnnnnnnnnnnnnnnnnnnnnnccctggagtgttaggaggagagtgaaggtagaggggtgaggaagggtaaggggcagggctggtttcagctggggggctctcaccagccctcctttcagcctctaaacagagcagctttccagacttctccaggaacccagaaacgggatggttgtcggcaagggttgggagtggcttttcctctggtagcc

SEQ ID NO: 381089 - DNA, 717 bp, Homo Sapiens
ttggggcggcgggaaatacaggctagtgggagagaggctaggcctctgaggaggcgaatccggcgggtatcagagccatcagaaccgccaccatgacggtgggcaagagcagcaagatgctgcagcatattgattacaggatgaggtgcatcctgcaggacggccggatcttcattggcaccttcaaggcttttgacaagcacatgaatttgatcctctgtgactgtgatgagttcagaaagatcaagccaaagaactccaaacaagcagaaagggaagagaagcgagtcctcggtctggtgctgctgcgaggggagaatctggtctcaatgacagtagagggacctcctcccaaagatactggtattgctcccagttccacttgctggagctgccgggggcccagggatcggcagggctgctggcagaggaatcccagctggggttcccatgccccaggctcctgcaggacttgctgggccagtccgtggggttggcgggccatcccaacaggtgatgaccccacaaggaagaggtactgttgcagccgctgcagctgctgccacagccagtattgccggggctccaacccagtacccacctggccgtgggggtcctcccccacctatggggccgaggagcaccccctccaggcatgatgggcccacctcctggtatgaaacctcctatgggtcccccaatggggatccccccctg

SEQ ID NO: 381090 - DNA, 894 bp, Homo Sapiens
ttgggctggagggcagaggaggcggcgcggggtgtcctgtcctcgccatgaggccgcagcaggcgccggtgtccggaaaggtgttcattcagcgagactacagcagtggcacacgctgccagttccagaccaagttccctgcggagctggagaaccggattgataggcagcagtttgaagaaacagttcgaactctaaataacctttatgcagaagcagagaagctcggcggccagtcatatctcgaaggttgtttggcttgtttaacagcatataccatcttcctatgcatggaaactcattatgagaaggttctgaagaaagtctccaaatacattcaagagcagaatgagaagatctatgctccacaaggcctcctcctgacagaccctattgagcgaggactgcgagttattgaaattaccatttatgaagacagaggcatgagcagtggaagataaaccgaagaattaaagatcccacttccagccgggcccctcatgtatccactggccgaccgcagagtgtccctacctcctctccagagcatcattcctttctatctgctgccagagccacggtgccatttactccaaggactcactttctaaaattccacacctggagtgacctctagtcgctcagcatccactttgtgtctccaaattgtgtaggactctgtaatcttttgattagtttctgagaaaacacaatgaagcacttcacttttttttattcaaagccatttaataaaacacagttggtcagcccagtgcaaagcttgttatctgccaccagtacataccattggttctcttcattccttgggccagcttctcagtggctttagacctcaacaagccgtatcttcaccagtgttctatcttgttcccc

SEQ ID NO: 381091 - DNA, 894 bp, Homo Sapiens
tataccacacagtatgttttatacactgacatacaactccctaataagataaagcaaagacaaaaaagtttatcttattagaaacaagatacaccaccacttattgtcttcaaacattattgcactttaactttcttaatttgacaaagcattcaagaaacatctgcagactagttttaacagacaaataacacctgtaagcagacatgactgtcctaaattgtttattaagtatgaattttacaaactttacttatattagcggtaacggtggagctggagagtattgcgccttctccaagctgcccggcgagagccaccaatagtgtggtggaacttgtggccctttccaaggccacggctctttcggcctgcagatgtcagcccacgcatctccctgtgcttgtggactggtttggtgatccactgggtgtcaggatttcttctgatagctttatggaatggatcaatgaggataacctcaaaaaatttgtatgtggaatcttcaccaacccagtaagaattcaggactctcagagccccacagtggcgtccagctcgctcctctgcaacggactgaaggcttcgagcaaactttagctggttaacaccatgatggacaggcttgccgtaagttgcacccttaggaactgggcgttttcggccaccacggcgaacacgaatcctatatataacgtaaccttgcttggccttgtagcccagtcggcgcgctttatcaggccgggtggggcggggagccctgtggagagcagagagctggcggtactgccagcagcggaccctcagaagaaagcgcatgacatcagactgcttctttctccatagctcctggatgtacttgtatgcacccatcttgggttacctgatggccaa

SEQ ID NO: 381092 - DNA, 889 bp, Homo Sapiens
ttgggcgagcagcggcggcggcgcggagagacgcagcggaggttttcctggtttcggaccccagcggccggatggtgaaatcctccctgcagcggatcctcaatagccactgcttcgccagagagaaggaaggggataaacccagcgccaccatccacgccagccgcaccatgccgctcctaagcctgcacagccgcggcggcagcagcagtgagagttccagggtctccctccactgctgtagtaacccgggtccggggcctcggtggtgctcctgatgcccctcacccacccctgaagatcccaggtgggcgagggaatagtcagagggatcacaatctttcagctaacttattctactccgatgatcggctgaatgtaacagaggaactaacgtccaacgacaagacgaggattctcaacgtccagtccaggctcacagacgccaaacgcattaactggcgaacagtgctgagtggcggcagcctctacatcgagatcccgggcggcgcgctgcccgaggggagcaaggacagctttgcagttctcctggagttcgctgaggagcagctgcgagccgaccatgtcttcatttgcttccacaagaaccgcgaggacagagccgccttgctccgaaccttcagctttttgggctttgagattgtgagaccggggcatccccttgtccccaagagacccgacgcttgcttcatggcctacacgttcgagagagagtcttcgggagaggaggaggagtagggccgcctcggggctgggcatccggcccctggggccaccccttgtcagccgggtgggtaggaaccgtagactcgctcatctcgcctgggtttgtccgcatgttgtaatcgtgcaaataaacgctcactcc

SEQ ID NO: 381093 - DNA, 1037 bp, Homo Sapiens
  misc_feature (818)..(842): n is a, c, g, or t
gagtacaaatgcatgaactcgttttcgagtaacttcatccccttttgcagcttgatctttaacttcatattcagtccgacatctttgaagtagcaattggcggaagttgccactctgtgggctaattgtcagatgatgggacaggtaattacacaggcgagctcccatataagagaaatttgggatagatgtggcctgttgatagatgagttccacaagttcttgcaaagcatcatctgttgtaacacaaccattcagggtctctgcaaactgttcaatttcagtttcaaaactgccaggctgctctgtaagatgattcaaaaaatcctgaacatattctgatagagtaggataatcctcacaaccatcctcataggattctgtgtaactggaagaataacctgaagggtaaaattcaggggcattcacagacagcttagacattaatacaggagctacaaccacctggggcttagccattgctgactccgagttctgctgtgggattttatcctgtgaactaggtggagctctcaggggcctcgtttgctctgggagcgccccgggccgggaaggccgctgggggctggcggggacctcgcactgggcccctggcggcggggtcgtcctgggctggcgcagcggcggtggctgcaggaagcccggggctttgggttgcggcggctggtgccgcgcccgctcagcaggccccgctccgttcgggaaaccgccgccctcaggcccgccccctccgcggcccaggccccggctccggccccgaccagcacctggggcccgatcgaaaccgtccgacatgnnnnnnnnnnnnnnnnnnnnnnnnnaggggccgctgccgctgcgctcgcgataggacgcggggggaaggcgccgcgggtcggctatagccgccgcgcctcactcgggcctcatggaggaggagggcggcgggccccggctcggctgctcggtgcttctggcggagcggacggcagcccgagcacccgccgctccagagcgcccgccccgctcggctccaa

SEQ ID NO: 381094 - DNA, 616 bp, Homo Sapiens
tttgtacaaaaaagttggggcgaacgcggagagcacgccatgaaggcctcgggcacgctacgagagtacaaggtagtgggtcgctgcctgcccacccccaaatgccacacgccgcccctctaccgcatgcgaatctttgcgcctaatcatgtcgtcgccaagtcccgcttctggtactttgtatctcagttaaagaagatgaagaagtcttcaggggagattgtctactgtgggcaggtgtttgagaagtcccccctgcgggtgaagaacttcgggatctggctgcgctatgactcccggagcggcacccacaacatgtaccgggaataccgggacctgaccaccgcaggcgctgtcacccagtgctaccgagacatgggtgcccggcaccgcgcccgagcccactccattcagatcatgaaggtggaggagatcgcggccagcaagtgccgccggccggctgtcaagcagttccacgactccaagatcaagttcccgctgccccaccgggtcctgcgccgtcagcacaagccacgcttcaccaccaagaggcccaacaccttcttctaggtgcagggccctcgtccgggtgtgccccaaataaactcaggaacgc

SEQ ID NO: 381095 - DNA, 476 bp, Homo Sapiens
ttgtacaaaaaagttggcgccgcccctcctttccgcatgcgaatctttgcgcctaatcatgtcgtcgccaagtcccgcttctggtactttgtatctcagttaaagaagatgaagaagtcttcaggggagattgtctactgtgggcaggtgtttgagaagtcccccctgcgggtgaagaacttcgggatctggctgcgctatgactcccggagcggcacccacaacatgtaccgggaataccgggacctgaccaccgcaggcgctgtcacccagtgctaccgaaacatgggtgcccggcaccgcgcccgagcccactccattcagatcatgaatgtggaggagatcgcggccagcaagtgccgccggccggctgtccccccacctccacgactccaagatcaagttcccgctgccccaccaggtcctgcgccgtcagcacaagccacgcttcaccacctagaggcccaacaccttct

SEQ ID NO: 381096 - DNA, 1615 bp, Homo Sapiens
  misc_feature (1560)..(1568): n is a, c, g, or t
ttgtacaaaaaagttggcgggaagagaacgacctagagagcagacgccgggatccaggagaatgctcgaggggcgcagagggcagctcccagaccggagaggaccttggacctgttaggcgcatggcaggagtcccggcctcggagccatgaggctggccagccctcagcggggccgggcgggagctggagcctgccagccgcttcctgcctccttcctctgtgggagcagacccgtgggcctcagggcagccagcaggcaggtcttgttgccaatttacaaaccggtggttttctggtttggttttgttttctgcttttacttccatctctcccctcttgaccttccacccactcccctccagggagagagcagcagagacctcatcagcagaccaaggaagtggtgggtgctccccctccctaagctccagggtccctgaatcttctgaaatctcaaatgagtggaggcctcctggggtggcctgtcctgcaggggccctggaatgggggcaagcagctgggtgggcagaatgcagagtagactcgggggaggatcctttcactttccgcttccccttctgatgcatggaggatggtgtgagcttttcagcaggcccggaaaggtacgcaggtgacgccttagcagccccgcagctggtgctctgccccgcggtactggcgccatcaagcctcccttgcccgcctgagagcagcagcagtctctgtcatcccgtcgccccttaccccccaccccagccactgggcccctcccacaccacctggggagctgagaagaggaggctggagtaagggaggacttgatcatccaagaaatactttttattgctgggagtcttctgaacctcaccaaactgaggccagagctgagctcctgggggagttaattcagaggggagaggccagcacctccctcctccatcgctcgctgtgtgccttaaactccatctcatgtccctccccatcccctggctttccctccctccttgccccatcctgggccagccagcagggctcctcctctggctcttcagacctttcagccagtgctgccagtgcccctgggagggaagggcatccctgaggcacccgaatggtccctcagggtgcagggaggcagaagcctggccacagaggagcctcctaaggcagcagctgcagcaagcgcaccctctccccactctccccacgccagagcggcttccagagcagatgctgtttccatcctcctcgtcaaaaccattctcgctgctgagcttgacaatctgggcaaggcttgtggggcgcttgacaaacagaatctgccctgtgccgcctggttccgtggcctccagcatgagcctgcaggcagggcgctgcgggaacccagttgtgctgccccagcccatgcctccgggtctgctgtgcatgaatgagtgctcacttgtcccgggtttaggacgtggtcaagtgaacagcagggtctaactgtgcttacttagcccagttcaaacagaacaaaggaaaaatatagaaagcaacatctgttgatcatttaggnnnnnnnnnaaaccaccatgtcactttgagtccttcatgggtttgtgaacagcatt

SEQ ID NO: 381097 - DNA, 1843 bp, Homo Sapiens
ctgtgcgagcgagcggctaaaggaactccgacccgccccatagctcggagcggcggaggcagagaccgaggctgcaccggcagaggctgcggggcggacgcgcgggccggcgcagccatggtgaagattagcttccagcccgccgtggctggcatcaagggcgacaaggctgacaaggcgtcggcgtcggcccctgcgccggcctcggccaccgagatcctgctgacgccggctagggaggagcagcccccacaacatcgatccaagagggggggctcagtgggcggcgtgtgctacctgtcgatgggcatggtcgtgctgctcatgggcctcgtgttcgcctctgtctacatctacagatacttcttccttgcgcagctggcccgagataacttcttccgctgtggtgtgctgtatgaggactccctgtcctcccaggtccggactcagatggagctggaagaggatgtgaaaatctacctcgacgagaactacgagcgcatcaacgtgcctgtgccccagtttggcggcggtgaccctgcagacatcatccatgacttccagcggggtctgactgcgtaccatgatatctccctggacaagtgctatgtcatcgaactcaacaccaccattgtgctgccccctcgcaacttctgggagctcctcatgaacgtgaagagggggacctacctgccgcagacgtacatcatccaggaggagatggtggtcacggagcatgtcagtgacaaggaggccctggggtccttcatctaccacctgtgcaacgggaaagacacctaccggctccggcgccgggcaacgcggaggcggatcaacaagcgtggggccaagaactgcaatgccatccgccacttcgagaacaccttcgtggtggagacgctcatctgcggggtggtgtgaggccctcctcccccagaaccccctgccgtgttcctcttttcttctttccggctgctctctggccctcctccttccccctgcttagcttgtactttggacgcgtttctatagaggtgacatgtctctccattcctctccaaccctgcccacctccctgtaccagagctgtgatctctcggtggggggcccatctctgctgacctgggtgtggcggagggagaggcgatgctgcaaagtgttttctgtgtcccactgtcttgaagctgggcctgccaaagcctgggcccacagctgcaccggcagcccaaggggaaggaccggttgggggagccgggcatgtgaggccctgggcaaggggatggggctgtgggggcggggcggcatgggcttcagaagtatctgcacaattagaaaagtcctcagaagctttttcttggagggtacactttcttcactgtccctattcctagacctggggcttgagctgaggatgggacgatgtgcccagggagggacccaccagagcacaagagaaggtggctacctgggggtgtcccagggactctgtcagtgccttcagcccaccagcaggagcttggagtttggggagtggggatgagtccgtcaagcacaactgttctctgagtggaaccaaagaagcaaggagctaggacccccagtcctgccccccaggagcacaagcaggtcccctcagtcaagcagtgggatgggcggctgacgaacggggcagcaaagtcactgctcagtcacgtccacgggggacgagccgtgggttctgctgagtagtggagctcattgctttctccaagcttgcaactgttttgaagataacacagagggaaaggagagccacctggtacttgtccacccctgcctcctctgttctgaaattccatccccc

SEQ ID NO: 381098 - DNA, 721 bp, Homo Sapiens
  misc_feature (398)..(432): n is a, c, g, or t
  misc_feature (621)..(639): n is a, c, g, or t
ttggagactttcattctcttgtaaaaggaaccatgctgggctagctaaagggtggggagagggaagatgggccccaccacgctctcaagagaacgcacctgcaataaaacagtcttgtcggccagctgcccaggggacggcagctacagcagcctctgcgtcctggtccgccagcacctcccgcttctccgtggtgacttggcgccgcttcctcacatctgtgctccgtgccctcttccctgcctcttccctcgcccacctgcctgcccccatactcccccagcggagagcatgatccgtgcccttgcttctgactttcgcctctgggacaagtaagtcaatgtgggcagttcagtcgtctgggttttttccccttttctgttcatttcatctggctnnnnnnnnnnnnnnnnnnnnnnnnnnnnnnnnnnntgcttcccctcactgcccaggtcgatcaagtggcttttcctgggacctgcccagctttgagaatctcttctcatccaccctctggcacccagcctctgagggaaggagggatggggcatggtgggagacccagccaagagctgagggtaagggcaggtaggcgtgaggctgtggacattttcggaatgnnnnnnnnnnnnnnnnnnnaaaccgggcaatattgtgttcagttcaagctgtgaagaaaaatatatatcaatgttttccaataaaatacagtgactacctg

SEQ ID NO: 381099 - DNA, 1418 bp, Homo Sapiens
tgacctgagtgagctgccaccgctggaggacatgggacaacccccggcggaggaagctgagcagcctggggccctggcccgagagttccttgctgccatggaacccgagcccgccccagccccggccccagaagagtggctggacattctggggaacgggctgttgaagaagaagacgctggtcccagggccgccaggttcgagccgcccggtcaagggccaggtggtcaccgtacatctgcagacgtcgctggagaatggcacacgggtgcaagaggaaccggagctggtgttcactctgggtgactgtgacgtcatccaggccctggatctcagtgtcccactcatggacgtgggggagacggccatggtcactgctgactccaagtactgctacggcccccaaggcaacaggagcccatacatccccccgcacgcggccctgtgcctggaggtgaccctgaagacggctgtggacgggcctgacctggatatgctcacggggcaggagcgcgtggccctggccaaccggaagcgggagtgcggcaacgcccactaccagcgggcggacttcgtcctggccgccaactcctacgacctcgccatcaaggctatcacctccagcgccaaagtggacatgacgttcgaggaggaggcacagctcctgcagttgaaggtgaagtgtctgaacaacctggcggcctcgcagctgaagctcgaccactaccgcgcagccctgcgctcctgcagccttgtgctggagcaccagccagacaacatcaaggctctcttccgcaagggcaaggtgctggcccagcagggggagtacagtgaggccatccccatcctgagggcagccctgaagctggaaccttccaacaagacgatccacgcagagctctcaaagctggtgaagaagcatgcggcgcagcggagcacggagaccgccttgtaccggaaaatgctgggcaaccccagccggctgcctgctaagtgccctggcaagggtgcctggtccatcccatggaagtggctgtttggggcgactgctgttgccttggggggtgtggcactctctgtggtcatcgctgccaggaactgaccacctaggtggctgccaccccctctgcacaccatggaccctgccctgcgctccccaactcccccaggctccctgtccactgccctccctggtctggccccctcctccgggttaggggagcaaggattgggggtcgtgcagcccagccagcaggagggactgaggccctctaggaggaaagcccagagggagggggccctcattccttcagacccagttttcccccaccctccttaccccgctgggctaggtctccgccagggctggcctcagtttctccttaacaggcctgggggcagcccttcccctgcctagt

SEQ ID NO: 381100 - DNA, 1602 bp, Homo Sapiens
ttggctcgcggcggtgccgcggggatggcgggagccggagctggagccggagctcgcggcggagcggcggcgggggtcgaggctcgagctcgcgatccaccgcccgcgcaccgcgcacatcctcgccaccctcggcctgcggctcagccctcggcccgcaggatggatggcgggtcagggggcctggggtctggggacaacgccccgaccactgaggctcttttcgtggcactgggcgcgggcgtgacggcgctcagccatcccctgctctacgtgaagctgctcatccaggtgggtcatgagccgatgccccccacccttgggaccaatgtgctggggaggaaggtcctctatctgccgagcttcttcacctacgccaagtacatcgtgcaagtggatggtaagatagggctgttccgaggcctgagtccccggctgatgtccaacgccctctctactgtgactcggggtagcatgaagaaggttttccctccagatgagattgagcaggtttccaacaaggatgatatgaagacttccctgaagaaagttgtgaaggagacctcctacgagatgatgatgcagtgtgtgtcccgcatgttggcccaccccctgcatgtcatctcaatgcgctgcatggtccagtttgtgggacgggaggccaagtacagtggtgtgctgagctccattgggaagattttcaaagaggaagggctgctgggattcttcgttggattaatccctcacctcctgggcgatgtggttttcttgtggggctgtaacctgctggcccacttcatcaatgcctacctggtggatgacagcgtgagtgacaccccaggggggctgggaaacgaccagaatccaggttcccagttcagccaggccctggccatccggagctataccaagttcgtgatggggattgcagtgagcatgctgacctaccccttcctgctagttggcgacctcatggctgtgaacaactgcgggctgcaagctgggctccccccttactccccagtgttcaaatcctggattcactgctggaagtacctgagtgtgcagggccagctcttccgaggctccagcctgcttttccgccgggtgtcatcaggatcatgctttgccctggagtaacctgaatcatctaaaaaacacggtctcaacctggccaccgtgggtgaggcctgaccaccttgggacacctgcaagacgactccaacccaacaacaaccagatgtgctccagcccagccgggcttcagttccatatttgccatgtgtctgtccagatgtggggttgagcgggggtggggctgcacccagtggattgggtcacccggcagacctagggaaggtgaggcgaggtggggagttggcagaatccccatacctcgcagatttgctgagtctgtcttgtgcagagggccagagaatggcttatgggggcccaggttggatggggaaaggctaatggggtcagaccccaccccgtctacccctccagtcagcccagcgcccatcctgcagctcagctgggagcatcattctcctgctttgtacatagggtgtggtcccctggcacgtggccaccatcatg

SEQ ID NO: 381101 - DNA, 674 bp, Homo Sapiens
accatttcactgattttttattagggcaagtgcatgttctgtaacatatttcacttgcaagcatgaaagatgaggtctctctctttctacatgggccgctcccggggtctggtcacaatataccaccacagtgggggcaaatcaccttcctttcgggcagggggcaaagcttcagttaaaggaccaccaggtggcgtttcctcctgcagctgcttaacctctcgttcccagctttccctccgcagtttcttccactgttctctcttggcaaagtaatcaggatacattgccttctcagaaggatgccagtcatctaagcaccattctgggaccttgtagcaatcgtatctctcataggaggtgcccccaggagagtcagggaagatgtatggctgtggatgctgacggtaccagaattcttcctcggcctccttcagcagctgggtggccttcgccatatccttttcattcttatgttcttcaaaccgggctctcatcaaacaagcaaagtatcggtatttgtctctctggacgcaccacgactcgaggtggcgtagcgcccgcttataaagccgcaacaccttttgctgatgggtcaggtagggtcccgacgccaagaacgccccaacttttttgtacaaagttgccattgcaaaaaaaacgttgctcatcaa

SEQ ID NO: 381102 - DNA, 892 bp, Homo Sapiens
  misc_feature (262)..(276): n is a, c, g, or t
ttgggaggggtagtgggatggtggggtaccagccactggaggggtcatccttgcccatcgggaccagaaacctgggagagacttggatgaggagtggttgggctgtgcctgggcctagcacggacatggtctgtcctgacagcactcctcggcaggcatggctggtgcctgaagaccccagatgtgagggcaccaccaagaatttgtggcctaccttgtgagggagagaactgagcatctccagcattctcagccacaaccnnnnnnnnnnnnnnngggcagccctccttaccactgtggaagtccctcagaggccttggggcatgacccagtgaagatgcaggtttgaccaggaaagcagcgctagtggagggttggagaaggaggtaaaggatgagggttcatcatccctccctgcctaaggaagctaaaagcatggccctgctgcccctccctgcctccacccacagtggagagggctacaaaggaggacaagaccctctcaggctgtcccaagctcccaagagcttccagagctctgacccacagcctccaagtcaggtggggtggagtcccagagctgcacagggtttggcccaagtttctaagggaggcacttcctcccctcgcccatcagtgccagcccctgctggctggtgcctgagcccctcagacagccccctgccccgcaggcctgccttctcagggacttctgcggggcctgaggcaagccatggagtgagacccaggagccggacacttctcaggaaatggcttttcccaacccccagcccccacccggtggttcttcctgttctgtgactgtgtatagtgccaccacagcttatggcatctcgttgaggacaaagaaaactgcacataaaaccaagcc

SEQ ID NO: 381103 - DNA, 837 bp, Homo Sapiens
ctttgtacaaaaaagttggggcccgccggctgcagaaaggtgcgcggcccggccgcagccccaggccgccgagggagcggcggggccggcgccatggccgagcgaggccgcctcggcctccccggcgcgcccggcgcgctcaacacgcccgtgcccatgaacctgttcgccacctgggaggtggacggctccagccccagctgcgtgcccaggttgtgcagcctgactctgaagaagctggtggtcttcaaggagctggagaaggagctgatctccgtggtgatcgctgtcaagatgcagggctccaaacgaatcctgcggtcccatgagattttgtttccccccagtggacaagtggagacagacctggccctgaccttctccttgcagtatcctcacttcttgaagagggaaggcaacaagcttcagatcatgctgcagcgcagaaagcgctacaagaacagaaccatcctgggctacaagacgctggccgcgggctccatcagcatggctgaggtgatgcaacacccgtctgaaggtggccaggtgctgagcctctgcagcagcatcaaggaggcccccgtcaaggcggccgagatctggatcgcctccctgtccagccagcccattgaccacgaagacagcaccatgcaggccggccccaaggccaagtccacggataactactccgaggaggagtatgagagcttctcctccgagcaagaggctagtgactactccgtgcaggggcaggacttggacgaggacgactttgacgtggggaagccgaagaagcagcggagatcgattgtaagaacgacgtccatgaccaggcaa

SEQ ID NO: 381104 - DNA, 877 bp, Homo Sapiens
ttgggcagagccgctgccggagggtcgttttaaagggcccgcgcgttgccgccccctcggcccgccatgctgctatccgtgccgctgctgctcggcctcctcggcctggccgtcgccgagcctgccgtctacttcaaggagcagtttctggacggagacgggtggacttcccgctggatcgaatccaaacacaagtcagattttggcaaattcgttctcagttccggcaagttctacggtgacgaggagaaagataaaggtttgcagacaagccaggatgcacgcttttatgctctgtcggccagtttcgagcctttcagcaacaaaggccagacgctggtggtgcagttcacggtgaaacatgagcagaacatcgactgtgggggcggctatgtgaagctgtttcctaatagtttggaccagacagacatgcacggagactcagaatacaacatcatgtttggtcccgacatctgtggccctggcaccaagaaggttcatgtcatcttcaactacaagggcaagaacgtgctgatcaacaaggacatccgttgcaaggatgatgagtttacacacctgtacacactgattgtgcggccagacaacacctatgaggtgaagattgacaacagccaggtggagtccggctccttggaagacgattgggacttcctgccacccaagaagataaaggatcctgatgcttcaaaaccggaagactgggatgagcgggccaagatcgatgatcccacagactccaagcctgaggactgggacaagcccgagcatatccctgaccctgatgctaagaagcccgaggactgggatgaagagatggacggagagtgggaacccccagtgattcagatccctgagt

SEQ ID NO: 381105 - DNA, 1341 bp, Homo Sapiens
aattaaagtgatataaaatacattataaagagagcacacatacaaaagtcattaagttggtcagagagcaaaggatgtcacagaacaccgcactgagagcacactggtgtgaattcatttcagttacgaaagtatgtccagagtttgtgttacacatttactgaggtaaaggcacgatcacttccacgtaattaatggggaagaatcccgattctccgtgtatcattccttcataccagttttcatctatttgattggttaatgtaatgatgtccccttctttaaatcctaattctccttggttttctggctcaaagtcatagagaccacgacagcagggctggtccatgggaatgttagaacctgtcgtcttcactacagaggtggtggaaactccattgagctcactagaactccttttcacaggccttggcttgtattctcgtctggggacactggatgcagctgatattcgcatctgtagcttgctctgcagctcctgcagaatctctgtggactgtctgtgatagtctaatgctgcctctatgaacacagccaactggctgacttgttctacatcattttctaaaaagttaaacatgcttctttcagccaactcctttgactcttcaaatttttctaccgcttgtctgacttcttcgtctggtatcttacctactcgtttctttttataatcgtaatccaggcggcggccttccagctttttcaggtgatgcccgatctcttttaaatctttatcttgtagtaactgaagtggatcaataaaagtttgctttacattaatatcaagagagtctttcacctcagccattagcttcatggattcaccaacttctatcaatgcattgccaaaggtggagtcttccccgagctccttcccgtatttcagcatacagtcccccagcaagccttccgtctgcgggtatcctgtggtcttcacctgccctcggatcttcgacacagtgttcagcattcctagcttagctctgtatgctggattaggctgaagattcagtggtttttgaaagaatttctgcagcaactttattggtaacatctattttcctttccatgtcaagaaattcatcgtctagtttagttccttcagcaccacttattttttcactaaatagctggctggctttgtggaactgcttcttcagcccggccaccgacatcgcgactgcgaccggcaggggcggggtggtctcaaggctcggctgggccacgcggccgcgacgcgctcggggagcgggagcccgggccggtccccccgcggctgggctccgccgggcccgcctcccacggccacggccccaa

SEQ ID NO: 381106 - DNA, 203 bp, Homo Sapiens
ttggctgtagcgtctgcctgctccctggactcgcaggcctcgcctgtggcgccttcccagggccagcctgggtcacgagatgctgtcactcagccagatcagtattgacccaccaggggaggtggggtttggtgagagacgccagcctcagactttttcccactgagggtccagagagcggggccacgtgtcacccacgtctg

SEQ ID NO: 381107 - DNA, 697 bp, Homo Sapiens
ctttgtacaaaaaagttggccgcatcctccgcatccacatccgcatcgtcgtcctccccgaccgcgtcctgcagcagctgccagtggagccgcctgacaaggactgccatccaccatggtgaagctgggctgcagcttctctgggaagccaggtaaagaccctggggaccaggatggggctgccatggacagtgtgcctctgatcagccccttggacatcagccagctccagccgccactccctgaccaggtggtcatcaagacacagacagaataccagctgtcctccccagaccagcagaatttccctgacctggagggccagaggctgaactgcagccacccagaggaagggcgcaggctgcccaccgcacggatgatcgccttcgccatggcgctactgggctgcgtgctgatcatgtacaaggccatctggtacgaccagttcacctgccccgacggcttcctgctgcggcacaagatctgcacgccgctgaccctggagatgtactacacggagatggaccccgagcgccaccgcagcatcctggcggccatcggggcctacccgctgagccgcaagcacggcacggagacgccggcggcctggggggacggctaccgcgcagccaaggaggagcgcaaggggcccacccaggctggggcggcggcggcggccaccgaaccccccggggaa

SEQ ID NO: 381108 - DNA, 449 bp, Homo Sapiens
ttgggcagtccaagcggcgctccaacatcttcacgatatgtgccactgtttccaacttttcatcaacaaaaaggcctttccaactccttccaaattagaagaccagttggtgacacacagcacctctggacatgccccctgtgcggggccggaggcgggccgggccctgggactgctctcagatgagaagcggccgccgagctccccactccagagacccacgggaacctttgtaactaaccccacccccagggaaggctaggagcgccggagcccgcgctgggggctgccggggaccaggcccggccggacgctgcaggctcgctgcatggagaagaaggcagctcggccccacgcccggcgctggccagcgcgacgaggcccagaggggcgggggagtccaagcccgcccggcccggctgctcctggggggcgctttcctgcccctc

SEQ ID NO: 381109 - DNA, 867 bp, Homo Sapiens
ttgggacatcttgggatccggagagtggccgggccggcagagcagggggccgaggacaccaggtctgttctcagagcgatgggccgcggagactgatctgccgccatgattggaggcttattcatctataatcacaagggggaggtgctcatctcccgagtctaccgagatgacatcgggaggaacgcagtggatgcctttcgggtcaatgttatccatgcccggcagcaggtgcgcagccccgtcaccaacattgctcgcaccagcttcttccacgttaagcggtccaacatttggctggcagcagtcaccaagcagaatgtcaacgctgccatggtcttcgaattcctctataagatgtgtgacgtgatggctgcctactttggcaagatcagcgaggaaaacatcaagaacaattttgtgctcatatatgagctgctggatgagattctagactttggctacccacagaattccgagacaggcgcgctgaaaaccttcatcacgcagcagggcatcaagagtcagcatcagacaaaagaagagcagtcacagatcaccagccaggtaactgggcagattggctggcggcgagagggtatcaagtatcgtcggaatgagctcttcctggatgtgctggagagtgtgaacctgctcatgtccccacaagggcaggtgctgagtgcccatgtgtcgggccgggtggtgatgaagagctacctgagtggcatgcctgaatgcaagtttgggatgaatgacaagattgttattgaaaagcagggcaaaggcacagctgatgaaacaagcaagagcgggaagcaatcaattgccattgatgactgcaccttccaccagtgtgtgcgactc

SEQ ID NO: 381110 - DNA, 928 bp, Homo Sapiens
ttgggcattcgggccgagatgtctcgctccgtggccttagctgtgctcgcgctactctctctttctggcctggaggctatccagcgtactccaaagattcaggtttactcacgtcatccagcagagaatggaaagtcaaatttcctgaattgctatgtgtctgggtttcatccatccgacattgaagttgacttactgaagaatggagagagaattgaaaaagtggagcattcagacttgtctttcagcaaggactggtctttctatctcttgtactacactgaattcacccccactgaaaaagatgagtatgcctgccgtgtgaaccatgtgactttgtcacagcccaagatagttaagtgggatcgagacatgtaagcagcatcatggaggtttgaagatgccgcatttggattggatgaattccaaattctgcttgcttgctttttaatattgatatgcttatacacttacactttatgcacaaaatgtagggttataataatgttaacatggacatgatcttctttataattctactttgagtgctgtctccatgtttgatgtatctgagcaggttgctccacaggtagctctaggagggctggcaacttagaggtggggagcagagaattctcttatccaacatcaacatcttggtcagatttgaactcttcaatctcttgcactcaaagcttgttaagatagttaagcgtgcataagttaacttccaatttacatactctgcttagaatttgggggaaaatttagaaatataattgacaggattattggaaatttgttataatgaatgaaacattttgtcatataagattcatatttacttcttatacatttgataaagtaaggcatggttgtggttaatctggtttatttttgttccacaagttaataaatcataaaactt

SEQ ID NO: 381111 - DNA, 900 bp, Homo Sapiens
aaaaaaattgggagctggcggccgctgcagacgaaaggcaggaaagggcaggccgggtgagcagacggatcggccgactagacagccaaccagcaacaacgaactgagctcgcatactaccgcttacgcatctaaccaaccgcccatctagctaacccgagcccctccaccgtcaactcaggttcggccggtccccggcccgcctgccggagccgtggtggcagccccgggaggagcactggcgtctgtttccttcgattctcgggattcgaagatggctgcacagtcagcgccgaaagttgtgctaaaaagcaccaccaagatgtctctaaatgagcgctttactaatatgctgaagaacaaacagccgacgccagtgaatattcgggcttcgatgcagcaacaacagcagctagccagtgccagaaacagaagactggcccagcagatggagaatagaccctctgtccaggcagcattaaaacttaagcagagcttaaagcagcgcctgggtaagagtaacatccaggcacggttaggccgacccataggggccctggccaggggagcaatcggaggacgaggcctacccataatccagagaggcttgcccagaggaggactacgtgggggacgtgccaccagaaccctacttaggggcgggatgtcactccgaggtcaaaacctgctccgaggtggacgagccgtagctccccgaatgggcttaagaagaggtggtgttcgaggtcgtggaggtcctgggagagggggcctagggcgtggagctatgggtcgtggcggaatcggtggtagaggtcggggtatgataggtcggggaagagggggctttggaggccgaggccgaggccgtggacgagggagaggtgcccttgctcgccc

SEQ ID NO: 381112 - DNA, 1108 bp, Homo Sapiens
aaggcattgatgtcaatgacggcgtgctgcctgtctggttgttgatgatgatgtcgatgccgaagagtgacacgcccagtgctgccgcagggcccgggagagctcccggatgacctcgtcgctcggccgctcgaacacgccctcgatcttgtccagctccgtcaggaccgatgacgactccggctttgacacgttgtggctgttgaagaagatggactcacggtctgatgtgcctgcggagaagttcttgagtgagggcctctggaccacggtgtaggactcgccaaccacgaacaccttgtacaggacggcgttgtggttgatgaaattctggaccacgcagggtggctggatggcgttcaggccctcctggttgaacacgatagccatctcgtgagagttggtgccatgagccactctggttttgcaaatgaatgggaaagtcaagccgttcttctccagcagccgcatggtgtcatccccgcacaggctcgtgagctccatgaagggtggcgagcagatcctgtcgtcttccatgtgggcctcaatcttccggatgagctcataggacttggagcggtcaagcagggttctgatggcagggagcgggtccaggacgatggtctcagggtgggcatcgatgtactcctggaacctgtgcaccagctccagggactggctatcattctggtcggcttcaaggatgacgtcagtcagcttgtggatgatgacgtccagggggccctgctcctcgatcggccggctaaggttcagctgcacaacctccatccctcgcttcctgcacagctcggcgaaggcctggaaattcagcttcttgattttcttctcgctcagccagtagccaactctcttccctttcagaaaggtctgcatcttcctcctcgggcggggagcctgggtccggaggaaatcgcccacaggccgagtctggcggccggcgcgcgccgcgagcgagtgggcacctcctcccggcggcggggacgcggaacggggatcggagctggggcgcgcagtcccgccgccgccgccgccacttcctcctcggcctggtcctcgcgcgctgcccgccgagaagggcggcggcgag

SEQ ID NO: 381113 - DNA, 1078 bp, Homo Sapiens
ttggcgaggcagggcctgaggaccgagatgaaggcgccaccgaccggttgcccctggatgtcttcaacaactacttcagcctgggctttgacgcccacgtcaccctggagttccacgagtctcgagaggccaacccagagaaattcaacagccgctttcggaataagatgttctacgccgggacagctttctctgacttcctgatgggcagctccaaggacctggccaagcacatccgagtggtgtgtgatggaatggacttgactcccaagatccaggacctgaaaccccagtgtgttgttttcctgaacatccccaggtactgtgcgggcaccatgccctggggccaccctggggagcaccacgactttgagccccagcggcatgacgacggctacctcgaggtcattggcttcaccatgacgtcgttggccgcgctgcaggtgggcggacacggcgagcggctgacgcagtgtcgcgaggtggtgctcaccacatccaaggccatcccggtgcaggtggatggcgagccctgcaagcttgcagcctcacgcatccgcatcgccctgcgcaaccaggccaccatggtgcagaaggccaagcggcggagcgccgcccccctgcacagcgaccagcagccggtgccagagcagttgcgcatccaggtgagtcgcgtcagcatgcacgactatgaggccctgcactacgacaaggagcagctcaaggaggcctctgtgccgctgggcactgtggtggtcccaggagacagtgacctagagctctgccgtgcccacattgagagactccagcaggagcccgatggtgctggagccaagtccccgacatgccagaaactgtcccccaagtggtgcttcctggacgccaccactgccagccgcttctacaggatcgaccgagcccaggagcacctcaactatgtgactgagatcgcacaggatgagatttatatcctggaccctgagctgctgggggcatcggcccgggcctgacctcccaacccccacttcccctctccccacctcaccctgctcacccacgccccggtcactgcaagggg

SEQ ID NO: 381114 - DNA, 1082 bp, Homo Sapiens
  misc_feature (987)..(1015): n is a, c, g, or t
aaaggggggaggggaaccaaggaactaaaaagcccaggataaagggaaggcagaaaaaaagtgaggccgcctccttcctaacgctgcctcccatgagcagacccagggcacaaaaagatgtggtggagacacagtgggcgcccccagagaggtgccgccccagcctcaccatcccgaactggaagagcaggacggtggtgccctcgctgtgcagctccagagtcaccaggtgggcgccgcagctcccgctggccgaggtcttgttggggttgatgttgagaagccttgtcaccgtcgtgttgtccttcctctcataggtgaggttcagctgcagccccatgctggccagcaggcaggtcccgttggtgccgctcacgttgtacttgtccacagaggggctcttgggcacgggtgagggcgaggggctgggtggcgcagggggcgctgtggttggggaaggcctgtcttgttcacagcgtgtctctcccctgctgaagctgctgttggaaaggtacgcctggatggtggcatcatggagcgttacggtcacgttgttcatgtggacctgggtgccactaacacatctgtattttttatctatatctgccctgatgtcagttatagattccacagtcttgatttctttggagctcgcattggggaaaaggtgtgtgtctgacaagttataaacaaaactcatgagctggacgctgtaacgtgttgcatttctcgtgaaattgagagtgagtgtatgtcctcttccaaaagcaatcacgagactggggtcagaagtgttctcttttccacaggagctgcggttgagcaccactgtggcatctgatggcaggtcaaaggtcatgttcttagggccactcttggtgtcgtagttcactgagaaggcagcagagaagttggccattatgcacgcggtcccgttgccatttttcaccataaacattgctgctgacgcacaatgcatgaggccgnnnnnnnnnnnnnnnnnnnnnnnnnnnnngggtcgccgggcgctgccgggggccgccatggcgcgaggcggccgggtacggtgcggagagcggggg

SEQ ID NO: 381115 - DNA, 1163 bp, Homo Sapiens
ttggaattccagagatagctgcatatcacaggaggagaagcgacgcagccatttttcttcgttattatcaaatttggctgctgccggacgccgtagatttgtggctcacccacccttagcccacctctccgcggcttttcactaagtttgaacccgacccctcgccgtagagtgtgtaatttctgtctccgaagctgacgtcaacttctgaacgaaagctaggagcggaagagcgtgcgtggaaatggcgctcgtctcacagaaagttctccgctcccagacatgggtccctcggcttcctgcctcggaagcgcagcagcaggcatcgtgggaaggtgaagagcttccctaaggatgacccatccaagccggtccacctcacagccttcctgggatacaaggctggcatgactcacatcgtgcgggaagtcgacaggccgggatccaaggtgaacaagaaggaggtggtggaggctgtgaccattgtagagacaccacccatggtggttgtgggcattgtgggctacgtggaaacccctcgaggcctccggaccttcaagactgtctttgctgagcacatcagtgatgaatgcaagaggcgtttctataagaattggcataaatctaagaagaaggcctttaccaagtactgcaagaaatggcaggatgaggatggcaagaagcagctggagaaggacttcagcagcatgaagaagtactgccaagtcatccgtgtcattgcccacacccagatgcgcctgcttcctctgcgccagaagaaggcccacctgatggagatccaggtgaacggaggcactgtggccgagaagctggactgggcccgcgagaggcttgagcagcaggtacctgtgaaccaagtgtttgggcaggatgagatgatcgacgtcatcggggtgaccaagggcaaaggctacaaaggggtcaccagtcgttggcacaccaagaagctgccccgcaagacccaccgaggcctgcgcaaggtggcctgtattggggcatggcatcctgctcgtgtagccttctctgtggcacgcgctgggcagaaaggctaccatcaccgcactgagatcaacaagaagatttataagattggccagggctaccttatcaaggacggcaagctgatcaagaacaatgcctcc

SEQ ID NO: 381116 - DNA, 867 bp, Homo Sapiens
tttttaaggatccctttaccctgccctcccccataacccagccagggaaataagcccaacttcaggacctctcagaaatcaggtttaatctattgaaaataaagcagtgggcctttaaaaaaagttagaaaatgagtgtatatatgaaatggaatcatcatctctgcctcttgccttggtgtggggtttccatgaaactctgtgtttggggttggggctctctcttgagtgtgttggaaactggaggacttttaaaacttttttattatgaaaaattgcaaacaaatacagaagtggggagaatggtataatgaatgtccacgtaccatcatctagtttcaacaattatcaacatgtggccagtttttcatttatatcttctcactcttcccacccaccctcaacaggataacctgaagcaaataggggctggtagggtggtctttgaaccagagacctcgggagggagtgaggttatggaggagctagaaaaacctgaaaaaatctgagtaggctgaagcaaatagaaaaattgttgaggaagtggttgttgccagtgtttgggaaaggctaaagttaaccctcatcttctctaccacacatcatcccttcttcttcttccctctttctcatgatgtggggatacaagctagattagaatgatgggtttttccagattaggggccactgataatagaaatgttcagcctggagaaaaacttcagagataagtgtgtccctctaattaacctcttcactcatgttgcagacctctagggcagcaggagcctgggcgtacctgctgttctgagtgggatctgggggaagtacattgggccattgggcctctcacaggtccctacccaa

SEQ ID NO: 381117 - DNA, 1041 bp, Homo Sapiens
ttggagcggacaaaccgctaaaaaaagatcaaggaagggacaggccagcttcctccccacacgcctccccggctgcctctgtgggcttctcctggggggcccaccccacccctgccagtctcctggagatgcttgaggatcggtcctccccagaaccaggccaggacgttgcccctggggcctggtgaccctgtgaggtcaggtcccccagattgacgtctgagtgtgggcaagtgtgtcaaaaggggctgccccccaggggagatgaggctgagagcagggagttgaggccgaagaagtcaaggcccctcccgcaaatgtgtacccctgcccgcgccactgcaccccgccgcacccccacctcccccgggggccctgctgcggatgccggagtgggagagtctctgagctgtgagattgatcttgcccctaattggagaggaagccgggcgccaagacacacggggctcctgccttgggagccagggccgcggccgcaggtagaccccagtagggggggccgggctcgaagttcctttgggaggggctggcgggactccagcaggccgtcctcacctttcttagaaagtccacccagggcaagttgatgttgggggaaagcagaagtcaagccagccgcgggccccacacgccccgacccgctcaaccgacttgtcccttaaatgtgtcttggatcccgcagtgatgacgtgagccagccaggcccgaaagggtgaggccagtgcagagaagcttcccaggggattcctgggttcccccgaaagacaagcgaggtcattgcagttcacccgatgttgctcctgtcccgtgcgtcccggggaggctgtccttggtccgaggctgctcgttgcagcccctcccctgctggcggttacgatgcgtggggtccccctccccgcccagccccggccacgtcgccgtgtcccgcctgtgcctgtgacgtccctgtggacctgtgagccatccccccccttatctctgctctgaatactgcatgaagcattaaacgtgcaatgaagt

SEQ ID NO: 381118 - DNA, 982 bp, Homo Sapiens
tcgaagaaaaaaagccatataaatattagagtataaaacttgcgtgagacacaggaagagggtggggtgggagctacgtgactatgcgaagagaagcgcttataggagaagtcagtacgggggagggggtcgccttagcgcgtggacacagcacaaaacacaacacgggccgccgcgggcagatcaaggacagacggctgcgcggagcccgccgcccgctgcccacccgccatcacgtaaaagcacaccgcactacactactggctattctacaccagccgaaagagggagggggcgctacactactgtaagggcaggtctggggttctctggcagccccgctggatggccggggacccaggggcagaagggggtgggagaagaaggtctatgcacaaggaggcactggggaactttaaccaggctatggccactagggggcgcactggggacctgggcagtggccttcacggaagagaaacggcacctggcaaggtgaaggactgaggcttcaggagggcaggggccctgttgaagaagccccatcctgggctgagactttctgttcatttggtccctgccctagctccctgcctccccaacccagggactaagaatggcctggctggcccacccttcctgctggggctccgctgacccttccaccagtggcacctctggagtacccagcacccacagaggcccctctgacctctcaaggggacctggtcctaaacctgcttcgagcttccttggactgaaatgccagtttaatccattggtcctgttagctcagcccaaagctggctgcctgggctgagccctattatgtagtgggaagggtccagcctagttattggtttatggctggaatctggaggatgttgtcagtcccctgaggacatacagagcctcctccaaggccttgataacttgatgtgtcaagctttgtccatgcccccaccatgcacatccacaccaa

SEQ ID NO: 381119 - DNA, 336 bp, Homo Sapiens
ttggccgcgtgcaacctgtcccgactctagccgcctcttcagctcgccatggatcccaactgctcctgcgccgccggtgactcctgcacctgcgccggctcctgcaaatgcaaagagtgcaaatgcacctcctgcaagaaaagctgctgctcctgctgccctgtgggctgtgccaagtgtgcccagggctgcatctgcaaaggggcgtcggacaagtgcagctgctgcgcctgatgccgggacagccccgctcccagatgtaaagaacgcgacttccacaaacctggattttttatgtacaaccctgaccttgaccgtttgctctattcctttttc

SEQ ID NO: 381120 - DNA, 850 bp, Homo Sapiens
tcaaagcgcttggtgccgatggcatcaactcatcaatgaagatgatagagggcgctttctcttggccagggcaaaggcatcccggactagcttggcaccatctccaatgaacatctgcaccagctgggggccagccagctttaggaaggtggcttagtctgtgcggcacaggcccgggccaggagggtcttccccgtccctgggggcccatacatcagcaccccttttggaggttggatccccaagttctcaaacttctccttgtggttcattggcaagacaatggcctccaccagctcctggatctgcttgtccaaacccccaatgtcactgtattgctccgtgggcctctcgtctacctccatggccttcacccgcgagtcatactctgtgggcagcgtctccaggatcagataggagtctttgttcacacccaccaggtctcctggctttagcttttcagcatccaccaacccaatcacaggaaggaagtacgtctgtcgtgtagaggttttgatcacagcacacttgcccttcctctgggagtccaggtcaatattggcaccatcctcctcttggtcattaggatcaacatccaggagctcgatgacgttggagacaaggtacggcagggtcttgttcactttgattttctcactgttctcttttatcttgtccttcatggcttggagctcatgggtgactctcaacacttcactcttcatgatcttgatctcactgtccagcagccgtgtgcgctggatgatctcctccgtggacatcttgagcacctcctccccaattccatcttgctcggcctcatcccacacggtcgccatcttctcccaaa

SEQ ID NO: 381121 - DNA, 917 bp, Homo Sapiens
ttgggtttgcctgtgaggtggccgccggcatctggggctttgtcaacaaggaccagatcgccaaggatgtgaagcagttctatgaccaggccctacagcaggccgtggtggatgatgacgccaacaacgccaaggctgtggtgaagaccttccacgagacgcttgactgctgtggctccagcacactgactgctttgaccacctcagtgctcaagaacaatttgtgtccctcgggcagcaacatcatcagcaacctcttcaaggaggactgccaccagaagatcgatgacctcttctccgggaagctgtacctcatcggcattgctgccatcgtggtcgctgtgatcatgatcttcgagatgatcctgagcatggtgctgtgctgtggcatccggaacagctccgtgtactgaggccccgcagctctggccacagggacctctgcagtgccccctaagtgacccggacacttccgagggggccatcaccgcctgtgtatataacgtttccggtattactctgctacacgtagcctttttacttttggggttttgtttttgttctgaactttcctgttaccttttcagggctgacgtcacatgtaggtggcgtgtatgagtggagacgggcctgggtcttggggactggagggcaggggtccttctgccctggggtcccagggtgctctgcctgctcagccaggcctctcctgggagccactcgcccagagactcagcttggccaacttggggggctgtgtccacccagcccgcccgtcctgtgggctgcacagctcaccttgttccctcctgccccggttcgagagccgagtctgtgggcactctctgccttcatgcacctgtcctttctaacacgtcgccttcaactgtaatcacaacatcctgactccgtcattt

SEQ ID NO: 381122 - DNA, 818 bp, Homo Sapiens
ttggcgacaccagaagctcaggtggagatcttatcttcctgaggctgctggatttggtgggcgataggaatcaggccccctttttttggctgtgggagaaagaggggtgactgcggatgaagactggcccatttgcagagcactccaaccagctgtggaacatcagcgccgtcccttcctggtccaaagtgaaccagggtctcatccgcatgtataaggccgagtgcctggagaagttccctgtgatccagcacttcaagttcgggagcctgctgcccatccatcctgtcacgtcgggctaggaggggccaagccgaagagccacccaggccacagttcctgtgcctgccttccccaccccagcagtggcccctccccatcccctccctctgttcgtcccgtttgatgagaggctgtttactggggtggggtggcgagatgggcttgagggggctcagagcataaggcttcagggcccaagttgggagaagtgaccaaagtgtagccagttttctgagttcccgtgtgctagactggccagaagagagggtctggggcctggtcactcggccactctctcctgtttctggcctcttctcccttcactcccgtccagtctggttttgagagcaggggctgttctgcagcacctcagggaagggaggagagatacctgctgcttccattgcttttcccttcctggagtcgatgcctttctaagggttggagctgctccttgcagggggcgggtcagtttcccaggccatgccggggtggccatctatgctagggctggaagctgaggctggccgccagct

SEQ ID NO: 381123 - DNA, 859 bp, Homo Sapiens
ttggggcggctcggactgagcaggactttccttatcccagttgattgtgcagaatacactgcctgtcgcttgtcttctattcaccatggcttcttctgatatccaggtgaaagaactggagaagcgtgcctcaggccaggcttttgagctgattctcagccctcggtcaaaagaatctgttccagaattccccctttcccctccaaagaagaaggatctttccctggaggaaattcagaagaaattagaagctgcagaagaaagacgcaagtcccatgaagctgaggtcttgaagcagctggctgagaaacgagagcacgagaaagaagtgcttcagaaggcaatagaagagaacaacaacttcagtaaaatggcagaagagaaactgacccacaaaatggaagctaataaagagaaccgagaggcacaaatggctgccaaactggaacgtttgcgagagaaggataagcacattgaagaagtgcggaagaacaaagaatccaaagaccctgctgacgagactgaagctgactaatttgttctgagaactgactttctccccatccccttcctaaatatccaaagactgtactggccagtgtcattttattttttccctcctgacaaatattttagaagctaatgtaggactgtataggtagatccagatccagactgtaagatgttgttttaggggctaaaggggagaaactgaaagtgttttactctttttctaaagtgttggtctttctaatgtagctatttttcttgttgcatcttttctacttcagtacacttggtgtactgggttaatggctagtactgtattggctctgtgaaaacatatttgtgaaaagag

SEQ ID NO: 381124 - DNA, 780 bp, Homo Sapiens
ttggggaggagaaagtggcgagttccggatccctgcctagcgcggcccaacctttactccagagatcatggctgccgaggatgtggtggcgactggcgccgacccaagcgatctggagagcggcgggctgctgcatgagattttcacgtcgccgctcaacctgctgctgcttggcctctgcatcttcctgctctacaagatcgtgcgcggggaccagccggcggccagcggcgacagcgacgacgacgagccgccccctctgccccgcctcaagcggcgcgacttcacccccgccgagctgcggcgcttcgacggcgtccaggacccgcgcatactcatggccatcaacggcaaggtgttcgatgtgaccaaaggccgcaaattctacgggcccgaggggccgtatggggtctttgctggaagagatgcatccaggggccttgccacattttgcctggataaggaagcactgaaggatgagtacgatgacctttctgacctcactgctgcccagcaggagactctgagtgactgggagtctcagttcactttcaagtatcatcacgtgggcaaactgctgaaggagggggaggagcccactgtgtactcagatgaggaagaaccaaaagatgagagtgcccggaaaaatgattaaagcattcagtggaagtatatctatttttgtattttgcaaaatcatttgtaacagtccactctgtctttaaaacatagtgattacaatatttagaaagttttgagcacttgctataagttttttaa

SEQ ID NO: 381125 - DNA, 764 bp, Homo Sapiens
ttggggcgacgacggcggcggcagcgctccaactggctcctcgctccgggctccgccgtcgagccgggagagagcctccgccagcggccaggcaccagccagacgacgccagcgaccccggcctctcggcggcaccgcgctaactcaggggctgcataggcacccagagccgaactccaagatgggaggcaagctcagcaagaagaagaagggctacaatgtgaacgacgagaaagccaaggagaaagacaagaaggccgagggcgcggcgacggaagaggaggggaccccgaaggagagtgagccccaggcggccgcagagcccgccgaggccaaggagggcaaggagaagcccgaccaggacgccgagggcaaggccgaggagaaggagggcgagaaggacgcggcggctgccaaggaggaggccccgaaggcggagcccgagaagacggagggcgcggcagaggccaaggctgagcccccgaaggcgcccgagcaggagcaggcggcccccggccccgctgcgggcggcgaggcccccaaagctgctgaggccgccgcggccccggccgagagcgcggcccctgccgccggggaggagcccagcaaggaggaaggggaacccaaaaagactgaggcgcccgcagctcctgccgcccaggagaccaaaagtgacggggccccagcttcagactcaaaacccggcagctcggaggctgccccctcttccaaggagacccccgcagccacggaagcgcctagtt

SEQ ID NO: 381126 - DNA, 1154 bp, Homo Sapiens
ttttccccgttatgcagagtacttaagaattaataggaaaattttcagtggaacttcgtaactggcaaatacgttaacagcagcttctcaaaggccacccctcagctgatgatcacagctccttccagtcaatgggcttcttgccagacttctgcagcagctcattggtctttgaaaagtgtctacatccaaagaaccctctatacactgacaaaggggagggatgagccgtctgtagtacatggtgccgcttcctatcaatggcactgcccttcttctgagcataagagccccagagcaagaaaacaaggccattcgagttctgatttagccaggacacaactgcatcagtgaactgctcccagcctcgctccttatgagagttggcttgatgggcacgaaccgtgaggacagcgttgagaaggagaacaccttgcttggcccacccagataaatctccatggccaggatgaacaaaatcctctatgtctgtagacaactctttataaatgttctccaaactgggcggaggcggaacaggcctttgaacactaaagcagagcccgtgagcttgattaggtccatgatatggatcctgtcccaggatgacaaccttcacatcttttatgtcacacatctgggtccaggtgaagacttggtgtgggggtggataaacagtgtaatgctttctttcttctgcaacaaatcccattagcttgataaaatacggtttcccgaactccccgctgaggtgcttcttccagctctctccaaagcccacgggcacgttgcgggccgcgagtctgagcagggccgcggccttgttcctctggatccggtccaactgctcggcactcagcggcgaggagggcggcgtcccaggctcctcctgcccagccggggccttcttggctgggatggcctgcaagtggtccccgcagaggcggctcaagagctgcagcggccccttcccaggcgtccgcagcttccggcccaacccccacggcccaaggcagaagacgcccatttgtggaacaggtcccagcaaaagcggacagtaagagcccagggctgggcccggtccgggaattgggaattaggttctaaactggagcgggaagacgggctgggccaacttttttgtacaaagttgg

SEQ ID NO: 381127 - DNA, 1106 bp, Homo Sapiens
ttgggtgaattcacctatcacttccgggtggcactgctgggtcaggccaactgcagttcagaggctctcgcccagccagccacagactaccacttccacttctaccgcctgtgtgactgagctgccctcctgaggcagcaccacaccagggaccaggggtgcccaggcaccccccaacactggatgcaatggtgttacactggagcccgctgcaggccagctctgctgttcactggccctacccgagactggtgaaactggaagtcttcacactggagttgctgttccagctggtcgcccctcacggcacagagggaacctgagagccagagacttcttgggccttcctgcctgccaccccctaggggccaggacaggaccagtttacctctttccagatatggtggttggagggctggttcaggtgccctggagggaaggggaagcctgtggccctgatttgttcagagcccattctcccttgcctccccttttgagactggagccaacccttttggagagaggacctgcccacctttgagatcagcagggggctcggatccagccctaagagacttgggtggacccccatgagtcaatggagggcagacggctctcccccttaaagctgttccctgggggatggcttggtagtggactttctggggtttgcctgttacgccagactcggacttctaagctttaagtgtggcccaggaggtttcttctccctgggagggcttggctcccaagaagtcccagggcagccgaggccagccctgcctgggttggagaaactgactttgtgccttaagtctactcagtgcctggtgaagccaccctcagcccttcacaggcctgaaccagtaggggccagtgggccaggtaagccctagagccttgaaccaggaatatccaggaagaggaaattccctttgagcccccagatggtattgcagcttcactgcctgcgttcctgggagcgtctgggagctcacagtgatcagtgaccacatcattctctctgagcagaggagcaggaatctctcaagcagcagcctggtcttggctggtggggcagatgcaaatagcttttgctggtatta

SEQ ID NO: 381128 - DNA, 869 bp, Homo Sapiens
tttcagttgcccaaggagcttctcttgttcccgagtcagggcttcactgtgtctctaagcctgtccagctccacttccttcgtcagcactttctcactgatggtctggatgtcatcctctagctccaggatgcgtgccacatggtctccctgttgccggctcaggatgtccctctcttctgtgatctccccatgggaccgggaaatccccttgtactgttccatcagctccgtgtgctcctgcctggcagttgccagagccctctcgagctcctgcactcggctcctcagctctgtcacctgtccctccagctgtagcttcagctgcatcaggtcattccgttcttgctggctctcatcgagctggttctgtaacacagttgccttggggacaaccagcaggatgtcagagcccccatcagcctcctccagggtcaccagttcatccatgggccttggctctcggaactggaaaggggggctctgcccacacacctggccctggcggttcacatatcggaactggtagagctgagctcctggtttgggcaggtagctggcttggaactggacactggtgtgaatgggggaaccatcagttgtactttcaggcacggaagaccacacaaatgtgtggtaatcccgaacacaggcagcctccaccttgaagatgccaatccagtcactggcactgggcatggtgcctgggggaagggtgtagtgacattccaccttggtgttggggatgtaggtccgggctacattgagaaagttgactccaccacgggatggtgcccggcttagtggtgattcttccatcctggccttgagatatctgtcctcccaacagacggatcagctgttccaaaa

SEQ ID NO: 381129 - DNA, 1120 bp, Homo Sapiens
  misc_feature (558)..(645): n is a, c, g, or t
  misc_feature (787)..(833): n is a, c, g, or t
  misc_feature (880)..(921): n is a, c, g, or t
tacaaaaagggagggggagggcggcagctgtggggctcggccccaaccccggccccaccccggcctggcgctgtctgagaagaggggatctgagggagatccagggatcaggcaggatagggatggggcaggacatgaggctgggggatgcagaggttaggtgggagaggctaccggaggaagaatgaggctggtaggggagggagaaagagagcaaagagagagaggagcaattgggggccagctggagagctcagatggagcaggtcaggaggtggaacaatggcagagtgagggtggagggcgcagtgtctggagaggcggaaatgagaaggctggggagaaagaagagggtggcagctctggtgcagggcccagagcagggagccaggtgaagagtggctggacttggctgcccccacccccacctccaggcccagagaggcctcccaaccccagcctgttggcaggggctcacgccgatgccccattttctgtcttctgccgtttgggatccgcttcatcctcctcttcggcagctctcttcagcgcgggccnnnnnnnnnnnnnnnnnnnnnnnnnnnnnnnnnnnnnnnnnnnnnnnnnnnnnnnnnnnnnnnnnnnnnnnnnnnnnnnnnnnnnnnnctcagccccgttctcctcctcctccaccacttctttctttcgctctttccggcttgccttctcctccaccttctccttcttctccttcaggtccttggcgctcaactcggccgctgcctccacgcttttctccgacatggtnnnnnnnnnnnnnnnnnnnnnnnnnnnnnnnnnnnnnnnnnnnnnnnagacggaggggccctggacggcggagggtggccgcggccggaacctnnnnnnnnnnnnnnnnnnnnnnnnnnnnnnnnnnnnnnnnnngctcggcaagctgggtctctggaagaggcggcagaggcgcgcggggtggggcgggggtgggtctggagcggagacccgcagggctgcggccgtccggagggcgggcggaagggcggtgcaggcggtggccggcgcgctcggccgcggtagctcgatcccgggctcgccgcccccgcaccagcagagctgccgccgccaa

SEQ ID NO: 381130 - DNA, 859 bp, Homo Sapiens
atagttaagtgcttttctgctgttacaaccccaatgtcaattgtccgatttcgccagatcctattgttggtcagcaactcctccaactcatcaagccgaagagagaagttcttagaaaactgataaatgtcatccataagcccaaggggtaggtcctggtgcactcctcctggccggatataagcagcatgcattcgggctccagacactcgctcgtagaactcaaacatcttctccctttcttcaaacagccagaagaaaggggtcatggccccaaggtccagggcatgtgtggtcacagccatgatgtggttcaacaaacgtgtgatttctccaaacagcactcggatccactgtgcccgaggaggaggccggatgtttagcaacttctccacagctagagaataggcctgttcgttacacatcatggacacatagtctagccggtcaaagtatggaagggcctgaagataggtcttgtattcaatgagcttctcagtgcctcggtgcaggagcccgatgtgaggatcacacttccgcaccatctccccactcaattccatcactagtcgcaggacaccatgcgctgctgggtgttggggcccaaagttcagggtaatgttcttcacaattgtgtcctttggagggtccacatcattccaaggtggaggcttccagtgggctgtttctttgcttgggtacataacagctcccccaaactgctgtgcccattccacatctggctgccactgccgaacacctctgctgggctgaatcggcaatcggactccagccccaggccgcagcacctgggccgcgacgccccggaagccgcacaaagccctcagcgccgccaaaa

SEQ ID NO: 381131 - DNA, 896 bp, Homo Sapiens
tttgtacaaaaaagttgggctggattccctcctgggggcttcattcccaaaacggccaccacgcccaaaggcagcagctcctggcagacaagtcggccgccagcccagggcgcctcatggccccctcaggccaagccgccccccaaagcctgcacacagccaaggcctaactatgcctcgaacttcagtgtgatcggggcgcgggaggagcggggggtccgcgcacccagctttgctcaaaagccaaaagtctctgagaacgactttgaagatctgttgtccaatcaaggcttctcctccaggtctgacaagaaagggccaaagaccattgcagagatgaggaagcaggacctggctaaagacacggacccactcaagctgaagctcctggactggattgagggcaaggagcggaacatccgggccctgctgtccacgctgcacacagtgctgtgggacggggagagccgctggacgcccgtgggcatggccgacctggtggctccggagcaagtgaagaagcactatcgccgcgcggtgctggctgtgcaccccgacaaggctgcggggcagccgtacgagcagcacgccaagatgatcttcatggagctgaataacgcctggtcggagtttgagaaccagggctcccggcccctcttctgaggccgcagtggtggtggctgcgcacacagctccacaggttgggagccgtcgtgggacctgggtccccaccgtgaggaccccgtgggcgacagcacgtgtggccagggtggggctccgagccccgggtcaccgcccgcccagcgttccaggcacatgaagagaaagcattccaaagcctctgattgttgtttcctttttctcctcccgaagaacagctgattcatgctcctccc

SEQ ID NO: 381132 - DNA, 432 bp, Homo Sapiens
ttgggttggcttggagaagcccgttcaccgcctccagctgctgctctcctcgacatggaccctgagacctgcccctgcccttctggtggctcctgcacctgcgcggactcctgcaagtgcgagggatgcaaatgcacctcctgcaagaagagctgctgctcctgctgccctgcggagtgtgagaagtgtgccaaggactgtgtgtgcaaaggcggagaggcagctgaggcagaagcagagaagtgcagctgctgccagtgagaaggcacccctccgtgtggagcacgtggagatagtgccaggtggctcagtgccacctatgcctgtggtgaaatgtggctggtgtccccttcccctgctgacctcgcccgaatgacaagaaatccgatgaacagcaaaataaatgaacaaaaaaacccaaaatacctttat

SEQ ID NO: 381133 - DNA, 720 bp, Homo Sapiens
tggggacaggtgggtggcagcagagtcagaggcctgggctcccttgagccaggctgggctcttgagccggcccctgtccatctgaaggccacttgccccggcccaagcccctttggctgtccagtttttaagttggtcctggggtccaccatcctcgtcggaataggggaggatgcagccgtatctagaggaggccgtgagggcgtcacatctaccgtaccttttgaacagcaggtccaggacctgttgggtggtggtgaaggctctataggtacacaggaagatggtgacgtaggagaggtcgctgccctggaaggctggcaccaggtgctccaccagcttctccagcgtgccagccttcacggtccgcaccttgcaagtctcataaaggttcagggccgactcattctcatacccgagccagcgctgccccttgttgcctccgtggtgcagctgcaccttgcgcagggagatggagtagatgactccgttgatcagcccctcaccgatctcctgcgtggagctctccgggcgcggcaggtcggggtctagctgcgtgaagctgtgcagcaccaccgggcagctgtcggggacgcccacctccaggcgcacggcgtcccacacgctgcggctccgccgggagcccggaaacagcggctcggcgccgccagcaggcccggccgcctcggcccacatgcgctgcaccatggaaggctcgca

SEQ ID NO: 381134 - DNA, 2015 bp, Homo Sapiens
gccaactttgtacaaaaaagttggcgcccagtcagggggatggctcggtcggcctcgggggtcgacgatcccccgggtaggcgacgtgccctgtccaggcctcacttcccgcgtccgcaaaacggggtggacaacgcagcctaaggcagagccgcgccaaggtccctcgctgtcgccgggctctggcggcctgaccgggcctggggtccgagcgtgcccccgggcctgggggggtcgccgcgatggactcgctggcagcgccccaggaccgcctggtggagcagctgctgtcgccgcggacccaggcccagaggcggctcaaggacattgacaagcagtacgtgggcttcgccacactgcccaaccaggtgcaccgcaagtcggtgaagaaaggctttgacttcacactcatggtggctggtgagtcaggcctggggaagtccacactggtccacagcctcttcctgacagacttgtacaaggaccggaagctgctcagtgctgaggagcgcatcagccagacggtagagattctaaaacacacggtggacattgaggagaagggagtcaagctgaagctcaccatcgtggacacgccgggattcggggacgctgtcaacaacaccgagtgctggaagcccatcaccgactatgtggaccagcagtttgagcagtacttccgtgatgagagcggcctcaaccgaaagaacatccaagacaaccgagtgcactgctgcctatacttcatctcccccttcgggcatgggctgcggccagtggatgtgggtttcatgaaggcattgcatgagaaggtcaacatcgtgcctctcatcgccaaagctgactgtcttgtccccagtgagatccggaagctgaaggagcggatccgggaggagattgacaagtttgggatccatgtataccagttccctgagtgtgactcggacgaggatgaggacttcaagcagcaggaccgggaactgaaggagagcgcgcccttcgccgttataggcagcaacacggtggtggaggccaaggggcagcgggtccggggccgactgtacccctgggggatcgtggaggtggagaaccaggcgcattgcgacttcgtgaagctgcgcaacatgctcatccgcacgcatatgcacgacctcaaggacgtgacgtgcgacgtgcactacgagaactaccgcgcgcactgcatccagcagatgaccagcaaactgacccaggacagccgcatggagagccccatcccgatcctgccgctgcccaccccggacgccgagactgagaagcttatcaggatgaaggatgaggaactgaggcgcatgcaggagatgctgcagaggatgaagcagcagatgcaggaccagtgacgctcgccgcggacacaccgtccgtctccgggacgccctcgcacccctggacaccagaccggactgttcccgacccggagacgcggggccacagcccccagctgaccctaatttattctcagcaccaccccctcccaggtcattgtgtctgtttccgaggggcctggaccgtagcccccgcccagctggccctctctgaccttgggggatcaggagcgaagttgggcgggacttcagagatccgcctcccttgcccttcccccgcccccggacggtcacagcacccaaaccgcaggccctgctctggcaggcaggcaaagctaggcagaagaggattcccaggatcctgggtctgttccctgccccagtgctgcagaacggacttgggagccctcctttgcctgctcccgcgggtcacccagcgagtgctgagaccccattttctgtcgaggcgggccgagtcttcccttatccccagacgcctagcgggcagggttgggctgaatcaaatgggagccctccagacataaggaggccagaggctgcaaggagcggggtcgtgaccgcttacacccttctccacagcccggcccgacctggaagggcccccggggcactgggcggtgagccacctcc

SEQ ID NO: 381135 - DNA, 898 bp, Homo Sapiens
ttggctggaggacgctgaggggcggaggcgggagaggcgagctcgcgatgagtggtctcggcaggctcttcgggaaggggaagaaggagaaagggccaacccctgaagaagcaatacagaaactgaaggagacagagaagatactgatcaagaaacaggaatttttggagcagaagattcaacaggagctacaaacagccaagaagtatgggaccaagaataagagagctgccctacaggctttgcggaggaagaaaagattcgaacagcagctggcacaaactgacgggacattatccaccctggagtttcagcgtgaggccattgagaatgccactaccaatgcagaagtccttcgtaccatggagcttgctgcccaaagcatgaagaaggcctaccaggacatggacattgacaaggtagatgaactgatgactgacatcacggaacaacaggaggtggcccagcagatctcagatgccatttctcggcctatgggctttggagatgatgtggatgaggatgaactgctggaggagctagaggagctggagcaggaggaattggcccaggagttgttaaatgtgggcgacaaggaagaagaaccctcagtcaaattgcctagtgtaccttctactcatctgccggcagggccagctcccaaagtggatgaagatgaagaagcactaaagcagttggctgagtgggtatcctgataaatctgggcttgtcttcctaatgctacctttgttggtcctttcttccttaagtgccaagtgctgagctaaaggaggataactttttggggaagtcatgctgagggtggtagtgtgaccctgcctgaaaaaagggtctcttacctcccagccctggctcaactctgaagaaggatcttgct

SEQ ID NO: 381136 - DNA, 882 bp, Homo Sapiens
ttggactcattcagccggggaaggtgaggcgagtagaggctggtgcggaacttgccgcccccagcagcgccggcgggctaagcccagggccgggcagacaaaagaggccgcccgcgtaggaaggcacggccggcggcggcggagcgcagcgatggccgggcgagggggcagcgcgctgctggctctgtgcggggcactggctgcctgcgggtggctcctgggcgccgaagcccaggagcccggggcgcccgcggcgggcatgaggcggcgccggcggctgcagcaagaggacggcatctccttcgagtaccaccgctaccccgagctgcgcgaggcgctcgtgtccgtgtggctgcagtgcaccgccatcagcaggatttacacggtggggcgcagcttcgagggccgggagctcctggtcatcgagctgtccgacaaccctggcgtccatgagcctggtgagcctgaatttaaatacattgggaatatgcatgggaatgaggctgttggacgagaactgctcattttcttggcccagtacctatgcaacgaataccagaaggggaacgagacaattgtcaacctgatccacagtacccgcattcacatcatgccttccctgaacccagatggctttgagaaggcagcgtctcagcctggtgaactcaaggactggtttgtgggtcgaagcaatgcccagggaatagatctgaaccggaactttccagacctggataggatagtgtacgtgaatgagaaagaagtggtccaaataatcatctgttgaaaaatatgaagaaaattgtggatcaaaacacaaagcttgctcctgagaccaagctgtcattcattggattatggatattccttttgtgctttctg

SEQ ID NO: 381137 - DNA, 831 bp, Homo Sapiens
acctgttcgttgcgacacattgatgagcaatgcttttcctttaacggctcccctttgtacaaaaaagttgggtgtggctgtgccgttggtcctgtgcggtcacttagccaagatgcctgaggaaacccagacccaagaccaaccgatggaggaggaggaggttgagacgttcgcctttcaggcagaaattgcccagttgatgtcattgatcatcaatactttctactcgaacaaagagatctttctgagagagctcatttcaaattcatcagatgcattggacaaaatccggtatgaaagcttgacagatcccagtaaattagactctgggaaagagctgcatattaaccttataccgaacaaacaagatcgaactctcactattgtggatactggaattggaatgaccaaggctgacttgatcaataaccttggtactatcgccaagtctgggaccaaagcgttcatggaagctttgcaggctggtgcagatatctctatgattggccagttcggtgttggtttttattctgcttatttggttgctgagaaagtaactgtgatcaccaaacataacgatgatgagcagtacgcttgggagtcctcagcagggggatcattcacagtgaggacagacacaggtgaacctatgggtcgtggaacaaaagttatcctacacctgaaagaagaccaaactgagtacttggaggaacgaagaataaaggagattgtgaagaaacattctcagtttattggatatcccattactctttttgtggagaaggaacgtgataaagaagtaagcgatgatgaggctgaagaaaaggaaga

SEQ ID NO: 381138 - DNA, 866 bp, Homo Sapiens
ccattttcatttaataagccattggtatagcaacctaaaaacttggctgtgatgacaccaggatgtgtttatggaattgctgcaggaaaacacaattggcagctgacatcctctggctcacagcaccagcttctccaagagacttaaggctggggtgtgtagcggaggtatttcttgccagatgggagctctttggtgaagactcctttcgggaaaagttttttggcttcttcttcagggatggttggaaggaccatcacactatccccatccttccaatcaactggggtggcaacccttttttctgctgtcagctggagagagatgactaccctgagaatctcatcaaagttcctgccagtggtagctgggtagaggatagacagcttcagcttcttatcaggaccaaaaacaaacaccacacgagctgtcacaggcatgcccttttcatccttctctgctggatccagcatgcccaacaggatggcaagctcccgattcctatcatcgatgatgggaaaaggtaacttttctgtgggctcttcacaattgtaagcattgatatccttgctccaggcaagatggtcctcaacactgtctattgaaagggcaatcaacttaacattcctcttggcaaattctggtgccagctttgcagctctgccaagctctgtggtgcacactggggtaaagtcccgagggtgggagaagagaatgccccatgagtctcccagaaagtcgtggaaacggatgcggccgacggtggtattggcctcaaagttgggagccacgtccccgagaagcagacctccgggcatggcgacggtgatgagggggcgccgctgggacagcaagcaaccggccaa

SEQ ID NO: 381139 - DNA, 745 bp, Homo Sapiens
ttggggcttgttttggtttgggggcagccatcctccaccagaaagggggagctccttccgctgcggctccagatagatggggatgccgggctccaggccgaccagcacttgggatctgatgggacacggccagtgcctaggggtgccaagtccaaggcctcccactgggagtcatcgctgagaagatgccaatgtttcatccaccggctgcacaggcacaaactcccccacccaggacggctgtgatgaggtggccctccctgtcaaccctggtccctggagtccccagcacctggggccctggtggggctgatgtcacaggtgtttactgtgctgctgcactggtcctatgccagcctcacccatgtggggaccacggaaggcacactcccttacccccggtgccgggccgtgcggtcccccagacggacagcagctgtggcgacctgcgtttctccctgggcctgtgcttcctgtagttagtccgtcccctggttcccctgtggctcagaggccgcgtccctggcttgtacatatgtgattgctgtgggcacaccccagaccccatgtcatagctgccgtcccgacgtcacgacgcccgtcccgatgtcttacacccgagtgttagccctaggctcctgtactgtgcgtgcacttgaggctctgtccaattaagaaataaatgtggctcttactcaacacacaacaaccacaaaaaaacagaaaaccccactttcttgtacaa

SEQ ID NO: 381140 - DNA, 838 bp, Homo Sapiens
ttggaaaaagaccagactaatatattaatatatatctgctgtccagacagcctgtatcttgggggacagggctggcccagccctgctggccgcctcaccccctcgggtctcctcactcccttctacctgccactcacacagccaggtgccttggagggtcccaagctgggccccagcccaccctcctgtcttcccagggtagcccgcctgccagtcctagctgcacagggcagctgggcccaaccctgtctgtagagggccctggtgtttctagcactggcctgcacggtgggccttgctggggacggggggccccagtcagcctctctcccagtctacccagagaagccccttccccatgggaagacgaggccctcgggcccagcccccacagtgctgtctgatctgtgctttccagctcaccccccacactcactcctgagacccctggcctccggcgtcagcctccagcctctgttcccctagtaagtgccttccatgtcggcctctaaccccaggccccgaggacccagacccagtggggaggcggacgttccagccggcatggctgggaactgcagacctgtcctcctggtgggtccaggggcccctccagcttgtggagccccacactggggtgccgcctgcccgtctctctcccatggagccccagccccctttgggcccagggacaccagccaggctctgtgctgaccctcctgttgcacccagccctggtctcagcagcgaccacccctgcctccaccctccgagctttgcatgttccactaaccccgggcgggtggctgtggaggtgtcatgctgctggcgcctctgc

SEQ ID NO: 381141 - DNA, 534 bp, Homo Sapiens
gagaccccaaaataataataataataaactatctagggcaagggagtagggtcaggtcctccccagcccagctgtaccctccttcccctctggcagggagagaaggggcctcccagggacttcccctcccccttagaacaggggggtgcgagctggtatggatgccctcctgggcttcctgggggctctgcccactccagactccagtttgccacccccagcagggtcttacatgcataagagagcccttgtggtagaggccagcttgctaggcagctaggcaggagacccctacaaggtccaggtaaaggccagggctgccagagccagcagactggtgaggtgggacccagcccaggcctcgctggcacctccagctgcctgcttatggtcccattggcattgctcaccactccagcccaagtagcactggcagcggaagtgtgtctgcaggtggtcaatgtcggcccaactgagctcccccacaggtcgcagctggggttcaccaggtgcatggccaggcactaggcccaa

SEQ ID NO: 381142 - DNA, 781 bp, Homo Sapiens
ttggttttcctagaggttgagcggtttgcacaatgtcggaaatggctgagttgtccgagctgtatgaagagagcagtgacctgcagatggatgtgatgcctggcgagggtgaccttccgcagatggaggtaggcagcgggagccgggagctatccctgcgtccctcccgcagcggggcccaacagctcgaggaggaaggcccaatggaggaggaggaggcccagccaatggcggcgccagaggggaaacggagccttgctaacgggcccaacgctggggagcagccaggccaggtggcgggcgcagacttcgagagcgaggacgagggcgaggaatttgatgactgggaggacgactacgactatcccgaagaggagcagctcagtggtgccggctacagagtatcagccgctcttgaagaagccgacaagatgtttctgagaacaagagaaccagccctggatggcgggtttcagatgcattatgagaagaccccgtttgatcagttagcttttatcgaagagcttttttcactgatggttgtcaatcgtctgaccgaagaactcggctgtgatgagattattgatagagagtagttagatgctgttaaaagaggaggaaactacttgaggagggacccaactttccgctatcttttgggttcattccaaatagttttgtgccattgaaaaacttgaccttcaaaaaaatttgtttttcagaatagaacacaataggacagtgactgcacagttgtgaaaaaggaagagaatcattaaag

SEQ ID NO: 381143 - DNA, 1366 bp, Homo Sapiens
ttgggggatcagaacccgagctgtgcttgtggctgcggctgctaactggctgcgcacagggagctgtcaccatgcctcactcgtacccagccctttctgctgagcagaagaaggagttgtctgacattgccctgcggattgtagccccgggcaaaggcattctggctgcggatgagtctgtaggcagcatggccaagcggctgagccaaattggggtggaaaacacagaggagaaccgccggctgtaccgccaggtcctgttcagtgctgatgaccgtgtgaaaaagtgcattggaggcgtcattttcttccatgagaccctctaccagaaagatgataatggtgttcccttcgtccgaaccatccaggataagggcatcgtcgtgggcatcaaggttgacaagggtgtggtgcctctagctgggactgatggagaaaccaccactcaagggctggatgggctctcagaacgctgtgcccaatacaagaaggatggtgctgactttgccaagtggcgctgtgtgctgaaaatcagtgagcgtacaccctctgcacttgccattctggagaacgccaacgtgctggcccgttatgccagtatctgccagcagaatggcattgtgcctattgtggaacctgaaatattgcctgatggagaccacgacctcaaacgttgtcagtatgttacagagaaggtcttggctgctgtgtacaaggccctgagtgaccatcatgtatacctggaggggaccctgctcaagcccaacatggtgaccccgggccatgcctgtcccatcaagtataccccagaggagattgccatggcaactgtcactgccctgcgtcgcactgtgcccccagctgtcccaggagtgaccttcctgtctgggggtcagagcgaagaagaggcatcattcaacctcaatgccatcaaccgctgcccccttccccgaccctgggcgcttaccttctcctatgggcgtgccctgcaagcctctgcactcaatgcctggcgagggcaacgggacaatgctggggctgccactgaggagttcatcaagcgggctgaggtgaatgggcttgcagcccagggcaagtatgaaggcagtggagaagatggtggagcagcagcacagtcactctacattgccaaccatgcctactgagtatccactccataccacagcccttggcccagccatctgcacccacttttgcttgtagtcatggccagggccaaatagctatgcagagcagagatgccttcacctggcaccaacttgtcttcctttctctcttcccttcccctctctcattgctgcacctgggaccataggatgggaggatagggagcccctcatgactg

SEQ ID NO: 381144 - DNA, 1717 bp, Homo Sapiens
gttcgttgcaacaaattgatgagcaatgcttttctctttaatagccaactttgtacaaaaaagttgggatgcccagctcttcgcccagtctatcggccaggccttcagcgtggcctaccaggagttcctgcgagccaatggcatcaaccccgaagacttgagccagaaggaatacagcgacatcatcaacacccaggagatgtacaacgacgacctcatccacttctcaaactcggagaactgcaaggagctgcagctggagaagcacaagggcgagatcctgggcgtggtggtggtggagtcgggctggggctccatcctgcccacggtgatcctggccaacatgatgaatggcggcccggctgcccgctcggggaagctgagcatcggggaccagatcatgtccatcaatggcaccagcctggtggggctgcccctcgccacctgccaaggcatcatcaagggcctgaagaaccagacacaggtgaagctcaacattgtcagctgtcccccggtcaccacggtccttatcaagcggccagacctcaagtaccagctgggcttcagcgtgcagaatggaattatctgcagcctcatgagagggggcactgctgagcgagggggcgtccgtgtgggccaccgcatcatcgagatcaacgggcagagcgtggtggccacagcccacgagaagatagtccaagctctgtccaactcggtcggagagatccacatgaagaccatgcccgccgccatgttcaggctcctcacgggtcaggagaccccgctgtacatctaggccaccccagcctggccacgcagccaggacaccgggcagggccgcccgggcccagagagctgggagccgggccgcagacttgaccccgacgccacagcccagccacggacgctggctccccaaaggtgtgccctcaccacccacttgatttttttcattttgccaaaaaggggtatgtctttatcaaaggagagtcacagaacaaatgtttgtttgtaaagcgttccaagtattttgccacgttctggactgtcttctccctgcacaagccagggtgtgtctcggtagctgtgcgtggtgtggagtgtgtgtctttcctccctgaagctgtgcggagcgaactggcacctccgagggacgcggctcccggggcagggcagccgtcacccctgcctcccgcccccttggctgggacgtctggggtcctgtggggcccccacaatggtcccaaacagctgcctctgccactgactgcagggacacgggcagcctggctcccaggacacgacttgtaatgaaagtttggggacatgtgattgattgattgattgtaaataaaggatgatggccacaacatgaaaactccatatttatttagatgctattattactgtttgtttggacttttattttggcaggcttttttccagactctagggttttccaatgtgactaatgaccacacctgcctctcccgtcgtctcttctgggcaccctcccacccggctgcatacccgggcagggctcccacagagacaaggagggcacaggtgtctgccccctctttaaaatcgatctacacacatccacgcacatgcgaccccgaggaaacgaaacccactctagaaaacgcgaccttggccgcacctaaagcagccagccgtgagtgcagaccccttggccagcgtggcgcagtggccc

SEQ ID NO: 381145 - DNA, 897 bp, Homo Sapiens
ccccccgccccggcctcatatcatcttcatgttgaacttgcggggcgcgtcggcggagctgatgcctgcgtccgactttcggggcacatactcgatctcgatgttgtgctttgtgttgcccttgccccggctccagagaaacagcagcaccaggcagaagaggacgacgcccaggaaagagatgaagcccatggtggtggcgatgatgagggtcttgatgtcgaaggggaaaggcacagtggcgcgggtgctgttggcctctccctcgcccggctggttggagatgaaagcgaaggtcttgttgggctgatggggccagtcgggcgagtagctgcgcacatgcaggtgggcgggcatggagtcgttgccgcccgcgttggccgcgatgcacaggtacgtgccgttgtcctgtacctgggcgtagcgcacctccagcgtgccatcagggaagactgtgagccgcccattgctcttggctgagaccaggtgctttcggggtgagagccagaggatggcgggcggcgggtcgccatcggcccggcacacaaactgcaccgtgtggccctcgtccacaaacacctgctgggccttgcggtcccggatgcgggcgcggcggcaggtgaagtagttgggcagtagcacatcagggaagtccttgaactccttgccctggacaaactcgggcgtggcgcacgtgggctgctgccggttgaagttgagccgccagcggcgccggaacacccacaggagccgacagtcgcaggccagcgggttggagtccaggatgagtgtctccaggttgcccaccgagtggaagactgattcctccagtgtggtcagctggttgccagagacattgagcacgcgcaaaatagttgaggccccaacttttttgta

SEQ ID NO: 381146 - DNA, 607 bp, Homo Sapiens
ttggagcgcacctttccgcgggccgcggggatggcggcgcagggcgtagggcctgggccggggtcggcggcgcccccggggctggaggcggcccggcagaagctggcgctgcggcggaagaaggtgctgagcaccgaggagatggagctgtacgagctggcgcaggcggcgggcggcgctatcgaccccgacgtgttcaagatcctggtggacctgctgaagctgaacgtggcccccctcgccgtcttccagatgctcaagtccatgtgtgccgggcagaggctagcgagcgagccccaggaccctgcggccgtgtctctgcccacgtcgagcgtgcccgagacccgagggagaaacaaaggcagcgctgccctcgggggagcattggccctggcggaacgcagcagccgcgaaggatccagccagaggatgccacgccagcccagcgctaccaggctgcccaaggggggcgggcctgggaagagccctacacggggcagcacctaggatggggcagagacttgttgcatctttgtccccagcaaaggctacatgttacctccttcaattgataataaacctttctgagatgcagagggtcctgggc

SEQ ID NO: 381147 - DNA, 901 bp, Homo Sapiens
aactgcatacagcagtctacaccacaaactcatgtttgatttcatacaatcccgtggctttcttgttctgcccctttggggttaaccatacgctcctccactacttagtataaaccctgttcccaggcctccattaactttcacactcaggctgattacacacatatatttaacagtacagttttacacagaatgctaagagcacttttcttcatattttacagaagggcttgaaacatacagactattcgtaatcatacaatagcacatccaaatctaactcctaaatagatgatgcattataatttgtttagaatttaaaggcttaatggcaataatcaggggaggaagaagagtatgtttattttacataactgacggaaaaataaattcaacaaatagtaaatagaatttaatatggtctcatgcgccctgaaggaggtggtgcccgatttggaggggtaattgctatgtccaagtaatctcctatctggaacttctgcgactgcagggtcatggaatcatcagtcccctttctgccagacatggtgctgccaatctccttaactcgatagccaggtcttttaacatctgtaaaaacgattgcaaaattgaagtgagtgcccttctttctagcttctgggtagacttcttttactaagcttgtcagttctttcaaagttgcatccatccaagtgtagatctgcaactcgctggacggtacatttccccgggagaactcgtccattcggtggtggcggccgttattggtggtgaagacccgtagcaacagtgggcatgtcttctcgcggtcgatcggtttctctggctccttcttaatttcctcctgggtaacgcgcgactccaccgccatcttcccaacttttttgtacaaagttgg

SEQ ID NO: 381148 - DNA, 987 bp, Homo Sapiens
ccattcctgtcagcagtgagtctgagctgcctggtgctgccttccaatcctctgcaaatccaactgatcagcaacttatgaagacctcccttaagatttttgcagctcttcatcaggtatttcacatcataaatggatgggaagaaaaggttcagaatatgaaagaattcatgttcctcttctggcaaacgagaatctgtaagcaactttaccatatagccaaaatcatagccactatgaaatgaaagccatttgacattgtcacagagaaccactcctgatgtcataagcagctctgcaaagtgcagtgtgtcaatcccttcctcttcatgcttctgaaactgtagtcctgagttagcaaggagatctatggaatcctgggagtacatgtcctctgtaaggttaaatttgaaattgaactgccaagtattgattccagaaggatactctcccttctcatttgtgaatgtaaggcccagctggataatttttaaaaggtcaacattgcaccgcagaagctgatattggtaatctatggaactacgaaattcaccaattggtcgcaccacaacacctggaaattctgtgtccatggcaatataactgtaactgagcacgatttctcggatcttcctcatctcttcttctagattactggcccacacttcacagataacctggctattctccacaagtgctgcaggcatcctgaagaaacctgagaagtcgtcttcagctaactagttttacagtgcaagccagacaatgtttggtctgatcgggaccgacagggcccgcgaagcgctggctggcgggctgacgagctggcgggctggcgggctgactccccgacggcggcgacggcagcccctggcccggagctcttttccctctaccccggatctgctcctagaaccgaacgagccagtgaggtgagcgcccccgtgcccagagcggtcttacgtgcctcccacccaacttttttgt

SEQ ID NO: 381149 - DNA, 938 bp, Homo Sapiens
gaagacttcaagcgatgtttgtactgtgatgatagcttcttcccatgtggggattaagggtagggagtggggggaatggtccaaacccggaaggagctaatggagaggatagggccaaagtgggacagggcttggatggtagaggatggggtccaggaggaagaggagtctagcaatccaagcgcaggggtcagtgctccgagtcccagggctcagaaccagcagggcgaccacatgagcgagcccagcgccgccccagtggcggctcccgcaagcatgcccatggccagaggggcgccggcgctgtagcagggatcctcccgcactatcacgtgcgtcacgccagggcctgcgtagggcggtccgtagtagctgcggacatacgtggcctcgtgtgcattggggggcaccacctcgtagtagtcttggtacgggctgtagacgcgcaccggggtggagtttgcctccagcagtgctgtcttccatgctagggcatcatccttggtctccgcacagaggtgcaggcggccgccttcccgtaggttcacagtcagcaggccatctcggctccggccctctgggggctgcacatcatggcactctgggccgatctttatgtcacggacattgaagtggatgagcacacggtcctcctcgtcctgcgctgtctcatcgtggtagtatcccagggtcccgtccagccacagggcaaaccagttccgcttccagcggcggaggatggagctctgtctccacagccagccgcccctcaccagggccatttcttcaaaaggactttccagagcggagtcaggcgggaccttgtctacacttgttgcggatgttgctgcctaagcggccgctactcgatgctgctgccacccaacccgctgcgcttttttgttaatggtgtgccccggccaacttttttgtacaaa

SEQ ID NO: 381150 - DNA, 678 bp, Homo Sapiens
ttggagctgctccaccctggtgaccgcgcctggccagcacctcaagttccagcctctgaccctggagcagcacaagggcttcatgatggagcccgattggcccttgtacccgccgccgtcccacgcctgtgaggacagcctaccaccctacaagctgaagctggacctgaccaagctgtaggcctccactggccccatcactgccaactgcagggggcccctcgggcctcacttgccctgagcccaggagtccaagggcagggtgggtccagccttgagcccctccacccccaaatccttcctctcctcccagtcccaccccttgccccacggagtcctggggacgcagtgccccagctgggaagagggcgggatcgggcactggttcctccttgtccccgctttcttgggggcttgctactttttgtcttctattgtgtggctttctgagtatttgaaccccagtcctgtgtcaccttcctttttccttctatgtcccctctctgcggggggggcgctgaggctgagggggagctgcgtcttgctagggcttcccccttctccccatcccggtctccagagacccagcttctgagagacagggtgtgggcatctccatgcccctataaagcgtgcctggggcttgtctggggctggggaggaataaaccatgtatat

SEQ ID NO: 381151 - DNA, 934 bp, Homo Sapiens
ttgggaggcgggtccggagagggctatggaaagccgccggcggggaatcccggccgtagagggacagtggataggtgcccgaggcctacagctggcctggggctcgtgtctgggcttcggacgttggggcccggtggcccaccctttccgtagttgtcccaaatggagctggaattggatgctggtgaccaagacctgctggccttcctgctagaggaaagtggagatttggggacggcacccgatgaggccgtgagggccccactggactgggcgctgccgctttctgaggtaccgagcgactgggaagtagatgatttgctgtgctccctgctgagtcccccagcgtcgttgaacattctcagctcctccaacccctgccttgtccaccatgaccacacctactccctcccacgggaaactgtctctatggatctagagagtgagagctgtagaaaagaggggacccagatgactccacagcatatggaggagctggcagagcaggagattgctaggctagtactgacagatgaggagaagagtctattggagaaggaggggcttattctgcctgagacacttcctctcactaagacagaggaacaaattctgaaacgtgtgcggaggaagattcgaaataaaagatctgctcaagagagccgcaggaaaaagaaggtgtatgttgggggtttagagagcagggtcttgaaatacacagcccagaatatggagcttcagaacaaagtacagcttctggaggaacagaatttgtcccttctagatcaactgaggaaactccaggccatggtgattgagatatcaaacaaaaccagcagcagcagcacctgcatcttggtcctactagtctccttctgcctcctccttgtacctgctatgtactcctctgacacaaggggagcctgccagctga

SEQ ID NO: 381152 - DNA, 1014 bp, Homo Sapiens
tgccccacgagtcccctctcatccccgaggcggctgaggtctttgctgatgacacaccagcttgcgcccccagctgtcccctcctgattagggggaagctgtcacgggctggctgggcaccagtattcagagcagatgaagatgtcactccagacaggagggccacacaggaattctgaaaaccagcatcgataaacagcaacggaaacaaaagccccgttcccaactctgcagctccagggctggggcccgaagaccctgtagtcgcccaagccccgtggggtgtggcagggtgtcctgagagcccggtggggaggcgcctggctgggctcacgctagttcttgccacgaaggctgctgcctcaggaaagccactgccctgggccacagacaagtagtaacagaaataaggagggtgacaacacatctcttaggcagagcagtgacaggctgtgccccaaagtccaaacaggccaggcagagaagggcagggacagggctcaggctgagaagaacagctggcgtccaggcagggtggccagaacgggtgggcacaaaggatgggcccgcaggcctaagtcatttggtgcggcgcctccagcatctccataaggaaggtgtcaatgggtgtgtccccgatgagcttgaagaagaagagatgttccaggcatttgagcccgatggagcgcagagccggcaggcggagcaagagcttagcgaaccttcccggctgctctgggtacttgtgcttgcagtaggcctccaaggacgcatagaccttctccctcagcgcctccacctcggccgggttcgagagccccttggagtcagggttaaagaggacgatggcgcgcaggcagcccagctccgtcttgtccatctgcatgtcccgcatcttggacacaagctccgtcagcaccctgtcaaagatggcgcccacccctgcgctgtgggcgctgttccggtggacgtgcagcccggtggccaggaggatcccgtccttcacggcgccaa

SEQ ID NO: 381153 - DNA, 870 bp, Homo Sapiens
ttgggaagctggacaacgtcctcctggatgcggacgggcacatcaagctcacagactacggcatgtgcaaggaaggcctgggccctggtgacacaacgagcactttctgcggaaccccgaattacatcgcccccgaaatcctgcggggagaggagtacgggttcagcgtggactggtgggcgctgggagtcctcatgtttgagatgatggccgggcgctccccgttcgacatcatcaccgacaacccggacatgaacacagaggactaccttttccaagtgatcctggagaagcccatccggatcccccggttcctgtccgtcaaagcctcccatgttttaaaaggatttttaaataaggaccccaaagagaggctcggctgccggccacagactggattttctgacatcaagtcccacgcgttcttccgcagcatagactgggacttgctggagaagaagcaggcgctccctccattccagccacagatcacagacgactacggtctggacaactttgacacacagttcaccagcgagcccgtgcagctgaccccagacgatgaggatgccataaagaggatcgaccagtcagagttcgaaggctttgagtatatcaacccattattgctgtccaccgaggagtcggtgtgaggccgcgtgcgtctctgtcgtggacacgcgtgattgaccctttaactgtatccttaaccaccgcatatgcatgccaggctgggcacggctccgagggcggccagggacagacgcttgcgccgagaccgcagagggaagcgtcagcaggcgctgctgggagcagaacagtccctcacacctgggcccgggcaggccagcttcgtgctggaggaacttg

SEQ ID NO: 381154 - DNA, 737 bp, Homo Sapiens
ttgggtgccactgaagatcctggtgtcgccatgggccgccgccccgcccgttgttaccggtattgtaagaacaagccgtacccaaagtctcgcttctgccgaggtgtccctgatgccaagattcgcatttttgacctggggcggaaaaaggcaaaagtggatgagtttccgctttgtggccacatggtgtcagatgaatatgagcagctgtcctctgaagccctggaggctgcccgaatttgtgccaataagtacatggtaaaaagttgtggcaaagatggcttccatatccgggtgcggctccaccccttccacgtcatccgcatcaacaagatgttgtcctgtgctggggctgacaggctccaaacaggcatgcgaggtgcctttggaaagccccagggcactgtggccagggttcacattggccaagttatcatgtccatccgcaccaagctgcagaacaaggagcatgtgattgaggccctgcgcagggccaagttcaagtttcctggccgccagaagatccacatctcaaagaagtggggcttcaccaagttcaatgctgatgaatttgaagacatggtggctgaaaagcggctcatcccagatggctgtggggtcaagtacatccccagtcgtggccctctggacaagtggcgggccctgcactcatgagggcttccaatgtgctgcccccctcttaatactcaccaataaattctacttcctgtccacct

SEQ ID NO: 381155 - DNA, 1102 bp, Homo Sapiens
ttggatcaccatggcggctgggaccctgtacacgtatcctgaaaactggagggccttcaaggctctcatcgctgctcagtacagcggggctcaggtccgcgtgctctccgcaccaccccacttccattttggccaaaccaaccgcacccctgaatttctccgcaaatttcctgccggcaaggtcccagcatttgagggtgatgatggattctgtgtgtttgagagcaacgccattgcctactatgtgagcaatgaggagctgcggggaagtactccagaggcagcagcccaggtggtgcagtgggtgagctttgctgattccgatatagtgcccccagccagtacctgggtgttccccaccttgggcatcatgcaccacaacaaacaggccactgagaatgcaaaggaggaagtgaggcgaattctggggctgctggatgcttacttgaagacgaggacttttctggtgggcgaacgagtgacattggctgacatcacagttgtctgcaccctgttgtggctctataagcaggttctagagccttctttccgccaggcctttcccaataccaaccgctggttcctcacctgcattaaccagccccagttccgggctgtcttgggggaagtgaaactgtgtgagaagatggcccagtttgatgctaaaaagtttgcagagacccaacctaaaaaggacacaccacggaaagagaagggttcacgggaagagaagcagaagccccaggctgagcggaaggaggagaaaaaggcggctgcccctgctcctgaggaggagatggatgaatgtgagcaggcgctggctgctgagcccaaggccaaggaccccttcgctcacctgcccaagagtacctttgtgttttttgaatttaagcgcaagtactccaatgaggacacactctccgtcccccctgccatatttctgggagcactttgataaggacggctggtccctgtggtactcagagtatcgcttccctgaagaactcactcagaccttcatgagctgcaatctcatcactggaatgttccagcgactggacaagctgaggaagaatgccttcgccagtgtcatcctttttgg

SEQ ID NO: 381156 - DNA, 1448 bp, Homo Sapiens
ttgggacggctttggggcagggcagatttatatctgcgggggatcagctgacgctccgcattgcagactgcggagtcagacggcgctatgtacgccctcttcctcctggccagcctcctgggcgcggctctagccggcccggtccttggactgaaagaatgcaccaggggctcggcagtgtggtgccagaatgtgaagacggcgtccgactgcggggcagtgaagcactgcctgcagaccgtttggaacaagccaacagtgaaatcccttccctgcgacatatgcaaagacgttgtcaccgcagctggtgatatgctgaaggacaatgccactgaggaggagatccttgtttacttggagaagacctgtgactggcttccgaaaccgaacatgtctgcttcatgcaaggagatagtggactcctacctccctgtcatcctggacatcattaaaggagaaatgagccgtcctggggaggtgtgctctgctctcaacctctgcgagtctctccagaagcacctagcagagctgaatcaccagaagcagctggagtccaataagatcccagagctggacatgactgaggtggtggcccccttcatggccaacatccctctcctcctctaccctcaggacggcccccgcagcaagccccagccaaaggataatggggacgtttgccaggactgcattcagatggtgactgacatccagactgctgtacggaccaactccacctttgtccaggccttggtggaacatgtcaaggaggagtgtgaccgcctgggccctggcatggccgacatatgcaagaactatatcagccagtattctgaaattgctatccagatgatgatgcacatgcaacccaaggagatctgtgcgctggttgggttctgtgatgaggtgaaagagatgcccatgcagactctggtccccgccaaagtggcctccaagaatgtcatccctgccctggaactggtggagcccattaagaagcacgaggtcccagcaaagtctgatgtttactgtgaggtgtgtgaattcctggtgaaggaggtgaccaagctgattgacaacaacaagactgagaaagaaatactcgacgcttttgacaaaatgtgctcgaagctgccgaagtccctgtcggaagagtgccaggaggtggtggacacgtacggcagctccatcctgtccatcctgctggaggaggtcagccctgagctggtgtgcagcatgctgcacctctgctctggcacgcggctgcctgcactgaccgttcacgtgactcagccaaaggacggtggcttctgcgaagtgtgcaagaagctggtgggttatttggatcgcaacctggagaaaacagcaccaagcagagatcctggctgctcttgagaaaagctgcagcttcctgccagacccttaccagaagcagtgtgatcagtttg

SEQ ID NO: 381157 - DNA, 499 bp, Homo Sapiens
tcaaatagtggctggtgtgtataattgtttgcaattacttggtcccaaaggtgaccaggaactctgttcctaaagaactatggtgtgagaagtaagggactttgggataggtggacttttccctggcattgagtgatgccactccccactgttttttcagggtctcaatttcttagtgaaagtacacaaaggttaggagaaacatgcatggatcaagggcctaggaagtcattttgcctggaaaagaccagtgctctggtgtgtgcatagctacagaggtctgagttaccccgttcccctggtgaatataaggggctggtgatttggggggcatacctacacctgtgactaagacccaggccttggggggttgaggggctttggtgatggctttagccagcatttgggtggtctctaggcggctgccgagaacctcttttttggaggtttcattccatctgcaggagaaacatgggaaataaaaagccactaaatacct

SEQ ID NO: 381158 - DNA, 931 bp, Homo Sapiens
ttggggaggctggagagaccaggatccttccagctgaacaaagtcagccacaaagcagactagccagccggctacaattggagtcagagtcccaaagacatgggcttgttagagtgctgtgcaagatgtctggtaggggccccctttgcttccctggtggccactggattgtgtttctttggggtggcactgttctgtggctgtggacatgaagccctcactggcacagaaaagctaattgagacctatttctccaaaaactaccaagactatgagtatctcatcaatgtgatccatgccttccagtatgtcatctatggaactgcctctttcttcttcctttatggggccctcctgctggctgagggcttctacaccaccggcgcagtcaggcagatctttggcgactacaagaccaccatctgcggcaagggcctgagcgcaacgtttgtgggcatcacctatgccctgaccgttgtgtggctcctggttttgcctgctctgctgtgcctgtgtacatttacttcaacacctggaccacctgccagtctattgccttccccagcaagacctctgccagtataggcagtctctgtgctgatgccagaatgtatggtgttctcccatggaatgctttccctggcaaggtttgtggctccaaccttctgtccatctgcaaaacagctgagttccaaatgaccttccacctgtttattgctgcatttgtgggggctgcagctacactggtttccctgctcaccttcatgattgctgccacttacaactttgccgtccttaaactcatgggccgaggcaccaagttctgatcccccgtagaaatccccctttctctaatagcgaggctctaaccacacagcctacaatgctgcgtctcccatcttaactctttgcctttgccaccaactggccc

SEQ ID NO: 381159 - DNA, 1275 bp, Homo Sapiens
gtacaaaaaagttggggaggctggagtttaccaggatccttccagctgaacaaagtcagccacaaagcagactagccagccggctacaattggagtcagagtcccaaagacatgggcttgttagagtgctgtgcaagatgtctggtaggggccccctttgcttccctggtggccactggattgtgtttctttggggtggcactgttctgtggctgtggacatgaagccctcactggcacagaaaagctaattgagacctatttctccaaaaactaccaagactatgagtatctcatcaatgtgatccatgccttccagtatgtcatctatggaactgcctctttcttcttcctttatggggccctcctgctggctgagggcttctacaccaccggcgcagtcaggcagatctttggcgactacaagaccaccatctgcggcaagggcctgagcgcaacggtaacagggggccagaaggggaggggttccagaggccaacatcaagctcattctttggagcgggtgtgtcattgtttgggaaaatggctaggacatcccgacaagtttgtgggcatcacctatgccctgaccgttgtgtggctcctggtgtttgcctgctctgctgtgcctgtgtacatttacttcaacacctggaccacctgccagtctattgccttccccagcaagacctctgccagtataggcagtctctgtgctgatgccagaatgtatggtgttctcccatggaatgctttccctggcaaggtttgtggctccaaccttctgtccatctgcaaaacagctgagttccaaatgaccttccacctgtttattgctgcatttgtgggggctgcagctacactggtttccctgctcaccttcatgattgctgccacttacaactttgccgtccttaaactcatgggccgaggcaccaagttctgatcccccgtagaaatccccctttctctaatagcgaggctctaaccacacagcctacaatgctgcgtctcccatcttaactctttgcctttgccaccaactggccctcttcttacttgatgagtgtaacaagaaaggagagtcttgcagtgattaatgtctctctttggactctcccctcttatgtacctcttttagtcattttgcttcatagctggttcctgctagaaatgggaaatgcctaagaagatgacttcccaactgcaagtcacaaaggaatggaggctctaattgaattttcaagcatctcctgaggatcagaaagtaatttct

SEQ ID NO: 381160 - DNA, 749 bp, Homo Sapiens
ttgggacgccaccgccgaggaaaaccgtgtgctattagccatggtcaaccccaccgtgttcttcgacattgccgtcgacggcgagcccttgggccgcgtctcctttgagctgtttgcagacaaggtcccaaagacagcagaaaattttcgtgctctgagcactggagagaaaggatttggttataagggttcctgctttcacagaattattccagggtttatgtgtcagggtggtgacttcacacgccataatggcactggtggcaagtccatctatggggagaaatttgaagatgagaacttcatcctaaagcatacgggtcctggcatcttgtccatggcaaatgctggacccaacacaaatggttcccagtttttcatctgcactgccaagactgagtggttggatggcaagcatgtggtgtttggcaaagtgaaagaaggcatgaatattgtggaggccatggagcgctttgggtccaggaatggcaagaccagcaagaagatcaccattgctgactgtggacaactcgaataagtttgacttgtgttttatcttaaccaccagatcattccttctgtagctcaggagagcacccctccaccccatttgctcgcagtatcctagaatctttgtgctctcgctgcagttccctttgggttccatgttttccttgttccctcccatgcctagctggattgcagagttaagtttatgattatgaaataaaaactaaataacaattgtc

SEQ ID NO: 381161 - DNA, 579 bp, Homo Sapiens
tttgtacaaaaaagttggggccctacggccgcccaggccaaatccaagcaggctatcttagcggcacagagacgaggagaagatgtggagacttccaagaaatgggctgctggccagaacaaacaacattctattaccaagaacacggccaagctggaccgggagacagaggagctgcaccatgacagggtgaccctggaggtgggcaaggtgatccagcaaggtcggcagagcaaggggcttacgcagaaggacctggccacgaaaatcaatgagaagccacaggtgatcgcggactatgagagcggacgggccatacccaataaccaggtgcttggcaaaatcgagcgggccattggcctcaagctccggggaaaggacattggaaagcccatcgagaaggggcctagggcgaaatgaacacaaagcctcgaaatcagtgcgctccagctgatctcgttccgccggttccccttggccgccagttccgttctcctcacgggccgaacggaacaaggggtccagcttgcggaggaccctccccagcccattcctgctgtcaaacaaacaaaaccttgc

SEQ ID NO: 381162 - DNA, 1580 bp, Homo Sapiens
ttggaatgagggcaagaagggcttcactgacccctcggtggagatctgagcctcaggatgcaggagcctcctcctcagaccctgttcttggccttccatcctctccccacggctgatggtccctccaaggccgactcctaaggaatcaccatcaccctcctttctattctgggggcttctgagagagcccagcctgatgccagaacaaaggacagagaatttaagcacagaaatcccagacctgttgttctctccatccagcgtgaccagggcccgagagacctgatggccagggtggggtgtccagcaccagccaagctggtgctccagcgcacctccccagagctccccgcactgacggggctgcaggagcaggtgcagtgggcgcccacactggccctgcagtgatgcagggcgggagggagataagaagaccccgcagtcaagtggagcatggccctccctggctccctgtccctgggctcagcacgaccacacaggacacccagccagggaattctgaagaccagagagcagcccacgggcatcacgagcgctctgctcctctcctgggcccctgctcttcccgagagctgcccccaaatcagacatacctctgtggctctcctctggttcacgtttacagagcataaggctgtcttggatcccaacaggcacccagccctgcatggggggagcctgggcctaataggcaccccctgtacctcaggctgtggcgggagcagagtccccccctccggcccctcttcctttaccccttctcctccagcagtggcaaaggggtaggctctagagccagcacaggtcactgcctgacctggactaagaaccccacggccccactgtccacacactgcctccccaccgcccacctcggctgctaggcccctcgcctggactggactggggagggaaagcgccttttcctgcagctcttcagagccacagacctcagggtggagtgagcccatggtgggcagtgggcaaggcggtgggtggtgggcaaggtgggacctcctgcagcctggaaagaggagggaggccaaggccattccctaactccctcctgcccctggtctgaggaggagggactctggagtagcagaggggctgggaaagagggggcaggggctgctgggacactgagcaggagggaggcctgagcacactgctttggaaattattctaaacacaaaaaagggaaagaaaatgttatttctccctaagtcaggagcatgcagagctagcccacctcatgtccagctgtccactttccatcctggagaaagaacagtgtgcctcaaactcctgccctccccaggcctctggggcccactggaaagggctctgaccccctggcccagccgggctctctagtggtgatccggctcattctcctgcaagttggaagcacaattttccccccaagtggaggaaaaggaaagggccccagccctactgaagaggtgtttatttttaaactaacagcctcccaacccattaagactcaccaggagaggtctgagggccattcagaacccacttcctgagtgggtggg

SEQ ID NO: 381163 - DNA, 1012 bp, Homo Sapiens
gagcgcggcttgttcttcatcttgggcacccgctgcaccagctgctgggcctcgcggtaggcgtcgcgcagctccttcttccactgcaccagctcagggtcgctatcgcactgcaaaatgaactgtttcccaccgcggatcttgaggagcaggcacttgcgctccttgatctgcgtctcctccaccgactggatctcctccatggtcagcaggctctgcggggcctcgccctcgccccgccactcgaggcggttggggaacaggtagaagtaccgccgctgccactgggtcaggaaggggttgcccatcttggacatgtagccatgcatgatgcagtccttgcccagggcgtagtcttcctcatggcccagctgcttgttcttggctttcttgcgagcctccagccggtctgtctcagcgttgatggtgtcgaagacagtctctgccacctcctgctgccaccgctccgagatggtgagggggaagttgcggtagagctcctgatcactgtccagtaacttgattccttttgtgtcctcctcatcgaaggagccaatgtcgaaggcgtcggccgcgttcacctcccctcgtggggggatcagcgggggagggtacttctgcaagaagaccatctgccagtccagggagcggaaaaaggggctctctttcacctcctgagcccctcggcccaggcagcccaatctccggttgacatccctctgcagcaacccctccagcagggagcgtagttcaggggagaaggagtcgggcagctccacggccatcgtcagcgtcatgcggtcgatctcatgcttgtctttggtcttgtgctgccggaaggggctgtgcccccgcagcaacttgaagagcatgcaccccagagagaaccagtcggcactgctgtcgtaggccacgcccttctgcaggacctccggagccatgtacccgtgggtgcccacgctggcatggggcttcttcttggagaagtcacaggccaggcccaggtccccaa

SEQ ID NO: 381164 - DNA, 897 bp, Homo Sapiens
tgtacaaaaaagttgggtctcctgcagcggtctggggtttccgttgcagtcctcggaaccaggacctcggcgtggcctagcgagttatggcgacgaaggccgtgtgcgtgctgaagggcgacggcccagtgcagggcatcatcaatttcgagcagaaggaaagtaatggaccagtgaaggtgtggggaagcattaaaggactgactgaaggcctgcatggattccatgttcatgagtttggagataatacagcaggctgtaccagtgcaggtcctcactttaatcctctatccagaaaacacggtgggccaaaggatgaagagaggcatgttggagacttgggcaatgtgactgctgacaaagatggtgtggccgatgtgtctattgaagattctgtgatctcactctcaggagaccattgcatcattggccgcacactggtggtccatgaaaaagcagatgacttgggcaaaggtggaaatgaagaaagtacaaagacaggaaacgctggaagtcgtttggcttgtggtgtaattgggatcgcccaataaacattcccttggatgtagtctgaggccccttaactcatctgttatcctgctagctgtagaaatgtatcctgataaacattaaacactgtaatcttaaaagtgtaattgtgtgactttttcagagttgctttaaagtacctgtagtgagaaactgatttatgatcacttggaaagatttgtatagttttataaaactcagttaaaatgtctgtttcaatgacctgtattttgccagactttaaatcacagatgggtattaaacttgtcaaaatttctttgtcattcaagccctgtgaataaaaaccctgtatggcacttattatgaggctattaaagaatccagttc

SEQ ID NO: 381165 - DNA, 814 bp, Homo Sapiens
caggactgtctggaaacttggctctcagtttgctctcccttctctcctctgcgtgccccaagcccctctttctaaaaaagtgatggaatattcatggggttatttcttgaaaatacttggcggcctccatgcttctgttttctttgagccaggtggtcaggagggcttacaaagaatgcctgggctcccccgcaggtgccggcagatggggtagcgaatggtcctgtgcctccacctgctccgggagggagtctcccgtctctaggcctggccccttcctaaccctccacgtatcctgttctccagagacttcagaacccactcctgagaacagcggagccaggcgcttagaggaagaccaaatgctgccaggacacggattgtccagggattacattccagcatcttattaggtatctggatctgttcggaaaaaaattagaaactatgtataaaacttaaaaatattcaagtatcaaaaggttatttaggatgaaagttttaaaacaagtcatcagcaagctgctgccaccaagtggagacttatacaaaagttgagcgagtccactgagctgagaggacagaaatgaagtcacctgtgctggggcaggggcagggacactgggggcagggagtgtgtgggcagagaagccagagaagtccaggcctgtggaagccaaacaggagagcgtgggccggaagggcggtcaggatcgggggacgaggtcgctctccctggagaacgaaccctaaagtgcgtagcctgggattccctccctgggggtcctgtcccccgacgtttcacgggccccaa

SEQ ID NO: 381166 - DNA, 888 bp, Homo Sapiens
ttgggcctggctggcagcagccttggactccgcccgtggagccctgggcctgttgacccaccagcttaggagcacccaccaagctctgggtgttctgggaagatggcatcatgtctggctaccgccgccccaccagctcggctttggactgtgtcctcagctccttccagatgaccaacgagacggtcaacatctggactcacttcctgcccacctggtgaggggaggctctgccccaggccgcggccttgagctcagagggggtacccaggcgggcagggaccgtccaggcccacgggctgcagcggcagtcgcgggggtccgcggcggcctgagcacgcgcccgccgcaggtacttcctgtggcggctcctggcgctggcgggcggccccggcttccgtgcggagccgtaccactggccgctgctggtcttcctgctgcccgcctgcctctaccccttcgcgtcgtgctgcgcgcacaccttcagctccatgtcgccccgcatgcgccacatctgctacttcctcgactacggcgcgctcagcctctacagtctgggctgcgccttcccctatgccgcctactccatgccggcctcctggctgcacggccacctgcaccagttctttgtgcctgccgccgcactcaactccttcctgtgcaccggcctctcctgctactcccgtttcctggagctggaaagccctgggctcagtaaggtcctccgcacaggagccttcgcctatccattcctgttcgacaacctcccactcttttatcggctcgggctgtgctggggcaggggccacggctgtgggcaggagccctgaacaccaccatggctaccatctcttctgcgcgctgctcactggcttcctcttcgcctcc

SEQ ID NO: 381167 - DNA, 487 bp, Homo Sapiens
actttgtacaaaaaagttggccgacatcttgacgaggctgcggtgtctgctgctattctccgagcttcgcaatgccgcctaaggacgacaagaagaagaaggacgctggaaagtcggccaagaaagacaaagacccagtgaacaaatccgggggcaaggccaaaaagaagaagtggtccaaaggcaaagttcgggacaagctcaataacttagtcttgtttgacaaagctacctatgataaactctgtaaggaagttcccaactataaacttataaccccagctgtggtctctgagagactgaagattcgaggctccctggccagggcagcccttcaggagctccttagtaaaggacttatcaaactggtttcaaagcacacagctcaagtattttacaccagaaataccaagggtggagatgctccagctgctggtgaaaatgcatgaataggtccaaccagctgtattttggaaaaataaaactt

SEQ ID NO: 381168 - DNA, 1132 bp, Homo Sapiens
actttgtacaaaaaagttggatgaggacgacctggcctacgcagagactgagaagaagacgaggacagactccacgtccgacgggcgccctgcctggatgcggacactgcacaccaccgcgtccaactggctgcacctcatcccccagacgctgagccacctcaagcgcaccgtggagaatatcaaggatcctttgttcaggttctttgagagagaagtgaagatgggcgcaaagctgcttcaggacgttcgccaggaccttgcagatgtcgtccaggtgtgcgaaggaaagaagaagcagaccaactacttgcgcacgctgatcaacgagctagtgaaagggatcttgcctcggagctggtcccactacacggtgcctgccggcatgaccgtcatccagtgggtgtccgacttcagcgagaggatcaaacagctgcagaacatctcactggcagctgcatctggtggcgccaaggagctaaagaacatccacgtgtgcctgggtggcctgttcgtgcctgaggcgtacatcactgccaccaggcagtatgtggcccaggccaacagctggtccctggaggagctctgcctggaagtcaacgtcaccacctcacagggcgccacccttgacgcttgcagcttcggagtcacgggtttgaaacttcaaggggccacgtgcaacaacaacaagctgtcactgtccaatgccatctcaaccgcccttcccctgacgcagctgcgctgggtcaagcagacaaacaccgagaagaaggccagtgtggtaaccttacctgtctacctgaacttcacccgtgcagacctcatcttcaccgtggacttcgaaattgctacaaaggaggatcctcgcagcttctacgagcggggtgtcgcagtcttgtgcacagagtaaacttttctagctgcccctttctgtaatagtgaaagttggtatttaacatttattcatttttaaaatatttggaaggtctgagcttgtgaaaagaaagtggttggtctgaggttggaggaagctgaatggaatctgacggttgggagtggtggaaattggaaggataccaggaggtatttgggaaggccaatggcgtggctcctttgaggaaataaaaacact

SEQ ID NO: 381169 - DNA, 1403 bp, Homo Sapiens
gccaactttgtacaaaaaagttggccgaacaggtatattaggacgaaaaaaataaccgtccgcgacgccgagacaaaccggacccgcaaccaccatgaacagcaaaggtctttatccaacacagccaacctaccctgtgcagcctcctgggaatccagtataccctcagaccttgcatcttcctcaggctccaccctataccgatgctccacctgcctactcagagctctatcgtccgagctttgtgcacccaggggctgccacagtccccaccatgtcagccgcatttcctggagcctctctgtatcttcccatggcccagtctgtggctgttgggcctttaggttccacaatccccatggcttattatccagtcggtcccatctatccacctggctccacagtgctggtggaaggagggtatgatgcaggtgccagatttggagctggggctactgctggcaacattcctcctccacctcctggatgccctcccaatgctgctcagcttgcagtcatgcagggagccaacgtcctcgtaactcagcggaaggggaacttcttcatgggtggttcagatggtggctacaccatctggtgaggaaccaaggccacctttgtgccgggaaagacatcacataccttcagcacttctcacaatgtaactgctttagtcatattaacctgaagttgcagtttagacacatgttgttggggtgtctttctggtgcccaaactttcaggcacttttcaaatttaataaggaaccatgtaatggtagcagtacctccctaaagcattttgaggtaggggaggtatccattcataaaatgaatgtgggtgaagccgccctaaggattttcctttaatttctctggagtaatactgtaccatactggtctttgcttttagtaataaaacatcaaattaggtttggagggaactttgatcttcctaagaattaaagttgccaaattattctgattggtctttaatctcctttaagtctttgatatatattacttgttataaatggaacgcattagttgtctgccttttcctttccatcccttgccccacccatcccatctccaaccctagtcttccatttcctcccgccagtctccattgaatcaatggtgcaggacagaaagccagtcagactaatttccttctttcctcgcacttctccccactcgtcatcttttaactagtgtttcacaaggatcctctgaaaccctctctgtgccccaagtacagatcccattacttctgctttcgtatctcctcatgcaaaagtggagggtgccttatgggccctcctcataggttgtctctgcatacacgaacctaacccaaatttgctttggtgccagaaaaactgagctatgtttgaacaaaga

SEQ ID NO: 381170 - DNA, 994 bp, Homo Sapiens
  misc_feature (113)..(154): n is a, c, g, or t
ttggggctggccgaaggggtggcgctgcgatcccgcagggcagcgacgcgactctggtgcgggccgtcttcttccccccgagctgggcgtgcgcggccgcaatgaactgggannnnnnnnnnnnnnnnnnnnnnnnnnnnnnnnnnnnnnnnnncttggtgcagctgctgcgcttcctgagggctgacggcgacctgacgctactatgggccgagtggcagggacgacgcccagaatgggagctgactgatatggtggtgtgggtgactggagcctcgagtggaattggtgaggagctggcttaccagttgtctaaactaggagtttctcttgtgctgtcagccagaagagtgcatgagctggaaagggtgaaaagaagatgcctagagaatggcaatttaaaagaaaaagatatacttgttttgccccttgacctgaccgacactggttcccatgaagcggctaccaaagctgttctccaggagtttggtagaatcgacattctggtcaacaatggtggaatgtcccagcgttctctgtgcatggataccagcttggatgtctacagaaagctaatagagcttaactacttagggacggtgtccttgacaaaatgtgttctgcctcacatgatcgagaggaagcaaggaaagattgttactgtgaatagcatcctgggtatcatatctgtacctctttccattggatactgtgctagcaagcatgctctccggggtttttttaatggccttcgaacagaacttgccacatacccaggtataatagtttctaacatttgcccaggacctgtgcaatcaaatattgtggagaattccctagctggagaagtcacaaagactataggcaataatggagaccagtcccacaagatgacaaccagtcgttgtgtgcggctgatgttaatcagcatggaccaatgatttgaaagaagtttggatctcagaacaacctttcttgttagtaacatatttgt

SEQ ID NO: 381171 - DNA, 723 bp, Homo Sapiens
tccccaccctcccccatcccaccagccagcacccagagggacaaccctaacacgaccggcccaggatccacccaggggcagagtaggtgggttggtgccctctgactaggggggcacatgcctgcccagcccaccacggtagaggcagctcagttcaggaaccaggagctctctgggcagggcctgaccggggccccccgactcccaggccgagcccccctactgctggctcagaagccgaaggtttcctgggaggcgtagaccatatagaggaagccgtcctcgtctttctcctgctcgtagatgtccgcgatgggcgtggacacactcaccatgctgtgctggttcaccagcaggaagaaggcctgcgtggggttcagctgcaggcggcgccggatgatcttgaccaactcgctcatgttgacatggtccgggaccaaaaacttggtcttgtccaggacgggcagctgcttctcacccttgtagcgctcgatgatcaccgggattttgctggggtgctggtcgcggatctgctgtacctccttacagcggtcggcgaagctccgccgctgcttgaaaggccggtctgagggcatcgcgcgggcccggctgggcgcgcaggccggggctctggggcgcggggatgtgtctgcggtttgggggctccgggggctccgcgcctctgtctgtctacagagggctccggccaacttttttgtacaa

SEQ ID NO: 381172 - DNA, 379 bp, Homo Sapiens
ttggcagctgccgcccaggtgctcggtccttccgaggaagctaaggctgcgttggggtgaggccctcacttcatccggcgactagcaccgcgtccggcagcgccagccctacactcgcccgcgccatggcctctgtctccaagctcgcctgcatctactcggccctcattctgcacgacgatgaggtgacagtcacggaggataagatcaatgccctcattaaagcagccggtgtaaatgttgagcctttttggcctggcttgtttgcaaaggccctggccaacgtcaacattgggagcctcatctgcaatgtaagggccggtggacctgctccagcatctggtgctgcaccagcaagaggtcctgccccctccactgc

SEQ ID NO: 381173 - DNA, 915 bp, Homo Sapiens
ttggggagaagagcggagcgtgtgagcagtactgcggcctcctctcctctcctaacctcgctctcgcggcctagctttacccgcccgcctgctcggcgaccagaacaccttccaccatgaccacctcagcaagttcccacttaaataaaggcatcaagcaggtgtacatgtccctgcctcagggtgagaaagtccaggccatgtatatctggatcgatggtactggagaaggactgcgctgcaagacccggaccctggacagtgagcccaagtgtgtggaagagttgcctgagtggaatttcgatggctctagtactttacagtctgagggttccaacagtgacatgtatctcgtgcctgctgccatgtttcgggaccccttccgtaaggaccctaacaagctggtgttatgtgaagttttcaagtacaatcgaaggcctgcagagaccaatttgaggcacacctgtaaacggataatggacatggtgagcaaccagcacccctggtttggcatggagcaggagtataccctcatggggacagatgggcacccctttggttggccttccaacggcttcccagggccccagggtccatattactgtggtgtgggagcagacagagcctatggcagggacatcgtggaggcccattaccgggcctgcttgtatgctggagtcaagattgcggggactaatgccgaggtcatgcctgcccagtgggaatttcagattggaccttgtgaaaggaatcagcatgggagatcatctctgggtggcccgtttcatcttgcatcgtgtgtgtgaagactttggagtgatagcaacctttgatcctaagcccattcctgggaactggaatggtgcagctgccataccaacttcagcaccaagccatgcggagagatggtctgaa

SEQ ID NO: 381174 - DNA, 1459 bp, Homo Sapiens
tttgtacaaaaaagttgggaaaataaatgctgtatttgtgaataacaaactgcacaacctgcaaaccaggagagagggacaggttctgtcaggggtgacaccaggacacagggacaggttctgtcgggggtgacaccaggacacagggacaggttctgtcatgggtgacacgaggacacagggacaggttctatcatgggtgacaccaggagagagggacaggttctgttggggtgacaccaggagagagggacaggttctgttgggggtgacaagaggagacagggacaggttctgtcgggggtgacaccaggagagagggacaggttctgtcaggggtgacaccaggagagagggacaggttctgttgggggtgacaagaggagacagggactggttctgtcgggggtgacaccaggagagagggacaggttctgtcaggggtgacaccaggagagagggacaggttctgttgggggtgacaccaggacacaggaataggttctgtcgggaggacagtgctgatcgtgtctcagcatcaggaaaggagaaaggcagagggagagcgctgagaagactgttcacgccagagtgcttatttatttttaatttactgctataggataagcaaccaggtagtgttcctaacaattagcgttaccaaaattaaagttcaaattatatgtttaaaatattgtagaagatatatatttatactggactacttttacaccttctaatatcctgtccaagtttgggcgcagatggtggagttgggctggcatcatgtcctgtggccgccccacttgcctgttggtgccactccatcccgggccccagggatgccagctcagggctgaccacagcagccctgcgtgggcatcacctcctaccccagcccccatcctgggctgctgcggccgcctgcttttgtgaatggtgttttgttggcacagggcctgtcctgtgttttcacacaggcctgtggctcctgctgtacaagtggagtggggaggagttgagatggagatgccttggccctggacacttacctgtccctctactggcccagctcatctcctcctgtgggcaatcacgcgtgcactggccaccctcccaccccacagcacacaccacgaggggatggcacagggggaagatgaggctggaccgtgatgttatcaataggctagaacgtccttcaaacactgaacctgcatctttcctcctcttactactgaacactttgtgagctctggtggtccagggtgcagcgtttgtccctgggcatgtgatggggagtcctgggcacatcgagatgctttacttctttctttcgacctcttaaaaaactaaaccaagccaaaccacaaaggaaatctgcacaacttaagagaaacttgaaagggatcgtgtaactactagtttgtactaagtttttttctcgaaaagggagaca

SEQ ID NO: 381175 - DNA, 948 bp, Homo Sapiens
caaataggcttggtcttggtttagttcttcctgatcaatgtatttctctttgatgtcttagttttctctcttatcattaccgctgtcatcctctcatctgaacccacatcttcgatcttgggttttcttcatcatctttatcttcctcttctttctccctttctcttcctctgcctcatcatcactaatttccttctctcgttcttctccaaataaagggtgatgggatagcctatgaactgagaatgcttcttcactacttctttgacccgcctctcttctaggtactctgtctgatcttctttaagatggaggatcactttggtacccctgccaatgggctcaccatggtcagcacgcacagtgaaggaacctccagcagaagactcccaagcatactgttcatcatcgttgtgctttgtgatcacaaccactttctctgccaccaagtaggcagaataaaagccaacaccaaactgcccaatcatggagatgtctgcaccagcctgaagagcctccatgaatgctttagtaccagacttggcaatggttcccaaattatttatgagatcagctttggtcatgccaatgcctgtgtctaccaaagtcagggtacgttcctgagggttggggatgatgtcaattttcagctctttaccactgtccaacttcgaagggtctgtcaggctctcatagcgaatcttgtccaaggcatcagaagcattagagatcaactcccgaaggaaaatctccttgttggaatagaaggtattgatgatgagggacatgagttgggcaatttctgcctgaaaggcaaaagtctccacctcctcctctccatggtgcacttcctcaggcatcttgaaaagaaaaggattatacgtaatagtgagcaacgtaggcttgctttccgatacccagacagtcccaacactgcgccggagccaa

SEQ ID NO: 381176 - DNA, 1535 bp, Homo Sapiens
atgggctgcctcgggaacagtaagaccgaggaccagcgcaacgaggagaaggcgcagcgtgaggccaacaaaaagatcgagaagcagctgcagaaggacaagcaggtctaccgggccacgcaccgcctgctgctgctgggtgctggagaatctggtaaaagcaccattgtgaagcagatgaggatcctgcatgttaatgggtttaatggagagggcggcgaagaggacccgcaggctgcaaggagcaacagcgatggtgagaaggcaaccaaagtgcaggacatcaaaaacaacctgaaagaggcgattgaaaccattgtggccgccatgagcaacctggtgccccccgtggagctggccaaccccgagaaccagttcagagtggactacatcctgagtgtgatgaacgtgcctgactttgacttccctcccgaattctatgagcatgccaaggctctgtgggaggatgaaggagtgcgtgcctgctacgaacgctccaacgagtaccagctgattgactgtgcccagtacttcctggacaagatcgacgtgatcaagcaggctgactatgtgccgagcgatcaggacctgcttcgctgccgtgtcctgacttctggaatctttgagaccaagttccaggtggacaaagtcaacttccacatgtttgacgtgggtggagcgcgatgaacgccgcaagtggatccagtgcttcaacgatgtgactgccatcatcttcgtggtggccagcagcagctacaacatggtcatccgggaggacaaccagaccaaccgcctgcaggaggctctgaacctcttcaagagcatctggaacaacagatggctgcgcaccatctctgtgatcctgttcctcaacaagcaagatctgctcgctgagaaagtccttgctgggaaatcgaagattgaggactactttccagaatttgctcgctacactactcctgaggatgctactcccgagcccggagaggacccacgcgtgacccgggccaagtacttcattcgagatgagtttctgaggatcagcactgccagtggagatgggcgtcactactgctaccctcatttcacctgcgctgtggacactgagaacatccgccgtgtgttcaacgactgccgtgacatcattcagcgcatgcaccttcgtcagtacgagctgctctaagaagggaacccccaaatttaattaaagccttaagcacaattaattaaaagtgaaacgtaattgtacaagcagttaatcacccaccatagggcatgattaacaaagcaacctttcccttcccccgagtgattttgcgaaacccccttttcccttcagcttgcttagatgttccaaatttagaaagcttaaggcggcctacagaaaaaggaaaaaaggccacaaaagttccctctcactttcagtaaaaataaataaaacagcagcagcaaacaaataaaatgaaataaaagagacaaatgaaataaatattgtgttgtgcagcattaaaaaaatcaaataaaattaaatgtga

SEQ ID NO: 381177 - DNA, 1024 bp, Homo Sapiens
ttggccatgatttcttctctgtcccaaaaccatccagacaacagaaacgagactttcagctcagtcatttccctgttgaatgaggatcccctgtcccaggacttgcctgtgaagatggcttcaatcttcaagaactttgtcattacctataaccggacatatgagtcaaaggaagaagcccggtggcgcctgtccgtctttgtcaataacatggtgcgagcacagaagatccaggccctggaccgtggcacagctcagtatggagtcaccaagttcagtgatctcacagaggaggagttccgcactatctacctgaatactctcctgaggaaagagcctggcaacaagatgaagcaagccaagtctgtgggtgacctcgccccacctgaatgggactggaggagtaagggggctgtcacaaaagtcaaagaccagggcatgtgtggctcctgctgggccttctcagtcacaggcaatgtggagggccagtggtttctcaaccaggggaccctgctctccctctctgaacaggagctcttggactgtgacaagatggacaaggcctgcatgggcggcttgccctccaatgcctactcggccataaagaatttgggagggctggagacagaggatgactacagctaccagggtcacatgcagtcctgcaacttctcagcagagaaggccaaggtctacatcaatgactccgtggagctgagccagaacgagcagaagctggcagcctggctggccaagagaggcccaatctccgtggccatcaatgcctttggcatgcagttttaccgccacgggatctcccgccctctccggcccctctgcagcccttggctcattgaccatgcggtgttgcttgtgggctacggcaaccgctctgacgttcccttttgggccatcaagaacagctggggcactgactggggtgagaagggttactactacttgcatcgtgggtccgggcctgtggcgtgaacaccatgggccagctcggcggtggtggactgaa

SEQ ID NO: 381178 - DNA, 1299 bp, Homo Sapiens
tgccggccagcttcgttgtcttcctcgtggccgaaaaatccaccaaggccaagcatctgcagtttgtcaacggctgcaaccccatcatctactggctggcgaactacgtgtgggacatgctcaactacctgtttttcttctacctgctgtgtcatcatcctgtttgtgttcgacctgccggcctacacgtcgcccaccaacttccctgccgtcctctccctcttcctgctctatgggtggtccatcacgcccatcatgtacccggcctccttctggttcgaggtccccagctccgcctacgtgttcctcattgtcatcaatctcttcaacggcatcaccgccaccgtggccaccttcctgctacagctcttcgagcacgacaaggacctgaaggttgtcaacagttacctgaaaagctgcttcctcattttccccaactacaacctgggccacgggctcatggagatggcctacaacgagtacatcaacgagtactacgccaagattggccagtttgacaagatgaagtccccgttcgagtgggacattgtcacccgcggactggtggccatggcggttgagggcgtcgtgggcttcctcctgaccatcatgtgccagtacaacttcctgcggcggccacagcgcatgcctgtgtctaccaagcctgtggaggatgatgtggacgtggctagtgagcggcagcgagtgctccggggagacgccgacaatgacatggtcaagattgagaacctgaccaaggtctacaagtcccggaagattggccgtatcctggccgttgaccgcctgtgcctgggtgtgcgtcctggcgagtgcttcgggctcctgggcgtcaacggtgcgggcaagaccagcaccttcaagatgctgaccggcgacgagagcacgacggggggcgaggccttcgtcaatggacacagcgtgctgaaggagctgctccaggtgcagcagagcctcggctactgcccgcagtgtgacgcgctgttcgacgagctcacggcccgggagcacctgcagctgtacacgcggctgcgtgggatctcctggaaggacgaggcccgggtggtgaagtgggctctggagaagctggagctgaccaagtacgcagacaagccggctggcacctacagcggcggcaacaagcggaagctctccacggccatcgccctcattgggtacccagccttcatcttcctggacgagcccaccacaggcatggaccccaaggcccggcgcttcctctggaacctcatcctcgacctcatcaagacagggcgttca

SEQ ID NO: 381179 - DNA, 712 bp, Homo Sapiens
gggtcctggagaaaggaaaggcaaactctgcctcccgctcagagtccccccaaccctcactgtttcccgttgccattgatggggaggttcacgtactcaggggaggccaggaaggccttgagcttgggccgggcgctgaggcgccccacatatgctgagagcagggggaacgcatccaggcagccaggggctaggacctcatggatcagcagcaagtccagcaggttgtagtcagcgaaggagatctggtctcccacaatgaaggtcttgcctccctggttctgggacagcagggtctcaaaaggcttcagttgcccgggcagtgccttcacatagtcatccttgcccgcctcatagttggtgtagatgagggagacgtatttgcagcggaggtcctccacgccgtcattcaccatgtccaccagggctgcctcctgctggtccttcccatagagcccaagggtgcggcccaggtgacgcaggatggtattggactggtacagggtgaggtctccgtcctggaacttggggagctgcccgtataggcaggaggctttgagtgagccctcctgccacgtctccacggtcaccacctcctccttccagctctggccctgatctgccagcagcatgcgcagggccgcgcagcggcctcgaactgggaaatagaccacggtgtagggcggcatggtggcgaagactgcggcgccaa

SEQ ID NO: 381180 - DNA, 978 bp, Homo Sapiens
ttgggggccggatccccttcgccgccgcccgcccgcaaaccttcgtgcccggcccgtcctcgcccccgcctccgccaccgcctcggcccgcagagcttgccccctccccacccgcagacatgtccgagtccaagagcggccccgagtatgcttcgtttttcgccgtcatgggcgcctcggccgccatggtcttcagcgccctgggcgctgcctatggcacagccaagagcggtaccggcattgcggccatgtctgtcatgcggccggagcagatcatgaagtccatcatcccagtggtcatggctggcatcatcgccatctacggcctggtggtggcagtcctcatcgccaactccctgaatgacgacatcagcctctacaagagcttcctccagctgggcgccggcctgagcgtgggcctgagcggcctggcagccggctttgccatcggcatcgtgggggacgctggcgtgcggggcaccgcccagcagccccgactattcgtgggcatgatcctgattctcatcttcgccgaggtgctcggcctctacggtctcatcgtcgccctcatcctctccacaaagtagaccctctccgagcccaccagccacagaatattatgtaaagaccacccctcctcattccagaacgaacagcctgacacatacgcacggggccgccgcccccagtagttggtcttgtacatgcgcagtgtcctagtgcccatcgtctgtttccccggccttgcccccgcccgccccgtgccgtggacatctgggcccactcatcgcccctccaggcccccggcgccccaccccctagagtgctctgtgtatgcggatgatttagaattgtcatttctctttactggatgtttatttataaagatctggcctgttcctgcgtctgcggagcggcccttgtctcccagctatctataaccttagctagagtgtcgccttgtgggttcctgttgct

SEQ ID NO: 381181 - DNA, 799 bp, Homo Sapiens
gggcggcgaaggccggcgcggcgagcagcaaccatgtcggtgttcgggaagctgttcggggctggagggggtaaggccggcaagggcggcccgaccccccaggaggccatccagcggctgcgggacacggaagagatgttaagcaagaaacaggagttcctggagaagaaaatcgagcaggagctgacggccgccaagaagcacggcaccaaaaacaagcgcgcggccctccaggcactgaagcgtaagaagaggtatgagaagcagctggcgcagatcgacggcacattatcaaccatcgagttccagcgggaggccctggagaatgccaacaccaacaccgaggtgctcaagaacatgggctatgccgccaaggccatgaaggcggcccatgacaacatggacatcgataaagttgatgagttaatgcaggacattgctgaccagcaagaacttgcagaggagatttcaacagcaatttcgaaacctgtagggtttggagaagagtttgacgaggatgagctcatggcggaattagaagaactagaacaggaggaactagacaagaatttgctggaaatcagtggacccgaaacagtccctctaccaaatgttccctctatagccctaccatcaaaacccgccaagaagaaagaagaggaggacgacgacatgaaggaattggagaactgggctggatccatgtaatggggtccagcgctggctgggcccagacagactgtggtggcctggcccaaccaagcaagccgtgtgcgtgtgtggggccaggcaaggatgt

SEQ ID NO: 381182 - DNA, 923 bp, Homo Sapiens
ttggccacagcctaacgctcttcgctgtcgtttgcggtctcgcgcagggcggccccggttctggtgtttggcgtcggaattaaacaaccaccatgtcgagcaaaaaggcaaagaccaagaccaccaagaagcgccctcagcgtgcaacatccaatgtgtttgccatgtttgaccagtcacagattcaggagttcaaagaggccttcaacatgattgatcagaacagagatggcttcatcgacaaggaagatttgcatgatatgcttgcttctctagggaagaatcccactgatgcataccttgatgccatgatgaatgaggccccagggcccatcaatttcaccatgttcctgaccatgtttggtgagaagttaaatggcacagatcctgaagatgtcatcagaaacgcctttgcttgctttgatgaagaagcaacaggcaccattcaggaagattacctaagagagctgctgacaaccatgggggatcggtttacagatgaggaagtggatgagctgtacagagaagcacctattgacaaaaaggggaatttcaattacatcgagttcacacgcatcctgaaacatggagccaaagacaaagatgactgaaagaactttagctaaaatcttccagttacattgtcttactctcttttacttctcagacacttcccccaccctcatagaacctgttgcatgcaacttagtttcacagctttgcctcttctttttgatgtatttattccagacctttctgccacttagcacttgtataatcagactggaaatggggatgagggtgtaaattgtattgaaaaagatcgcgaataaaaatcaacaaatgtgaaagcccagaaaaatatattcgtatttctggttttgctggatttttacatttttatataataaaaatgttatttt

SEQ ID NO: 381183 - DNA, 867 bp, Homo Sapiens
ttggcactgcagcccccctcgccctgagccagagcaccccgggtcccgccagcccctcacactcccagcaaaatgggcaaggagaagacccacatcaacatcgtggtcatcggccacgtggactccggaaagtccaccaccacgggccacctcatctacaaatgcggaggtattgacaaaaggaccattgagaagttcgagaaggaggcggctgagatggggaagggatccttcaagtatgcctgggtgctggacaagctgaaggcggagcgtgagcgcggcatcaccatcgacatctccctctggaagttcgagaccaccaagtactacatcaccatcatcgatgcccccggccaccgcgacttcatcaagaacatgatcacgggtacatcccaggcggactgcgcagtgctgatcgtggcggcgggcgtgggcgagttcgaggcgggcatctccaagaatgggcagacgcgggagcatgccctgctggcctacacgctgggtgtgaagcagctcatcgtgggcgtgaacaaaatggactccacagagccggcctacagcgagaagcgctacgacgagatcgtcaaggaagtcagcgcctacatcaagaagatcggctacaacccggccaccgtgccctttgtgcccatctccggctggcacggcgacaacatgctggagccctcccccaacatgccgtggttcaagggctggaaggtggagcgtaaggagggcaacgcaagcggcgtgtccctgctggaggccctggacaccatcctgccccccacgcgccccacggacaagcccctgcgcctgccgctgcaggacgtggtacaagatgggcggctttggcactgtgcccgtggg

SEQ ID NO: 381184 - DNA, 510 bp, Homo Sapiens
ttggccatcaccgaagcgggagcggccaaaatgaagtttaatccctttgtgacttccgaccgaagcaagaatcgcaaaaggcatttcaatgcaccttcccacattcgaaggaagattatgtcttcccctctttccaaagagctgagacagaagtacaacgtgcgatccatgcccatccgaaaggatgatgaagttcaggttgtacgtggacactataaaggtcagcaaattggcaaagtagtccaggtttacaggaagaaatatgttatctacattgaacgggtgcagcgggaaaaggctaatggcacaactgtccacgtaggcattcaccccagcaaggtggttatcactaggctaaaactggacaaagaccgcaaaaagatcctcgaacggaaagccaaatctcgccaagtaggaaaggaaaagggcaaatacaaggaagaaaccattgagaagatgcaggaataaagtaatcttatatacaagctttgattaaaacttgaaacaaag

SEQ ID NO: 381185 - DNA, 912 bp, Homo Sapiens
ttgggttgtcttgtatgctcagcgaggcccggagagacccgggagagagctaggccgagtccaccgcccgagtctgctgcccgagcccgcgttacgcacaaagccgccgatccccggcctggggtgagcagagcgaccaccgcccgggagcagcgcggcgagacgcacggtgcgccctatgcccccgcgcccccaccgcccccgccgcggcagccgaagcgcagcgagagaacgcgccaccgcggggcccgggtgcagctagcgaccctctcgccacctgcgcgcagcccgaggtgagcagtgagcggcgagcgggagggcagcgaggcgttcgcgggccccctcctgctgcccgggcccggcccgctcatggcggccatccgcaagaagctggtggtggtgggcgacggcgcgtgtggcaagacgtgcctgctgatcgtgttcagtaaggacgagttccccgaggtgtacgtgcccaccgtcttcgagaactatgtggccgacattgaggtggacggcaagcaggtggagctggcgctgtgggacacggcgggccaggaggactacgaccgcctgcggccgctctcctacccggacaccgacgtcattctcatgtgcttctcggtggacagcccggactcgctggagaacatccccgagaagtgggtccccgaggtgaagcacttctgtcccaatgtgcccatcatcctggtggccaacaaaaaaagacctgcgcagcgacgagcatgtccgcacagagctggcccgcatgaagcaggaacccgtgcgcacggatgacggccgcgccatggccgtgcgcatccaagcctacgactacctcgagtgctctgccaagaccaagaaagcgtgcgcgaggtcttcgagacgccacgcgcgccgcgctgcagaagc

SEQ ID NO: 381186 - DNA, 968 bp, Homo Sapiens
actttgtacaaaaaagttggatcccgcggaggagcgcgcagccccggggaggccggaggacgcgcccatagaatgcccaggggcgacaaactgtcctgagcccctctggtgcagccacctgcctgtcccatacgccccgcccaccatggagtccagagggaagtcagccagcagccccaagcccgacaccaaggtgccccaggtcaccaccgaggccaaggtacccccggcagccgatgggaaagcccccttgaccaagccctcgaagaaggaggccccggccgagaagcagcagccgccagcagcccccaccacggcacctgccaagaagacctcggccaaggccgaccctgcccttctcaacaaccacagcaacctgaagccagcccccacggtccccagcagtcccgatgcaaccccggagcccaagggtcctggggacggggcggaggaagatgaggctgccagtggggggcctgggggccgaggtccctggtcctgtgagaacttcaaccccctgctggtggctgggggtgtggccgtggcagccatagccctgattctcggtgtggccttcctggtccggaaaaaataatacctgggggccaggcggggggcacggagccacttcctgtacagacccgaggaagccagtgcatgcagagttcacccttacctattcgtacacacgcacattcattacacacctacatatgcccccaacacacgcgcacggtgaagaggacgcccgagcccacccctgctgacccaggacttccccaacctccagggcagaaagagcccaggctccggggtccacagcacaggatgtggggcgagggcacacctggggaaccgcaagaaaggaatggaccctgtgtgtggcccccccacccatggcggctgggtgatcctgggcctccagggctggtctgagtgcaagtgggggtgccgggatgggttgggcc

SEQ ID NO: 381187 - DNA, 861 bp, Homo Sapiens
ttggctgcgtggcaatccctgacgcaccgccgtgatgcccagggaagacagggcgacctggaagtccaactacttccttaagatcatccaactattggatgattatccgaaatgtttcattgtgggagcagacaatgtgggctccaagcagatgcagcagatccgcatgtcccttcgcgggaaggctgtggtgctgatgggcaagaacaccatgatgcgcaaggccatccgagggcacctggaaaacaacccagctctggagaaactgctgcctcatatccgggggaatgtgggctttgtgttcaccaaggaggacctcactgagatcagggacatgttgctggccaataaggtgccagctgctgcccgtgctggtgccattgccccatgtgaagtcactgtgccagcccagaacactggtctcgggcccgagaagacctcctttttccaggctttaggtatcaccactaaaatctccaggggcaccattgaaatcctgagtgatgtgcagctgatcaagactggagacaaagtgggagccagcgaagccacgctgctgaacatgctcaacatctcccccttctcctttgggctggtcatccagcaggtgttcgacaatggcagcatctacaaccctgaagtgcttgatatcacagaggaaactctgcattctcgcttcctggagggtgtccgcaatgttgccagtgtctgtctgcagattggctacccaactgttgcatcagtaccccattctatcatcaacgggtacaaacgagtcctggccttgtctgtggagacggattacaccttcccacttgctgaaaaggtcaaggccttcttggctgatccatctgcctttgt

SEQ ID NO: 381188 - DNA, 767 bp, Homo Sapiens
ttgggaacaactgtattgctgtggagcctcttgaggagttctccgggcgtggaacgggtctgtttccgggctcgaatccagccctggcacggtggcctgctccaaccgctaccttgctctttcgagatggggctgccacgccgccggttcagctccgaggccgcagaatctggtagcccagagaccaagaaacctacatttatggatgaggaagttcaaagcatactcacgaaaatgacaggcttgaacttgcagaagacttttaagccagctatacaagaactgaagccaccaacctataagctaatgactcaggcacagttggaagaggctacaagacaggcagttgaggcagctaaagtacgattaaaaatgccaccagttctggaagagcgagtaccaataaatgatgtgttagctgaagataagattttggaaggaacagaaacaaccaaatatgtgtttactgatatatcatatagcataccacaccgggagcgttttattgtcgtcagagaaccaagtggcacactacgcaaagcctcttgggaagaacgggaccgaatgatacaagtttatttcccaaaagaaggtcgtaaaattttgacaccaataattttcaaggaagaaaatcttaggactatgtatagccaggacaggcatgttgatgtcctcaatctctgctttgcccagtttgagccagattccacagagtatatcaaggttcatcacaagacctatgaagatatagataaacgtggaaaata

SEQ ID NO: 381189 - DNA, 631 bp, Homo Sapiens
  misc_feature (552)..(564): n is a, c, g, or t
gtacaaaaaagttggggccactgcgcagaccagacttcgctcgtactcgtgcgcctcgcttcgcttttcctccgcaaccatgtctgacaaacccgatatggctgagatcgagaaattcgataagtcgaaactgaagaagacagagacgcaagagaaaaatccactgccttccaaagaaacgattgaacaggagaagcaagcaggcgaatcgtaatgaggcgtgcgccgccaatatgcactgtacattccacaagcattgccttcttattttacttcttttagctgtttaactttgtaagatgcaaagaggttggatcaagtttaaatgactgtgctgcccctttcacatcaaagaactactgacaacgaaggccgcgcctgcctttcccatctgtctatctatctggctggcagggaaggaaagaacttgcatgttggtgaaggaagaagtggggtggaagaagtggggtgggacgacagtgaaatctagagtaaaaccaagctggcccaaggtgtcctgcaggctgtaatgcagtttaatcagagtgccannnnnnnnnnnnngttcaaatgattttaattattggaatgcacaatttttttaatatgcaaataaaaagtttaaaaactt

SEQ ID NO: 381190 - DNA, 758 bp, Homo Sapiens
tttgtacaaaaaagttggcgacgcaaccatggctgaagaacaaccgcaggtcgaattgttcgtgaaggctggcagtgatggggccaagattgggaactgcccattctcccagagactgttcatggtactgtggctcaagggagtcaccttcaatgttaccaccgttgacaccaaaaggcggaccgagacagtgcagaagctgtgcccaggggggcagctcccattcctgctgtatggcactgaagtgcacacagacaccaacaagattgaggaatttctggaggcagtgctgtgccctcccaggtaccccaagctggcagctctgaaccctgagtccaacacagctgggctggacatatttgccaaattttctgcctacatcaagaattcaaacccagcactcaatgacaatctggagaagggactcctgaaagccctgaaggttttagacaattacttaacatcccccctcccagaagaagtggatgaaaccagtgctgaagatgaaggtgtctctcagaggaagtttttggatggcaacgagctcaccctggctgactgcaacctgttgccaaagttacacatagtacaggtggtgtgtaagaagtaccggggattcaccatccccgaggccttccggggagtgcatcggtacttgagcaatgcctacgcccgggaagaattcgcttccacctgtccagatgatgaggagatcgagctcgcctatgagcaagtggcaaagccctcaaataagcccc

SEQ ID NO: 381191 - DNA, 415 bp, Homo Sapiens
attcttataaagctgtcatcaacctgggaaggaattcaggctggaaaggagctcgaggagcagcacggcatccactgcaacatgacgttactcttctccttcgcccaggctgtggcctgtgccgaggcgggtgtgaccctcatctccccatttgttgggcgcatccttgattggcatgtggcaaacaccgacaagaaatcctatgagcccctggaagaccctggggtaaagagtgtcactaaaatctacaactactacaagaagtttagctacaaaaccattgtcatgggcgcctccttccgcaacacgggcgagatcaaagcactggccggctgtgacttcctcaccatctcacccaagctcctgggagagctgctgcaggacaacgccaagctggtgcctgtgctctcagcca

SEQ ID NO: 381192 - DNA, 703 bp, Homo Sapiens
ttggtttccagccagcgccgagcgatgggcatctctcgggacaactggcacaagcgccgcaaaaccgggggcaagagaaagccctaccacaagaagcggaagtatgagttggggcgcccagctgccaacaccaagattggcccccgccgcatccacacagtccgtgtgcggggaggtaacaagaaataccgtgccctgaggttggacgtggggaatttctcctggggctcagagtgttgtactcgtaaaacaaggatcatcgatgttgtctacaatgcatctaataacgagctggttcgtaccaagaccctggtgaagaattgcatcgtgctcatcgacagcacaccgtaccgacagtggtacgagtcccactatgcgctgcccctgggccgcaagaagggagccaagctgactcctgaggaagaagagattttaaacaaaaaacgatctaaaaaaattcagaagaaatatgatgaaaggaaaaagaatgccaaaatcagcagtctcctggaggagcagttccagcagggcaagcttcttgcgtgcatcgcttcaaggccgggacagtgtggccgagcagatggctatgtgctagagggcaaagagttggagttctatcttaggaaaatcaaggcccgcaaaggcaaataaatccttgttttgtcttcacccatgtaataaaggtgtttattgttttgttccc

SEQ ID NO: 381193 - DNA, 1312 bp, Homo Sapiens
ttggtgacgggtacctctcccacaccgagctggctccactgcgtgctcccctcatccccatggagcattgcaccacccgctttttcgagacctgtgacctggacaatgacaagtacatcgccctggatgagtgggccggctgcttcggcatcaagcagaaggatatcgacaaggatcttgtgatctaaatccactccttccacagtaccggattctctctttaaccctccccttcgtgtttcccccaatgtttaaaatgtttggatggtttgttgttctgcctggagacaaggtgctaacatagatttaagtgaatacattaacggtgctaaaaatgaaaattctaacccaagacatgacattcttagctgtaacttaactattaaggccttttccacacgcattaatagtcccatttttctcttgccatttgtagctttgcccattgtcttattggcacatgggtggacacggatctgctgggctctgccttaaacacacattgcagcttcaacttttctctttagtgttctgtttgaaactaatacttaccgagtcagactttgtgttcatttcatttcagggtcttggctgcctgtgggcttccccaggtggcctggaggtgggcaaagggaagtaacagacacacgatgttgtcaaggatggttttgggactagaggctcagtggtgggagagatccctgcagaacccaccaaccagaacgtggtttgcctgaggctgtaactgagagaaagattctggggctgtgttatgaaaatatagacattctcacataagcccagttcatcaccatttcctcctttacctttcagtgcagtttcttttcacattaggctgttggttcaaacttttgggagcacggactgtcagttctctgggaagtggtcagcgcatcctgcagggcttctcctcctctgtcttttggagaaccagggctcttctcaggggctctagggactgccaggctgtttcagccaggaaggccaaaatcaagagtgagatgtagaaagttgtaaaatagaaaaagtggagttggtgaatcggttgttctttcctcacatttggatgattgtcataaggtttttagcatgttcctccttttcttcaccctccccttttttcttctattaatcaagagaaacttcaaagttaatgggatggtcggatctcacaggctgagaactcgttcacctccaagcatttcatgaaaaagctgcttcttattaatcatacaaactctcaccatgatgtgaagagtttcacaaatccttcaaaataaaaagtaatgac

SEQ ID NO: 381194 - DNA, 909 bp, Homo Sapiens
ttggggaggagaagcaggagctgtcgggaagatcagaagccagtcatggatgaccagcgcgaccttatctccaacaatgagcaactgcccatgctgggccggcgccctggggccccggagagcaagtgcagccgcggagccctgtacacaggcttttccatcctggtgactctgctcctcgctggccaggccaccaccgcctacttcctgtaccagcagcagggccggctggacaaactgacagtcacctcccagaacctgcagctggagaacctgcgcatgaagcttcccaagcctcccaagcctgtgagcaagatgcgcatggccaccccgctgctgatgcaggcgctgcccatgggagccctgccccaggggcccatgcagaatgccaccaagtatggcaacatgacagaggaccatgtgatgcacctgctccagaatgctgaccccctgaaggtgtacccgccactgaaggggagcttcccggagaacctgagacaccttaagaacaccatggagaccatagactggaaggtctttgagagctggatgcaccattggctcctgtttgaaatgagcaggcactccttggagcaaaagcccactgacgctccaccgaaagagtcactggaactggaggacccgtcttctgggctgggtgtgaccaagcaggatctgggcccagtccccatgtgagagcagcagaggcggtcttcaacatcctgccagccccacacagctacagctttcttgctcccttcagcccccagcccctcccccatctcccaccctgtacctcatcccatgagaccctggtgcctggctctttcgtcacccttggacaagacaaaccaagtctgaacagcagataacaatgcagcaatgccctgctgcccatctccatctgtc

SEQ ID NO: 381195 - DNA, 1240 bp, Homo Sapiens
ttggggatccgggccaagtacgagcgacaggagttcatctacccggagaagcaggagccctactcggcagggtaccgtgagggttttctctggaagcgtggccgggacaacgggcagtttttgagccggaagtttgtgctgacagaacgagagggtgctctgaagtatttcaacagaaatgatgccaaggagcccaaggccgtgatgaagatcgagcacctgaacgccaccttccagccggccaagatcggccacccccacggcctgcaggtcacctacctgaaggacaacagcacccgtaacatcttcatctaccatgaggacgggaaggagattgtggactggttcaatgcactccgagctgctcgcttccactacctgcaggtggcattcccaggggccagcgacgcagatctggtgccaaagctctccaggaactacctgaaggaaggctacatggagaagacggggcccaagcaaacggaaggcttccggaagcgctggttcaccatggatgaccgcaggctcatgtacttcaaagaccccctggacgccttcgcccgaggggaagtcttcattggcagcaaggagagtggctacacggtgctgcatgggttcccgccgtccacccagggccaccactggccacatggcatcaccatcgtcacgcccgaccgcaagtttctgtttgcctgcgagacggagtccgaccagagggattgggtggcggccttccagaaggcggtggacaggcccatgctgccccaggagtacgcagtggaggcgcacttcaagcataaaccttagcgagtgcggctggaggaccacggacattggactcactgtggctggacggaggggacccgtggatgggggggctctggcgtcctgaggccacctggccccacctgctcctcagggcagcccggcgcggccaggtagggcccgagcttcagcttccaggatgcttctctggaacctcaaggcaggcagcccaggccctgggcctgatctctaaccccgtcatgctgctgctgaccacacccagccaacctgcccctccctgacccggggccccctttcctccagggcccagtctggctcccgagctcagacacagtccccaggagccgcccaccacggctgtgggaacttccaggcctcaacgcatagccctgcttgggggccagcacggtgggcaactgccggccgctggggactgggccccgctcccttgccg

SEQ ID NO: 381196 - DNA, 1418 bp, Homo Sapiens
  misc_feature (1111)..(1129): n is a, c, g, or t
ttggcccaggtggggacagtggcccaagcaaggcctcactcgcagccacttcttcaagagctgcctgcacactgtcttggagcatctgccttgtgcctggcactctgccggtgccttgggaaggtcggaagagtggactttgtcctggccttcccttcatggcgtctatgacacttttgtggtgatggaaagcatgggacctgtcgtctcagcctgttggtttctcctcattgcctcaaaccctggggtaggtgggacggggggtctcgtgcccagatgaaaccatttggaaactcggcagcagagtttgtccaaatgacccttttcaggatgtctcaaagcttgtgccaaaggtcacttttctttcctgccttctgctgtgagccctgagatcctcctcccagctcaagggacaggtcctgggtgagggtgggagatttagacacctgaaactgggcgtggagagaagagccgttgctgtttgttttttgggaagagcttttaaagaatgcatgtttttttcctggttggaattgagtaggaactgaggctgtgcttcaggtatggtacaatcaagtgggggattttcatgctgaaccattcaagccctccccgcccgttgcacccactttggctggcgtctgctggagaggatgtctctgtccgcattcccgtgcagctccaggctcgcgcagttttctctctccccctggatgttgagtctcatcagaatatgtgggtagggggtggacgtgcacgggtgcatgattgtgcttaacttggttgtatttttcgatttgacatggaaggcctgttgctttgctcttgagaatagtttctcgtgtccccctcgcaggcctcattctttgaacatcaactctgaagtttgatacagataggggcttgatagctgtggtcccctctcccctctgactacctaaaatcaatacctaaatacagaagccttggtctaacacgggacttttagtttgcgaagggcctagatagggagagaggtaacatgaatctggacagggagggagatactatagaaaggagaacactgcctactttgcaagccagtgacctgccttttgaggggacattggannnnnnnnnnnnnnnnnnnttgggtttgagctacagtcatgaacttttggcgtctactgattcctccaactctccaccccacaaaataacggggaccaatatttttaactttgcctatttgtttttgggtgagtttcccccctccttattctgtcctgagaccacgggcaaagctcttcattttgagagagaaaaaaaactgtttggaaccacaccaatgataattttctttgtaatacttgaaatttatttttttattattttgatagcagatgtgctatttatttatttaatatgtataaggagcc

SEQ ID NO: 381197 - DNA, 1613 bp, Homo Sapiens
ttggagctgaaggaggtggttgtggggaaccacctggagagcatcttcctggtgatgggttactgtgagcaggacctggccagcctcctggagaatatgccaacacccttctcggaggctcaggtcaagtgcatcgtgctgcaggtgctccggggcctccagtatctgcacaggaacttcattatccacagggacctgaaggtttccaacttgctcatgaccgacaagggttgtgtgaagacaggtgggtgcaacttgggccaggccctgtccctagatggcacttggtgacacacactcccctctctgctgcagcggatttcggcctggcccgggcctatggtgtcccagtaaagccaatgacccccaaggtggtcactctctggtaagtccttctgaagcatggtggcccctggggaccaggcctgtctggtggaggtctccttggggatgtcaggccgaagctgcaactggccttgggaatgttaagctacagggtctgtgcacactcagaaacgttgggtctaggacagcctccaggacacagcagggctgtgccacaaaatggtgagagacgggctcagtggcgtcaagggcctgcctagatcagacacacctcgccttgagagctggaaacaccgtggccgtgaaaccatctctggagggaaggctgcttcacggactgaaggacaggcagcttgcatgctttccctggttcttcctcctggatacttttaaccaaacagggtcatgcttagccagggctgaatatcagagttggtcagaatcaatcacgaccccagtgtcgtgtactccccatctgagaacgggttggtagtggctggtgtggctgtgtgccgagggtccgtggtccctgcgactctcaggacaccgctgcacgtgacagctctcgcccccggcaaccattgctgtgtgtgccacctggatctgcagggcctggggcagagggtggtccgagttgggacaggtttccaggccagcacaggctctcggggaggctgtgtcctgtggaggcctgggctgggggagaggagccggccgtattgaggtgggtgcttctgtgtgtaggtaccgagcccctgaactgctgttgggaaccaccacgcagaccaccagcatcgacatgtggtgaggagatacggttaccgctcctggggcctcaggaagggctgggacaggagccgggtcacctggttcctgagctcagcctcaggggaggggcaggagtgcagtggggtctttgccagcctcccactcccagggaggtgggcctgagcctggaaacccaggaggaggtgtgagaacttagcttgctgttctcaggctgggagcacagaggtctggaggaggcacgcctgcccctgcacttgtcaccccgggaggcctgcggggcccaggaggggagccagtggtccctgcctgtccttcacagtgtccctgacccagggtgcctcacactggcagggtcagcaaaggtctggctgcagtcaagtcctctgttcctcgcgctggcggggtcagcagacgtctggccgcagtgaggtccactgttctctgcaaggctgtgggctgcatactggccgagctgctgg

SEQ ID NO: 381198 - DNA, 1236 bp, Homo Sapiens
ttgtacaaaaaagttggggaggagcagcgtgtcaaagagtgagcgacagcgcctggtggaaacccacgccacccgcgtcatcgcccttatcaacgaccagcgccgggctgccttggagggcttcctggcagccctgcaggcagatccgcctcaggcggagcgtgtcctgttggccctgcggcgctacctgcgtgcggagcagaaggaacagaggcacacgctgcgccactaccagcatgtggccgccgtggatcccgagaaggcacagcagatgcgcttccaggtgcatacccaccttcaagtgattgaggagagggtgaatcagagcctgggtctgcttgaccagaacccccacctggctcaggagctgcggccccaaatccaggaactcctccactctgaacacctgggtcccagtgaattggaagcccctgcccctgggggcagcagcgaggacaagggtgggctgcagcctccagattccaaggatgcagacacccccatgacccttccaaaagggtccacagaacaagatgctgcatcccctgagaaagagaagatgaacccgctggaacagtatgagcgaaaggtgaatgcgtctgttccaaggggtttccctttccactcatcggagattcagagggatgagctggcaccagctgggacaggggtgtcccgtgaggctgtgtcgggtctgctgatcatgggagcgggcggaggctccctcatcgtcctctccatgctgctcctgcgcaggaagaagccctacggggctatcagccatggcgtggtggaggtggaccccatgctgaccctggaggagcagcagctccgcgaactgcagcggcacggctatgagaaccccacttaccgcttcctggaggaacgaccctgacccggcccccttcaccccttcagccgagcccagacctcccctcttcctggagccccagaaccccaactcccagcctagggcagcagggagtcttgaagtgatcatttcacacccttttgtgagacggctggaaattcttatttcccctttccaattccaaaattccatccctaagaattcccagatagtcccagcagcctccccacgtggcacctcctcaccttaatttattttttaagtttatttatggctctttaaggtgaccgccaccttggtcctagtgtctattccctggaattcaccctctcatgtttccctactaacatcccgataaagtcctc

SEQ ID NO: 381199 - DNA, 1056 bp, Homo Sapiens
ttggcgaggaagaggaggaatccttcccacagccagtagatgattacttcgtggagcctccgcaggctgaagaggaagaggaaacggtcccacccccaagctcccatacacttgcagtggtcggcaaagtcactcccaccccgaggcccacagacggtgtggatatttactttggcatgcctggggaaatcagtgagcacgaggggttcctgagggccaagatggacctggaggagcgtaggatgcgccagattaatgaggtgatgcgtgaatgggccatggcagacaaccagtccaagaacctgcctaaagccgacagacaggccctgaatgagcacttccagtccattctgcagactctggaggagcaggtgtctggtgagcgacagcgcctggtggaaacccacgccacccgcgtcatcgcccttatcaacgaccagcgccgggctgccttggagggcttcctggcagccctgcaggcagatccgcctcaggcggagcgtgtcctgttggccctgcggcgctacctgcgtgcggagcagaaggaacagaggcacacgctgcgccactaccagcatgtggccgccgtggatcccgagaaggcacagcagatgcgcttccaggtgcatacccaccttcaagtgattgaggagagggtgaatcagagcctgggcctgcttgaccagaacccccacctggctcaggagctgcggccccaaatccaggaactcctccactctgaacacctgggtcccagtgaattggaagcccctgcccctgggggcagcagcgaggacaagggtgggctgcagcctccagattccaaggatgacacccccatgacccttccaaaagggtccacagaacaagatgctgcatcccctgagaaagagaagatgaacccgctggaacagtatgagcgaaaggtgaatgcgtctgttccaaggggtttccctttccactcatcggagattcagagggatgagctggcaccagctgggacaggggtgtcccgtgaggctgtgtcgggtctgctgatcatgggagcgggcggag

SEQ ID NO: 381200 - DNA, 887 bp, Homo Sapiens
ttggcgaagcttgaaagacttggtaatggcgacgggtttggtaagtaggaaagtttcggttgaggagtaagagctgccgcgggagcagtaacccgcgcgggggaggccgacgtcggtcggagagggggtacgagagctgctggtggtgttgtcgtggccggagcggcccgcgcctgggctgccggcacttcgcggcagtcagagcaccataacatggtgtgggaagtgaagacaaatcagatgcctaatgcagtacagaaactcctgttggtgatggacaagagagcctcaggaatgaatgactcattggagttgctgcagtgtaatgagaatttgccatcttcacctggatataactcctgtgatgaacacatggagcttgatgaccttcctgaacttcaggcagttcaaagtgatcctacccaatctggcatgtaccagctgagttcagatgtttcacatcaagaatacccaagatcatcttggaaccaaaatacctcagacataccagaaactacttaccgtgaaaatgaggtggactggctaacagaattggcaaatatcgcgaccagtccacaaagtccactgatgcagtgctcattttacaatagatcatctcctgtacacatcatagccactagcaaaagtttacattcctatgcacgccctccaccagtgtcctcttcttcgaagagtgaaccagccttccctcatcaccattggaaggaggaaacaccagtaagacacgaaagggcaaatagtgagtcagaatctggcattttctgcatgtcctccctgtcagatgatgatgatttgggatggtgcaattcctggccttcaactgtctggcactgttttttgaaaggcacacgactgtgcttttcata

SEQ ID NO: 381201 - DNA, 471 bp, Homo Sapiens
ctttgtacaaaaaagttggaaaagacgtgaaccagcaggagttcgtcagagctctggcagccttcctcaaaaagtccgggaagctgaaagtccccgaatgggtggataccgtcaagctggccaagcacaaagagcttgctccctacgatgagaactggttctacacgcgagctgcttccacagcgcggcacctgtacctccggggtggcgctggggttggctccatgaccaagatctatgggggacgtcagagaaacggcgtcatgcccagccacttcagccgaggctccaagagtgtggcccgccgggtcctccaagccctggaggggctgaaaatggtggaaaaggaccaagatggcggccgcaaactgacacctcagggacaaagagatctggacagaatcgccggacaggtggcagctgccaacaagaagcattagaacaaaccatgctgggttaataaattgcctc

SEQ ID NO: 381202 - DNA, 920 bp, Homo Sapiens
ttggcgcctgtcctcccagccagtcgctgacagccgcggcgccgcgagcttctcctctcctcacgaccgagagcagtcattatggcgaaccttggctgctggatgctggttctctttgtggccacatggagtgacctgggcctctgcaagaagcgcccgaagcctggaggatggaacactgggggcagccgatacccggggcagggcagccctggaggcaaccgctacccacctcagggcggtggtggctgggggcagcctcatggtggtggctgggggcagcctcatggtggtggctgggggcagccccatggtggtggctggggacagcctcatggtggtggctggggtcaaggaggtggcacccacagtcagtggaacaagccgagtaagccaaaaaccaacatgaagcacatggctggtgctgcagcagctggggcagtggtggggggccttggcggctacatgctgggaagtgccatgagcaggcccatcatacatttcggcagtgactatgaggaccgttactatcgtgaaaacatgcaccgttaccccaaccaagtgtactacaggcccatggatgagtacagcaaccagaacaactttgtgcacgactgcgtcaatatcacaatcaagcagcacacggtcaccacaaccaccaagggggagaacttcaccgagaccgacgttaagatgatggagcgcgtggttgagcagatgtgtatcacccagtacgagagggaatctcagcctattaccagagaggatcgagcatggtcctcttctcctctccacctgtgatcctcctgatctctttcctcatcttcctgatagtgggatgaggaagtcttcctgttttcaccatctttctaatctttttccagcttgaaggaagccggtatccacctgcagccctttta

SEQ ID NO: 381203 - DNA, 1200 bp, Homo Sapiens
ttggcgctccggggcatcatcaagagcatggacagccagtacccatggagccagagagtgagctttgccaaggacatcgcatcagggatggcctacctccactccatgaacatcatccaccgagacctcaactcccacaactgcctggtccgcgagaacaagaatgtggtggtggctgacttcgggctggcgcgtctcatggtggacgagaagactcagcctgagggcctgcggagcctcaagaagccagaccgcaagaagcgctacaccgtggtgggcaacccctactggatggcacctgagatgatcaacggccgcagctatgatgagaaggtggatgtgttctcctttgggatcgtcctgtggagatcatcgggcgggtgaacgcagaccctgactacctgccccgcaccatggactttggcctcaacgtgcgaggattcctggaccgctactgccccccaaactgccccccgagcttcttccccatcaccgtgcgctgttgcgatctggaccccgagaagaggccatcctttgtgaagctggaacactggctggagaccctccgcatgcacctggccggccacctgccactgggcccacagctggagcagctggacagaggtttctgggagacctaccggcgcggcgagagcggactgcctgcccaccctgaggtccccgactgagccagggccactcagctgcccctgtccccacctctggagaatccacccccaccagattcctccgcgggaggtggccctcagctgggacagtggggacccaggcttctcctcagagccaggccctgacttgccttctcccaccccgtggaccgcttcccctgccttctctctgccgtggcccagagccggcccagctgcacacacacaccatgctctcgccctgctgtaacctctgtcttggcagggctgtcccctcttgcttctccttgcatgagctggagggcctgtgtgagttacgcccctttccacacgccgctgccccagcaaccctgttcacgctccacctgtctggtccatagctctctggaggctgggccaggaggcagcctccgaaccatgccccatataacgcttgggtgcgtgggagggcgcacatcacggcagaggccaagttccaggtgtctgtgttcccaggaaccaaatgggggagtctggggcccggttttccccc

SEQ ID NO: 381204 - DNA, 680 bp, Homo Sapiens
tatatatatatttgcagcccaataaagatacttagataaaactattgggtttattccttgaaaactagggcatgtgtagctagatctggctcataaaaagcaaagttatttacatatattttaaggtaaaattgcctctgataaatgtcaaagaggaagtttaggtctttcttctggcagaaagccagagagtaagtgctgaatgtgacgcagaatcatgttaggtaacaaggactttgaggtaagtggctgaagtcttctgtggagtcagccgactcttgcaggattgtgtggtatcagtcacctttagcatttgccaacccaactctgatcattcttcttctttcaaggtatctcagcgtttgagtcagccaggagtagcaataggtttggcttggactcccttaggtggagaaatcatgttcgtggaggcgagtcgaatggatggcgagggccagttaactctgaccggccagctcggggacgtgatgaaggagtccgcccacctcgctatcagctggctccgcagcaacgcaaagaagtaccagctgaccaatgcttttggaagttttgatcttcttgacaacacagacatccatctgcacttcccagctggagctgtcacaaaagatggaccatctgctggagttaccatagtaacctgtctcgcctcacttttt

SEQ ID NO: 381205 - DNA, 1598 bp, Homo Sapiens
ttgggcaaagccctggctcacaccactgatctactggcaagatgggtctggagaaggctcatctggcccagccagtggggtaacagctactttggtgttaaacccaccccctcacctgccttttgtggtatagctggtgaccctaatcatcaggccattgcaacatagcatggaagatggtgcgaggtggcgtgtggtccctggccttctccctctactgccttgcaccataggccatgtcctcccagcagcaccagctgagtagacttcagaagtggcttgagcccttataccatggttatgtcaaagggagtgggcctggggtggagggtaccctcatcactggtggcagccattaactatttccttccctgcctagtcctggcataaggcctgctttcgatgtgccaagtgtggcaaaggccttgagtcaaccaccctggcagacaaggatggcgagatttactgcaaaggatgttatgctaaaaacttcgggcccaagggctttggttttgggcaaggagctggggccttggtccactctgagtgaggccaccatcacccaccacaccctgcccactcctgcgcttttcatcgccattccattcccagcagctttggagacctccaggattatttctctgtcagccctgccacatatcactaatgacttgaacttgggcatctggctccctttggtttgggggtctgcctgaggtcccaccccactaaagggctccccaggcctgggatctgacaccatcaccagtaggagacctcagtgttttgggtctaggtgagagcaggcccctctccccacacctcgccccacagagctctgttcttagcctcctgtgctgcgtgtccatcatcagctgaccaagacacctgaggacacatcttggcacccagaggagcagcagcaacaggctggagggagagggaagcaagaccaagatgaggaggggggaaggctgggttttttggatctcagagattctcctctgtgggaaagaggttgagcttcctggtgtccctcagagtaagcctgaggagtcccagcttagggagtcactattggaggcagagaggcatgcaggcggggtcctaggagcccctgcttctccaggcctcttgcctttgagtctttgtggaatggatagcctcccactaggactgggaggagaataacccaggtcttaaggaccccaaagtcaggatgttgtttgatcttctcaaacatctagttccctgcttgatgggaggatcctaatgaaatacctgaaacatatattggcatttatcaatggctcaatcttcatttatctctggccttaaccctggctcctgaggctgcggccagcagagcccaggccagggctctgttcttgccacacctgcttgatcctcaaatgtggagggaggtaggcactgcctcagtcttcatccaacacctttcccttgccctgagacctcagaatcttccctttaacccaagaccctggcctcttccactccacccttctccagggaccctttagatcacatcactccacccctgccaggccccaggttaggaatagtggtgggagggaagg

SEQ ID NO: 381206 - DNA, 875 bp, Homo Sapiens
ttgggccgaactggggaggaggcaagaaatgtggggtgtgtcagaagacggtttactttgccgaagaggttcagtgcgaaggcaacagcttccataaatcctgcttcctgtgcatggtctgcaagaagaatctggacagtaccactgtggccgtgcatggtgaggagatttactgcaagtcctgctacggcaagaagtatgggcccaaaggctatggctacgggcagggcgcaggcaccctcagcactgacaagggggagtcgctgggtatcaagcacgaggaagcccctggccacaggcccaccaccaaccccaatgcatccaaatttgcccagaagattggtggctccgagcgctgcccccgatgcagccaggcagtctatgctgcggagaaggtgattggtgctgggaagtcctggcataaggcctgctttcgatgtgccaagtgtggcaaaggccttgagtcaaccaccctggcagacaaggatggcgagatttactgcaaaggatgttatgctaaaaacttcgggcccaagggctttggttttgggcaaggagctggggccttggtccactctgagtgaggccaccatcacccaccacaccctgcccactcctgcgcttttcatcgccattccattcccagcagctttggagacctccaggaatatttctctgtcagccctgccacatatcactaatgacttgaacttgggcatctggctccctttggtttgggggtctgcctgacgtcccaccccactaaagggctccccaggcctgggatctgacaccatcaccagtagagacctcagtgttttgggtctaggtgagagcaggcccctctccccacacctcgccccacagagctctgt

SEQ ID NO: 381207 - DNA, 938 bp, Homo Sapiens
ttggcgagtctccagcaccatgtctggtttgtctggcccaccagcccggcgcggcccttttccgttagcgttgctgcttttgttcctgctcggccccagattggtccttgccatctccttccatctgcccattaactctcgcaagtgcctccgtgaggagattcacaaggacctgctagtgactggcgcgtacgagatctccgaccagtctgggggcgctggcggcctgcgcagccacctcaagatcacagattctgctggccatattctctactccaaagaggatgcaaccaaggggaaatttgcctttaccactgaagattatgacatgtttgaagtgtgttttgagagcaagggaacagggcggatacctgaccaactcgtgatcctagacatgaagcatggagtggaggcgaaaaattacgaagagattgcaaaagttgagaagctcaaaccattagaggtagagctgcgacgcctagaagacctttcagaatctattgttaatgattttgcctacatgaagaagagagaagaggagatgcgtgataccaacgagtcaacaaacactcgggtcctatacttcagcatcttttcaatgttctgtctcattggactagctacctggcaggtcttctacctgcgacgcttcttcaaggccaagaaattgattgagtaatgaatgaggcatattctcctcccaccttgtacctcagccagcagaacatcgctgggacgtgcctggcctaaagcatcctaccaacagcaccatcaaggcacgttggagctttcttgccagaactgatctcttttggtgtgggaggacatggggtaccacctacacccaacaagtcaatgagggacttctttttaatttggtaggattttgactggttttgcaacaataagtctattattagagtcacctatgacaaaaa

SEQ ID NO: 381208 - DNA, 757 bp, Homo Sapiens
ttggggcatcaccacccggcagcagcgcaaacgggtctccctagagccccaccagggccctggaactcctgagtctaagaaggccaccagctgtttcccacgccccatgactccccgagaccgacatgaagggcgcaaacagagcactactgaggcccagaagaaagcagctccagcttctactaaacaggctgaccggcgccagtcgatggccttcagcatcctcaacacacccaagaagctagggaacagccttctgcggcggggagcctcaaagaaggccctgtccaaggcttcccccaacactcgcagtggaacccgccgttctccgcgcattgccaccaccacagccagcgccgccactgctgccgccattggtgccacccctcgagccaagggcaaggcaaagcactaaagggccagtaccagtgagtggccccacctgtgtccccgatgctgccgtcacctggtcctccgcctactgtccctctcagtgccttctctcagctcccaggccaacagtagccaaacccctagagacagtgatgcctgcccgcaccctggcctggtccctggtccttcactggcgccttctcggagctggcccagggggcctggagcatggacagtgtgggcgctctccctaccttgcctccttttttcttaaagcaaagtcacttctccatcacaaccagatttgaggctggttttgatggctgggtccttgggcctggccagtcttcctcttagcctctgg

SEQ ID NO: 381209 - DNA, 1228 bp, Homo Sapiens
ttggagccctgcaggagaacacgcccaactacttcgacacgtcgcagcccaggatgcgggagacggccttcgaggaggacgtgcagctgccgcgggcctatatggagaacaaggccttctccatggatgaacacaatgcagctctccgaacagcaggatttcccaacggcagcttgggaaaaagacccagtggcagcttggggaaaagacccagcgctccgtttagaagcaacgtgtatcagccaactgagatggccgtcgtgctcaacggtgggaccatcccaactgctccgccaagtcacacaggaagacacctttggtgaaagactttaagttccagagaatcagaatttctcttaccgatttgcctccctggctgtgtctttcttgagggagaaatcggtaacagttgccgaaccaggccgcctcacagccaggaaatttggaaatcctagccaaggggatttcgtgtaaatgtgaacactgacgaactgaaaagctaacaccgactgcccgcccctcccctgccacacacacagacacgtaataccagaccaacctcaatccccgcaaactaaagcaaaactaattgcaaatagtattaggctcactggaaaatgtggctgggaagactgtttcatcctctgggggtagaacagaaccaaattcacagctggtgggccagactggtgttggttggaggtggggggctcccactcttatcacctctccccagcaagtgctggaccccaggtagcctcttggagatgaccgttgcgttgaggacaaatggggactttgccaccggcttgcctggtggtttgcacatttcaggggggtcaggagagttaaggaggttgtgggtgggattccaaggtgaggcccaactgaatcgtggggtgagctttatagccagtagaggtggagggaccctggcatgtgccaaagaagaggccctctgggtgatgaagtgaccatcacatttggaaagtgatcaaccactgttccttctatggggctcttgctctagtgtctatggtgagaacacaggccccgccccttcccttgtagagccatagaaatattctggcttggggcagcagtcccttcttcccttgatcatctcgccctgttcctacacttacgggtgtatctccaaatcctctcccaattttattcccttattcatttcaagagctccaatggggtctccagctgaaagcccctc

SEQ ID NO: 381210 - DNA, 1570 bp, Homo Sapiens
ttggcccagacacaccggagtttgccatgcccgagaatgtggcaccccggagcggggcgactgccggggctgccggcggccgcgggaaaggcgcctatcaggaccgcgacaagccagcccagatccgcttcagcaacatttccgccgccaaagcggttgctgatgctattagaacaagccttggaccaaaaggaatggataaaatgattcaagatggaaaaggtgatgtaaccattacaaatgatggtgctaccattctgaaacaaatgcaagtattacatccagcagccagaatgctggtggagctgtctaaggctcaagatatagaagcaggagatggcaccacatcagtagtcatcattgctggctccctcttagattcttgtaccaagcttcttcagaaagggattcatccaaccatcatttctgagtcattccagaaggccctggaaaagggcattgaaatcttgactgacatgtctcgacctgtggaactgagtgacagagaaactttgttaaatagtgcaaccacttcactgaactcaaaggtggtttctcagtattcaagtctgctttctccaatgagtgtaaatgcagtgatgaaagtgattgacccagccacagccaccagtgtagatcttagagatattaaaatagttaagaagcttggtgggacattggatgactgtgagttggtggaagggctggttctcacccaaaaagtgtcaaattctggcataaccagagttgaaaaggccaagattgggcttattcagttttgcttatctgctcccaaaacagacatggataatcaaatagtggtttctgactatgcccagatggaccgagtgctgcgagaagagagagcctatattttaaatttagtgaagcaaattaaaaaaacaggatgtaatgtccttctcatacagaaatctattctaagagatgctcttagtgatcttgcattacactttctgaataaaatgaagatcatggtgattaaggatattgaaagagaagacattgaattcatttgtaagacaattggaaccaagccagttgctcatattgaccaatttactgctgacatgctgggttctgctgagttagctgaggaggtcaatttaaatggttctggcaaactgctcaagattacaggctgtgccagccctggaaaaacagttacaattgttgttcgtggttctaacaaactggtgattgaagaagctgagcgctccattcatgatgccctatgtgttattcgttgtttagtgaagaagagggctcttattgcaggaggtggtgctccagaaatagagttggccctacgattaactgaatattcacgaacactgagtggtatggaatcctactgcgttcgtgcttttgcagatgctatggaggtcattccatctacactagctgaaaatgccggcctgaatcccatttctacagtaacagaactaagaaaccggcatgcccagggagaaaaactgcaagcattaatgtccgaaagggtggtatttccaacattttggaggaactggttgtccagcctctgttggtatca

SEQ ID NO: 381211 - DNA, 599 bp, Homo Sapiens
ctttgtacaaaaaagttggatcatggcgcaccgatcaaggtgaaaaggagaaccccatgcgggaacttcgcatccgcaaactctgtctcaacatctgtgttggggagagtggagacagactgacgcgagcagccaaggtgttggagcagctcacagggcagacccctgtgttttccaaagctagatacactgtcagatcctttggcatccggagaaatgaaaagattgctgtccactgcacagttcgaggggccaaggcagaagaaatcttggagaagggtctaaaggtgcgggagtatgagttaagaaaaaacaacttctcagatactggaaactttggttttgggatccaggaacacatcgatctgggtatcaaatatgacccaagcattggtatctatggcctggacttctatgtggtgctgggtaggccaggtttcagcatcgcagacaagaagcgcaggacaggctgcattggggccaaacacagaatcagcaaagaggaggccatgcgctggttccagcagaagtatgatgggatcatccttcctggcaaataaattcccgtttctatccaaaaagagcaataaaaagttttc

SEQ ID NO: 381212 - DNA, 706 bp, Homo Sapiens
ttggctcatcctcccctcgacaagccaagaatgagaattgggaataagtgaacagagtttgagggtttctgggcggcctccgtgtcacccaaagtcatgatcaattcaggagactgcccaaggcttgcagaagaggtaagggagtgaggcactcctatcccagtctcccaggtttggttgagggctccccaaggcagggcaagatagcggccctgtcactgaccctggcctgtggtggtctgagctggggagggaaggacaccaatgaatcagcttgggacctctttaggccttccccttttcctccaccccgatgctccttagtgatgctctgaggcgtggccacgatctccctcccaggtggtatcgcccacctgaaaaaatcctgagaatttctcccatcttggcctcttccagaaaccggccaggcaaggaaagaggccggtcaccagaagccagcaggcgtggggtgtgatactctctatagccactacagggcgcgcgcaggtcgcggatctccccagttgctaatcccggctctgccactcaatcctatccctagttcccgagcgcgggtcccccgccttgcagtctccagccgtgcggggccgggagcaggcctccggcctcccagacttctagagcccgccgggcccatctttgtactcatccaccccagccggcttgggactcagacaccgaagtc

SEQ ID NO: 381213 - DNA, 841 bp, Homo Sapiens
  misc_feature (50)..(69): n is a, c, g, or t
ttgtacaaaaaagttggcggccgcacaacctttgaacaagaaagttgggnnnnnnnnnnnnnnnnnnnngcaaaacattacacaattttttattattaaatgagaaaatctcatttgttacatcgtcacattgctagtcagagaaatgttgcagtgatgaagaaagtcaatgttggaccaacccaagtcctcattcctacaacattcatttacaaagaaataatgttcaacacagcccaacaaaacattcttggttttcttcatattgaagtcccccaaaaaatcctcttctaatggggtatttcactacataaattatagttcttcatttttacaattcaccccaaactgtatgagagatgtatcacactaagatttctaaagctgttaggaaatccttcacacatcgtcgtcatctgatgtatcactgctacttgtctctgtgtcatcattctcagttgtgggtttgaaagtgctgttcttccacggtccaaacttgaagtcacagatcaagccatttttcaaaataccattttttctcagaccattcttctgtaactgttcactaataacttggaattctctcatttcatcctcagttaagggagcacatgtttcatcattttcactgtcttcctgccagcccatttcctttaacaatctgtgttctgcctcaagtgaacttgaaagaacatcagtttgtgggaaggttgaagaccgaatgatctgctggggaaatcactgaggcattgccattctcttgaggaatttcattttcatcgaagtttcggtttatatccctttcttggtgagtactattgctgttatgtaaaataaatga

SEQ ID NO: 381214 - DNA, 852 bp, Homo Sapiens
attgatgagcatgctttcttatatgccactttgtacaaaaaagttggccggatatcaagggccagaatgtgttgctgactgagaatgcagaggtgaaacttgttgactttggtgtgagtgctcagctggacaggactgtggggcggagaaatacgttcataggcactccctactggatggctcctgaggtcatcgcctgtgatgagaacccagatgccacctatgattacagaagtgatctttggtcttgtggcattacagccattgagatggcagaaggtgctccccctctctgtgacatgcatccaatgagagcactgtttctcattcccagaaaccctcctccccggctgaagtcaaaaaaatggtcgaagaagttttttagttttatagaagggtgcctggtgaagaattacatgcagcggccctctacagagcagcttttgaaacatccttttataagggatcagccaaatgaaaggcaagttagaatccagcttaaggatcatatagatcgtaccaggaagaagagaggcgagaaagatgaaactgagtatgagtacagtgggagtgaggaagaagaggaggaagtgcctgaacaggaaggagagccaagttccattgtgaacgtgcctggtgagtctactcttcgccgagatttcctgagactgcagcaggagaacaaggaacgttccgaggctcttcggagacaacagttactacaggagcaacagctccgggagcacgaagaatataaaagcaactgctggcagagagacagaagcggattgagcagcagaaagaacagagcgacagctagaagagcaacaaagagagagcgggaagctagaa

SEQ ID NO: 381215 - DNA, 1209 bp, Homo Sapiens
actttgtacaaaaaagttggcacgctgcggagagattcccagggcctgagccaggtctgttctccacgcaggtgttccgcgcgccccgttcagccatgtcgtccggcatccatgtagcgctggtgactggaggcaacaagggcatcggcttggccatcgtgcgcgacctgtgccggctgttctcgggggacgtggtgctcacggcgcgggacgtgacgcggggccaggcggccgtacagcagctgcaggcggagggcctgagcccgcgcttccaccagctggacatcgacgatctgcagagcatccgcgccctgcgcgacttcctgcgcaaggagtactggggcctggacgtgctggtcaacaacgcgggcatcgccttcaaggttgctgatcccacaccctttcatattcaagctgaagtgacgatgaaaacaaatttctttggtacccgagatgtgtgcacagaattactccctctaataaaaccccaagggagagtggtgaacgtatctagcatcatgagcgtcagagcccttaaaagctgcagcccagagctgcagcagaagttccgcagtgagaccatcactgaggaggagctggtggggctcatgaacaagtttgtggaggatacaaagaagggagtgcaccagaaggagggctggcccagcagcgcatacggggtgacgaagattggcgtcaccgttctgtccaggatccacgccaggaaactgagtgagcagaggaaaggggacaagatcctcctgaatgcctgctgcccagggtgggtgagaactgacatggcgggacccaaggccaccaagagcccagaagaaggtgcagagacccctgtgtacttggcccttttgcccccagatgctgagggtccccatggacaatttgtttcagagaagagagttgaacagtggtgagctgggctcacagctccatccatgggccccattttgtaccttgtcctgagttggtccaaagggcatttacaatgtcataaatatccttatataagaaaaaaaatgatctcttatcaattagcactcactaatgtactactaattgagcaacctacgcactcagttgactacgtaaatctgtcaggtcttttgtgatttcctctgatgcacgagaggaaaaattgtaattgatgaaaataatgaatgaaaatcaacagatgaataaaatggttctttataa

SEQ ID NO: 381216 - DNA, 1294 bp, Homo Sapiens
tttggccaactttgtacaaaaaagttggcagctgtgggaggaggcggcgtggaaggccgaggagctcaagcccggaccaatccccacgttccgggccgcgaccctgaccctgcagcgtaccgggaagcgaaaccggccggatgggccgctgagcccgaatcgggcactgtgtggagccccctggagctgagatcaggatgttccgcttcatgagggacgtggagcctgaggatcccatgttcctgatggatccctttgctattcaccgtcagcatatgagccgtatgttgtcaggtggctttggatatagccccttcctcagcatcacagatggcaacatgccagggaccaggcctgccagccgccggatgcagcaggctgggctgtctccccctttgggatgctgggaatgtcgggtggtttcatggacatgtttgggatgatgaatgacatgattggaaacatggaacacatgacagctggaggcaattgccagaccttctcatcttccactgtcatctcctactccaatacgggtgatggtgcccccaaggtctaccaagagacatcagagatgcgctcggcaccaggcgggatccgggagacacggaggactgttcgggattcagacagtggactggagcagatgtccattgggcatcacatccgggacagggctcacatcctccagcgctcccgaaaccatcgcacgggggaccaggaggagcggcaggactatatcaacctggatgagagtgaggccgcagcgtttgatgacgagtggcggcgggagacctcccgattccggcagcagcgtcccctggagtttcggcggcttgagtcctcaggggctgggggacgaagggcggaggggcctccccgcctggccatccagggacctgaggactccccttcccgacagtcccgccgctatgactggtgagggccccgggccctcagcctctcttgtacaggctgagaggctgagaaatcatcccctgaataactttttcctctcgattcccatccccaatttaatattaaattaacaggcaagccggcccccacctctccctgggggtctcagggagaacctttcacggcaccctttccctaccttttccttctttaatctcctggtttaccattgatgacttcgcctctgcatctactgacttgatttttcattctgccactccatcttcaaaccccctcacctttcccatcctactcctgccatgcattgaagggtcaatgcattttggggtgagctctgggtttaagggccccctcc

SEQ ID NO: 381217 - DNA, 996 bp, Homo Sapiens
gagtttcgagagcacagtgtgcagcccgcgcaggtggtagtggaactgctgttccaggtcttcttcgccggcgtccgcaccctccaagtggcccaggtccaccaggatgtcttggacttccaggcactgccctcctcgctcccagccggtggaggcggctggtgcaggaccccccactcgatgtcgttgcggatggacttgagaagcacgtagtggctgtacatgtcccgagagggcgcgaaaaagctgccattggcgcttcccgagtcggggactgggggcgtgcgctcctccaggcagccgccactgccgcctacctccacgccaacatcgttgtctaacccggggtcagccaggggcacgtcgcgcagcaagctgggcaccatcaccgtctggtccatgttgttcacggcgccaatgaagcgattcatggcgttaaagagcgagtgcttctggttgtaggtgtcgcagatttgcatcatggtggccgcgcggacgttggagcgcagggacgcaggggcacggggatggtcggccgggtcaaggggatgcccgccttcacgcgctctccaaggcccgcgctgggggcctggctatagccggtgtggcgggattcccggcactcctccgccctcgccaactctcgtctcgctggcagaccggccctgcgggatgggcggcttctcctggctttggcgcccggaaactcgcgatggctgagggtgctctgtgggtcgagccctggcctcctcttgcgccttgagactctcctgctcgttggcaattcagtgttctcgctgcaagcggctgctacgcaagggcgctgctgcggtcagtggctggactgtgactgcggacggcggtgactgcgttggccccctacccatcccaggtgctcaatttatagtccaggaaaggtgtcgccggcgctcagggccacccctggtgtctcctcctcccgcctcccccggcagcaccgagataaaaggcccccaa

SEQ ID NO: 381218 - DNA, 851 bp, Homo Sapiens
tttttgaggcatcagcaacagacacggtgctgtcgtggctgacccaggccaggcggctcccactggcagagaagcttaccccgtggacccagccaccagtgccactgccaccaaactctgacatcagctgcccaaaaggcatcttgctgccccagggcgtgctggctggcttttcatccacttctttaatgtaggcagaaaacactctgcatttgaagtcacatgatcctgctgccagcaaaacgttgttgggatgccaatccaagctgaggactgtggagcgaatcggctttttaatgtgcttgctcacccaccagtcattttcagactcaaagtaacaaacagaaatgagtcgtgctccacttcccacagcaaatttgttctctaggggggaccacttcacaaaagtagctgcgcgattaattctcaggatcaccagggttggcttccaaacaccatctttctgactccagacataggcattgcggtctgccccacaagtgacaatgcggtcgctcttgggagcccagtcaatacctgtgatgtgtccgttgtgctccttgagttcatgagctttcacccactggctcccgttcttcttatagatgtgcacttcgtgattattgggactgagggcaatctgagtacgatccctgttccaggcatgacaggtgattggctctagtaaaaactgatgcagtgacattattcttagtgttttcaaaggagagaaagctgggatcgggggagtccggacgggctcggagcggaggattcgcggactctgggcagtcgacgcgaacaggctcagtcgggttcgggcggaggacggccaacttttttgtacaaag

SEQ ID NO: 381219 - DNA, 876 bp, Homo Sapiens
aagctgatgaaggcaaagcccttggattggccagtggtcttgtcttagccaggtagatgcgggagatggagtgaaaggctggaagagctctgcaggtcggtctcacgcgtgtctctctgacaagttggtgacacggatggtggcgttgtcgtcggctctgcggttgggctgcatggactccccgcggcggctggccccgtcgcgcaggctcggcggcacatacttccctgtcttgttctgcgtggcctgcaccggctctagctctcccggcagcttctccttctcgccagtagacaggcccagctgctcggccagctccttctgcatgggccccagcgtatccttgtaggggcagcgggtggtccagtggtcgcccttgcagatgcggcaggacacgatcttctggcccttgagtttgttcatagggtcctcctcctcctggcagttcaggtcctctttgctggtgatgaacgtcatagagacatcgtcactgacagtggtggtggccacattgggtccgggggggtcaaactctgagttcccgaacttcttccagttcttcctccttgcgacagcctttgaagccttccgggtctcaatcctgaaggtgcggacaatcttgaacttcttgccatcctcatctatcttgtactctgtcactgtctttatgtttccgttgatgacctccttgggaggcggcagtggagctcccggcagtagctctggctctgggctggtgtcacctgtggccagagggatccccttgaggagctcgctggtgacacatttgtcgtcctccccctcctcctccacctggtcccaactgggcttcgaatcaaagtctccagtaggcatcgcaaaaagtattctccccaa

SEQ ID NO: 381220 - DNA, 902 bp, Homo Sapiens
ctttgtacaaaaaagttggggcggcggccgtggaaagagacggcgactgctgcggtgaaggaggaggaggagccgagcgggcgctggcaccgaggcctgaccatggacgaggaatacgatgtgatcgtgctggggaccggtctcaccgaatgcatcctgtcgggcatcatgtctgtgaacgggaagaaggtgctgcacatggaccggaacccctactacgggggcgagagctcctccatcacacccctggaggagctgtataagcgttttcagttgctggaggggccccctgagtcgatgggccgaggccgagactggaatgttgacctgattcccaaattcctcatggctaacgggcagctggtaaagatgctactgtatacagaggtgactcgctacctggacttcaaggtggtggagggcagctttgtctacaaggggggcaagatctacaaagtgccgtccactgagactgaggccttggcttccaatctgatgggcatgtttgagaaacggcgcttccgcaagttcctggtgtttgtggcaaacttcgatgagaatgaccccaagacctttgagggcgttgacccccagactaccagcatgcgtgacgtctaccggaagtttgatctgggccaggatgtcatcgatttcactggccatgccctggcgctctaccgcactgatgactacctggaccagccctgccttgagaccgtcaaccgcatcaagttgtacagtgagtccctggcccggtatggcaagagcccatatttatacccgctctacggcttgggcgagctgccccagggttttgcaagattgagtgccatctatggggggacatatatgctgaacaaacctgtggatgacatcatcatggagaacggcaaggtggtggg

SEQ ID NO: 381221 - DNA, 247 bp, Homo Sapiens
tgccaactttgtacaaaaaagttggggaagatggcggacattcagactgagcgtgcctaccaaaagcagccgaccatctttcaaaacaagaagagggtcctgctgggagaaactggcaaggaaaagctcccgcggtactacaagaacatcagtctgggcttcaaaacacccaaggaggctattgatggcacctacattgacaaaaaatgccccttcactggtaatgtggccattctagggcggatcc

SEQ ID NO: 381222 - DNA, 950 bp, Homo Sapiens
ttggcggatcgcgggctcgggctgcggggctccggctgcgggcgctgggccgcgaggcgcggagcttgggagcggagcccaggccgtgccgcgcggcgccatgaagggcaaggaggagaaggagggcggcgcacggctgggcgctggcggcggaagccccgagaagagcccgagcgcgcaggagctcaaggagcagggcaatcgtctgttcgtgggccgaaagtacccggaggcggcggcctgctacggccgcgcgatcacccggaacccgctggtggccgtgtattacaccaaccgggccttgtgctacctgaagatgcagcagcacgagcaggccctggccgactgccggcgcgccctggagctggacgggcagtctgtgaaggcgcacttcttcctggggcagtgccagctggagatggagagctatgatgaggccatcgccaatctgcagcgagcttacagcctggccaaggagcagcggctgaacttcggggacgacatccccagcgctcttcgaatcgcgaagaagaagcgctggaacagcattgaggagcggcgcatccaccaggagagcgagctgcactcctacctctccaggctcattgccgcggagcgtgagagggagctggaagagtgccagcgaaaccacgagggtgatgaggacgacagccacgtccgggcccagcaggcctgcattgaggccaagcacgacaagtacatggcggacatggacgagcttttttctcaggtggatgagaagaggaagaagcgagacatccccgactacctgtgtgggcaagatcagctttgagctgatgcgggagccgtgcatcacgcccagtggcatcaacttacgaccgcaaggacatcgaggagcacctgcagcgtgtgggtccatttgaccccgtgacccggagccccctgaacaagaacagctcatccccaac

SEQ ID NO: 381223 - DNA, 1042 bp, Homo Sapiens
ttggttcacccacccctgtcctcactccagcaacagtgataactcacttccttcctccctttgtacacccttctccccacctgctcacaggtggctggggagttcaagtaccacccagagtgctttgcctgtatgagctgcaaggtgatcattgaggatggggatgcatatgcactggtgcagcatgccaccctctactgtgggaagtgccacaatgaggtggtgctggcacccatgtttgagagactctccacagagtctgttcaggagcagctgccctactctgtcacgctcatctccatgccggccaccactgaaggcaggcggggcttctccgtgcccgtggagagtgcctgctccaactacgccaccactgtgcaagtgaaagaggtcaaccggatgcacatcagtcccaacaatcgaaacgccatccaccctggggaccgcatcctggagatcaatgggacccccgtccgcacacttcgagtggaggaggtggaggatgcaattagccagacgagccagacacttcagctgttgattgaacatgaccccgtctcccaacgcctggaccagctgcggctggaggcccggctcgctcctcacatgcagaatgccggacacccccacgccctcagcaccctggacaccaaggagaatctggaggggacactgaggagacgttccctaaggcgcagtaacagtatctccaagtcccctggccccagctccccaaaggagcccctgctgttcagcccgtgacatcagccgctcagaatcccttcgttgttccagcagctattcacagcagatcttccggccctgtgacctaatccatggggaggtcctggggaagggcttctttgggcaggctatcaagctgagaactgggagggggggtcaggtgacacacaaagccacgggcaaagtgatggtcatgaaagagttaattcgatgtgatgaggagacccagaaaacttttctgactgaaggtgaaagtgatgcgccacctggaacaccccaatgtgctcaagttcattgg

SEQ ID NO: 381224 - DNA, 833 bp, Homo Sapiens
tttgtacaaaaaagttggggtgaacaggacccgtcgccatgggccgtgtgatccgtggacagaggaagggcgccgggtctgtgttccgcgcgcacgtgaagcaccgtaaaggcgctgcgcgcctgcgcgccgtggatttcgctgagcggcacggctacatcaagggcatcgtcaaggacatcatccacgacccgggccgcggcgcgcccctcgccaaggtggtcttccgggatccgtatcggtttaagaagcggacggagctgttcattgccgccgagggcattcacacgggccagtttgtgtattgcggcaagaaggcccagctcaacattggcaatgtgctccctgtgggcaccatgcctgagggtaccatcgtgtgctgcctggaggagaagcctggagaccgtggcaagctggcccgggcatcatggaactatgccaccgttatctcccacaaccctgagaccaagaagacccgtgtgaagctgccctccggctccaagaaggttatctcctcagccaacagagctgtggttggtgtggtggctggaggtggccgaattgacaaacccatcttgatagctggccgggcgtaccacatatataaggcaaagaggaactgctggccacgagtacggggtgtggccatgaatcctgtggagcatccttttggaggtggcaaccaccagcacatcggcaagccctccaccatccgcagagatgcccctgctggccgaaagtggggtctcattgctgcccgccggactggacgtctccggggaactaaaactgtgcaagagaaagagaactaaagctgacgggcctcaattaaa

SEQ ID NO: 381225 - DNA, 909 bp, Homo Sapiens
ttggtgaactgtcgttgcagagattgcgggcggctgagacgccgcctgcctggcacctaggagcgcagcggagccccgacaccgccgccgccgccatggagtccgagaccgaacccgagcccgtcacgctcctggtgaagagccccaaccagcgccaccgcgacttggagctgagtggcgaccgcggctggagtgtgggccacctcaaggcccacctgagccgcgtctaccccgagcgtccgcgtccagaggaccagaggttaatttattctgggaagctgttgttggatcaccaatgtctcagggacttgcttccaaagcaggaaaaacggcatgttttgcatctggtgtgcaatgtgaagagtccttcaaaaatgccagaaatcaacgccaaggtggctgaatccacagaggagcctgctggttctaatcggggacagtatcctgaggattcctcaagtgatggtttaaggcaaagggaagttcttcggaacctttcttcccctggatgggaaaacatctcaaggcctgaagctgcccagcaggcattccaaggcctgggtcctggtttctccggttacacaccctatgggtggcttcagctttcctggttccagcagatatatgcacgacagtactacatgcaatatttagcagccactgctgcatcaggggcttttgttccaccaccaagtgcacaagagatacctgtggtctctgcacctgctccagcccctattcacaaccagtttccagctgaaaaccagcctgccaatcagaatgctgctcctcaagtggttgttaatcctggagccaatcaaaatttgcggatgaatgcacaacgtggccctattgtggaggagatgatgaaataaatcgagattggttggattggacctattcagcagc

SEQ ID NO: 381226 - DNA, 1293 bp, Homo Sapiens
  misc_feature (200)..(209): n is a, c, g, or t
ccgccgaggttagcactttcatcaccaaagaccccgtgcctctcgtggtcctttgagggatcccgccgccaccacccttgtattttatcacgtgctcttcagggcatgtggaattcgttgagtttgcttttagagccaagtttctttccctgtgtgggtttttgaggaaaacctgaggtcccctaatctgtggccaccannnnnnnnnngccgccacgccttagagcagagcagcccctcctctcatttggtgcagaaacagtcaagaggaaccattggcctagagctcctgtgaccgagagcgccacggaagcctggggatgatgtcgggcagctttattctttgcttggctttggtaactaggtggtcccctcaagcatcctcagttcctcttgctgtttatgaatctaagacaaggaagtcctatagaagccaaggggacagggacggaaaggacaggtcccaagggatggggctgtctttacttgtggaaaccaggaaattgctcctctcagccaaccaaggttgaccacacaccacccttccggagcagctcagtcagccctcggggacgagaaaccacaagcgcagagacgctgaggcccaggcaggtgaagaggaagtggctttgggtttttaaagtaggtgagcgtgagcctctctgactgcttcttccccgggggggactgcaaaccgctcagggttgcggcagagccatggacttccggtccctgcaacgggtgacctaagcgtggtgcacccatcagtcacgcaggaggactgacttgacagacgaaagacaagcccggatgacacagggtgagaagagtcagggccgcacctctgtccctgcaaaccaacaggtgcatggtgagtgtggcagtccccacagctccacaatgggctcccccgccaacggggacgacagggatcttcaggaacttctgacctcaccaagtcaagtggaccactctccactccacgaggatgtgaaacggttctttaaaatgggattttagagcctcgggaatgcatgtgcgtcgcatctttcatattatgggtcaggatagattcatttcttgcaacatagtggaaaagatataagctgcagtaatttgctctttgaatgaccgtcacccccagtataggatatgcttgtatccccccgtcactcctccgcctgttttttaaacttttccaccacctgcgtccaaaaagaatgttatagcgagtgctcttaaatgttgaacctgggtgttgcttcccgggccagtctgcgtggctccatgaaa

SEQ ID NO: 381227 - DNA, 1400 bp, Homo Sapiens
aggagggggcttgggagtgacttgaggctgtgatcgcgtcgccctcggtgtgggcaagtgagtcctttgtggccaagaggtcagagtcgtccctgaggttgagtcgaacacagacccgtggccctcataaaattaaacataaaagcacaaaaatggcgcaaccagacagcattggcttcagacaggcaggacacggggcccctcgtgtgacctgtgactttccacaaagggcaaggacctggcactgactccggccagtggagaaggctgtgccgcccacccggccatgactcagacccagaggctgaaagccacagacggggccgcagggcagcagctcccgggctctcgtgaaacacttcagaaggaaaaaatcctaaggaacagaatcctgaatggagaaaacccaacttttttaaaaaagaaggaagtgtatgatgggaatctacggggtgggttttctttaagaggtgagaacttggaatcttgcaagcactgggagtggactccggcggcggcgcagacgcggagcagggagcgtcctcgggccacctgcctcaggaagagttcctctggcggacgttcttgcctttgtcattctggtgctgcccgctgctcttcaggggtgcagagccggcgtcgtcatcatccaggacgtcctcgggcttccggcgcttctcgtagatgaagatgatggtgaccagcaccagcacctcagccacgatgcccaggaagggccagagggcggccaggtggctgcgcacgcggagcgtgatgatggcctggtcggagcccttggagctggtgccgttgcaccggtactggccggggtcggcctccatgttcaggttctcaatgtgtagctctgaccggccctgcgaggaactcacgaagaacctgctctcggagccgttcatgagggccttgtcctcagagtcagtgatcttgtaccaggcccagtcagtgacaggtggcacggactctgacttgcagaccagcatggccgtctccccctcgttgatgtgttctgacgacttcacagccttcactctgggaggcccgtggagctggatgttggccgtgcccatgggctcggggaggaagacgcaggagtactctccccactggtcgtcggagtccaccttgaactccgttttctggccgggcagcgcgtcctccttcagcaccacgccccccttcagccagcggtgccctgtgacctctgtggcgctgtcattcaaggagcaggtgaggagtatcttggagccaaggtcttctacggtagtgaagactgtgccggcagccccggaggctccgtgggcccccagcagcgcgaatcccagcagcacgaacagcgcagccgccatgattcctattcctcgccggtcctacaaccccaa

SEQ ID NO: 381228 - DNA, 893 bp, Homo Sapiens
ccttataaaagccaactttgtacaaaaaagttggggctgccccaccaagtctaggtaagagtttgttcccgtggtgcggagggtcaaggcccacacccggaaacctagcgaggtaaagttgcgtcttggttgtagagacgacaacttctccgcttcctcggcgatggcggcgtccgggagcggtatggcccagaaaacctgggaactggccaacaacatgcaggaagctcagagtatcgatgaaatctacaaatacgacaagaaacagcagcaagaaatcctggcggcgaagccctggactaaggatcaccattactttaagtactgcaaaatctcagcattggctctgctgaagatggtgatgcatgccagatcgggaggcaacttggaagtgatgggtctgatgctaggaaaggtggatggtgaaaccatgatcattatggacagttttgctttgcctgtggagggcactgaaacccgagtaaatgctcaggctgctgcatatgaatacatggctgcatacatagaaaatgcaaaacaggttggccgccttgaaaatgcaatcgggtggtatcatagccaccctggctatggctgctggctttctgggattgatgttagtactcagatgctcaatcagcagttccaggaaccatttgtagcagtggtgattgatccaacaagaacaatatccgcacggaaaagtgaatcttggcgcctttaggacatacccaaagggctacaaacctcctgatgaaggaccttctgagtaccagactattccacttaataaaatagaagattttggtgtacactgcaaacaatattatgccttagaagtctcatattttcaaatcctctttggatcgcaattgcttgagctgttgtgggaa

SEQ ID NO: 381229 - DNA, 879 bp, Homo Sapiens
gggggggcttcacgtggatgaagtggatgtccagcctttcaatcttagtctggaagtgagggtatctgttgagaatctccacttgcttcttcccagtcaaattcattccgccagtagggagatgactttcttcaggtagttggagttgaagccatagtggaagcagctgtcctccaaaggtggggtgaaacggaacttatcgatcctctggtgtaagtcgtggatctcctcatctgacgtttccaccttgaaagggcggatgctgtcgtcctccctggctgcggacctcgtgcctggcccccaccacccatcttcaagtggcaaagtttcctctttgtcccgggagatgaaccagtagatggcaaagcccagcactgaagtgaggaggatttctagccacatggctcacaaagactgtttggtggtctcttcacacggacgcgcatgaaaatcagtgttccgacttgggtgacaaattaagtgcatttcaccgccgagcgagccacggccctggaagcagagctcgcccaggccaggggacgcggtgcgctctcggggtcgcgagcctccctccctgcggcgtccgcccacagtctgggacgcggaattccctgcgagaagtccgcggtcgcctgcaggctccttcccccagtaggcggcacgcgcagtctcctggccggggcaggagctgggggcggaccaactacaagtccctctgcacccctgcgggccgaccgcagccccgacccctcggcgccccggcccgccgcccaccccggcggccgagcccgcgcggagcccgaaccgcgtctgcgtccggggagtgcgggcccggccggccccgggcgcttacggtctcggctcgcaggctccggccaa

SEQ ID NO: 381230 - DNA, 889 bp, Homo Sapiens
ttctcactttctaggtccacatcagcaatgaaagccccaggccaggctgagcacagagaagaggcgcagccccgaagccgtgtgcagagacagcaggttcatgggtgacagcagccggcggcacagcaatagcgtgcagttggtcaggaggtcttcattggtgacgtgctcatagccagcataatggttcaaggaagctgccagcgcgttgccagagctgctgggaggctacacaggggcttctggatggcggtctcccagtcaggccgctccatgagcccgttcaccacctcgtgcatcagcccgtctccagacatgaccaccagagcgtcccagcggcccagctcctccgaccgcaccagctcccgcgcgtggttccgccgctcagtgagcatcagcgtgaaggagatttcagcctcagccaaaaggggctgcacgtgactccggaagagctgcaaggccttgcccttgccgccgcgcgggttcagcagcaccagcacgcggcagggccgcgggagcacgccccgggggccgcccgctggatccataacctcgacccgcggctcccgctgccagggggtccctggcgctgtgggggcgctgcccgtggcggcggctcctgccttcagctccttatcggtgctgcccaggcgggcgtcgcagggccggctgtggggctcgccttccccgcccggagccgtggctgtaggagcaccggcgtcattccctgcggcggctggacccagtcggtccggtttgctggggaggcgccaccgccgttccctacagtggcctggggcggaacgcagctcgtcccaagctcagcccacgtctgagggactggagcgccccgctggagcggattccccaccaacttttttgtacaaag

SEQ ID NO: 381231 - DNA, 881 bp, Homo Sapiens
ttggggccgccgtcgcctgagggaagcgagaagagggcgcgaccggagagaaaaagcggagtcgccaccggagagaagtcgactccctagcagcagccgccgccagagaggcccgcccaccagttcgcccgtccccctgccccgttcacaatgcagcctgcttctgcaaagtggtacgatcgaagggactatgtcttcattgaattttgtgttgaagacagtaaggatgttaatgtaaattttgaaaaatccaaacttacattcagttgtctcggaggaagtgataattttaagcatttaaatgaaattgatctttttcactgtattgatccaaatgattccaagcataaaagaacggacagatcaattttatgttgtttacgaaaaggagaatctggccagtcatggccaaggttaacaaaagaaagggcaaagcttaattggcttagtgtcgacttcaataattggaaagactgggaagatgattcagatgaagacatgtctaattttgatcgtttctctgagatgatgaacaacatgggtggtgatgaggatgtagatttaccagaagtagatggagcagatgatgattcacaagacagtgatgatgaaaaaatgccagatctggagtaaggaatattgtcatcacctggattttgagaaagaaaaataacttctctgcaagatttcataattgagagaattcctgagttgatagctctaaaggcagatatgctgtatttgcctactttaacccatttttcaacctgtttgttttttaaaaggcttcactaagggttgatatgtaccattgtatggggcaattttaagtcagctaaggcaataaccttatgcatgaacatttcccagactttcatgaa

SEQ ID NO: 381232 - DNA, 462 bp, Homo Sapiens
aactttgtacaaaaaagttggcttttgcacactcatctcattccatgcactcttgggctgtaactgtcatttcttttcctgacacgcttattttttattcctgttgacaagcagctcttgcggccattctcattcggattctcttacctccttaagctctttctcttcctggtgagagaagaccctatgcacactggcttcctgctcaccatgcttccacactcgagcctctccctgcctccagccctcacccttcctcacatcctccctcttctgtctttcctgggccatctgtccatcccttttgcacgaagattgccctctcctaacctttttactccaagaagctccctctccctccagcatggctgttccttcccccacgcttcctctctccgcttattccctctctccgcttattcccggggcttgggaatgttaagccacccctccccctgaaaa

SEQ ID NO: 381233 - DNA, 856 bp, Homo Sapiens
  misc_feature (50)..(69): n is a, c, g, or t
tttgtacaaaaaagttggcggccgcacacctttgtacaagaaagttgggnnnnnnnnnnnnnnnnnnnnatatatatatcatatttattttccaagtttctgatatcttaaactgttgaaaatacataaagttattcaaagacacttttttttggtttattcctcttcagctctataagctgtaactctctatatttacaatttttctctcatttttatccaactgagtgtattggcttcttgctttacaaagtaaaaatgtaccttgagtgcaacaagtttatctttattccacactgttgggttttttaaaggttctttatttttccattttaaaaacttcaaaatacacatgtaaaattttagtatttaaaatattagaaactccttacctgttaatgtgttttaataaccagtttgccttttctgaacatattacattcctgctgtacctattttgtagcaagtatgcctatcttatttgcatatttgtaacaaagtatgcaaaaagataaagatatgtgacctatttatattcaaaactgactagaaaactctacaaatcacaggaattctgtaacagatatgcatttacaactttctctaataaagatttttaaaaattgttttttaatgtgcttttaatgattgctagccctcacacctccttacttgctttccaaactgtttatactgtccccaataacactcagtggaaagctgtcattcctggctaaatcctttacttagggtggatgctatgcctccgtgagacagggtcagggggtcaaaatcgaatttgggaggccacctggagagtccagggctatgacttgactcgaaaatttatatcaaa

SEQ ID NO: 381234 - DNA, 906 bp, Homo Sapiens
ttgggctggatcaagctgtgaacgtgatttgctggaagctggtcattagtgttgacgatgtgtcacactgtgtaagggaatcgcatggagatgggcattccgaactgttaatggggacatgggactccagttgtctctgatcacttgtgtggattttcctggcgtagaacgacagaagccgctagtaagtcgccaagacctacagcaggaattctgcaccaaagggcataaaatcttgttattttaatttgcatctgggagaatgtctgagcaaggagacctgaatcaggcaatagcagaggaaggagggactgagcaggagacggccactccagagaacggcattgttaaatcagaaagtctggatgaagaggagaaactggaactgcagaggcggctggaggctcagaatcaagaaagaagaaaatccaagtcaggagcaggaaaaggtaaactgactcgcagtcttgctgtctgtgaggaatcttctgccagaccaggaggtgaaagtcttcaggatcagactctctgaaaactgcaaatggaaaggaattcaaaagaatttagattaaaagttaaataaaaagtaggcacagtagtgctgaattttcctcaaaggctctcttttgataaggctgaaccaaatataatcccaagtatcctctctccttccttgttggagatgtcttacctctcagctccccaaaatgcacttgcctataagaaacacaattgctggttcatatgaaacttagaaatagtgaataaagtgcatttaactttggagaaatacttttatggctttggtggagatttctcaatactgcaaaagttgtccagaaatgaatctgagctgatggtgactttaagttaatattattaatatatcactgcatatttttaccc

SEQ ID NO: 381235 - DNA, 906 bp, Homo Sapiens
ttggggcgcgcacagtgctcgctgggccgcggctcccgggtgtcccaggcccggccggtgcgcagagcatggcgggtgcgggcccgaagcggcgcgcgctagcggcgccggcggccgaggagaaggaagaggcgcgggagaagatgctggccgccaagagcgcggacggctcggcgccggcaggcgagggcgagggcgtgaccctgcagcggaacatcacgctgctcaacggcgtggccatcatcgtggggaccattatcggctcgggcatcttcgtgacgcccacgggcgtgctcaaggaggcaggctcgccggggctggcgctggtggtgtgggccgcgtgcggcgtcttctccatcgtgggcgcgctctgctacgcggagctcggcaccaccatctccaaatcgggcggcgactacgcctacatgctggaggtctacggctcgctgcccgccttcctcaagctctggatcgagctgctcatcatccggccttcatcgcagtacatcgtggccctggtcttcgccacctacctgctcaagccgctcttccccacctgcccggtgcccgaggaggcagccaagctcgtggcctgcctctgcgtgctgctgctcacggccgtgaactgctacagcgtgaaggccgccacccgggtccaggatgcctttgccgccgccaagctcctggccctggccctgatcatcctgctgggcttcgtccagatcgggaagggtgatgtgtccaatctagatcccaacttctcatttgaagcaccaaactggatgtggggaacattgtgctggcattatacagcggcctctttgcctatggaggatggaattacttgaatttcgtcacagaggaaatgatcaacccctacagaaacctgcccctggccatcatcat

SEQ ID NO: 381236 - DNA, 894 bp, Homo Sapiens
ctttgtacaaaaaagttgggttctgagtcccagggtccaggtaggggttgagccaccatctgaccgcaagctgcgtcgtgtcgccggttctgcaggcaccatgagccaggacaccgaggtggatatgaaggaggtggagctgaatgagttagagcccgagaagcagccgatgaacgcggcgtctggggcggccatgtccctggcgggagccgagaagaatggtctggtgaagatcaaggtggcggaagacgaggcggaggcggcagccgcggctaagttcacgggcctgtccaaggaggagctgctgaaggtggcaggcagccccggctgggtacgcacccgctgggcactgctgctgctcttctggctcggctggctcggcatgcttgctggtgccgtggtcataatcgtgcgagcgccgcgttgtcgcgagctaccggcgcagaagtggtggcacacgggcgccctctaccgcatcggcgaccttcaggccttccagggccacggcgcgggcaacctggcgggtctgaaggggcgtctcgattacctgagctctctgaaggtgaagggccttgtgctgggtccaattcacaagaaccagaaggatgatgtcgctcagactgacttgctgcagatcgaccccaattttggctccaaggaagattttgacagtctcttgcaatcggctaaaaaaaagagcatccgtgtcattctggaccttactcccaactaccggggtgagaactcgtggttctccactcacgttgacactgtggccaccaaggtgaaggatgctctggagttttggctgcaagctggcgtggatgggttccaggttcgggacatagagaatctgaagatgcatcctcattcttggctgagtggcaaaatatc

SEQ ID NO: 381237 - DNA, 765 bp, Homo Sapiens
ttgtacaaaaaagttggggccttgtgcgcgctactgtggctacctggccaacatgggggggctcgcggctggagctgatgccgcatacattttcgaagagcccttcgacatcagggatctgcagtccaacgtggagcacctgacggagaaaatgaagaccaccatccagagaggccttgtgctcagaaatgagagctgcagtgaaaactacaccaccgacttcatttaccagctgtattcagaagagggcaaaggcgtgtttgactgcaggaagaacgtgctgggtcacatgcagcagggtggggcaccctctccatttgacagaaactttggaaccaaaatctctgccagagctatggagtggatcactgcaaaactcaaggaggcccggggcagaggaaaaaaatttaccaccgatgattccatttgtgtgctgggaataagcaaaagaaacgttatttttcaacctgtggcagagctgaagaagcaaacggattttgagcacaggattcccaaagaacagtggtggctcaagctacggcccctcatgaaatcctggccaagtacaagggccagctatgacgtgtcggactcaggccagctggaacatgtgcagccctggagtgtctgacccagtcccgcctgcatgtgcctgccgccaccgtggactgtctcttttttgtaacactttaagttattttatcagccactttatgcacgtattaattgacatttaatacctaaatcggcgagtgcccatctgcc

SEQ ID NO: 381238 - DNA, 830 bp, Homo Sapiens
cctttcgtggatccacaggaaatcctagcctaacagtttcttctcccgttccagagagaacaggctgtgtaccatttccccgggcttcacttctgtagaatttagaccattcctagaatcagcagatctgactgtgttgtttattttacgactaggaatacctggtgggggcaagtaaccatgaaaaaggacactgccacaagaggaacgctccaattcttcacataagagaagccttcttactaaaaacatttcaaagcaaacttgtcaagagtacatgcaaacagaaaaacagtactccatttttattttctctaatggagtgatcccgtaaaattctgcttcatgcctgagaacattaatactcactccccttaagtctagttcttttgtccgaagaaaatttaaaatgggtgcaaatgctgctggatctctatcaataaatatagcaccagtttcatctcgaagtgttgaaattctcccactcagcaaactggaaaaaaaagaatctggaatccacataagagtttgtcttgaggtactaaatctggtcccccctacgttcagttggacgatctcgccgctgccggccgccgccgcggggacgctgccgcagtgccctcccgccatctccggcggctccggacgcgctcgccgccctccttccccagccgggaccgccgagcccggggctgtagcccgaggcagcggcgacggctgcagggccagcggggcggcggcggccggagggcggggggtgcacggggcttcccccaccttcccggcggccgggcggggctcgctagcttctgccccttcccgggtcccaa

SEQ ID NO: 381239 - DNA, 898 bp, Homo Sapiens
ttgggaacgctgctttccaagatggcgacggagggaggagggaaggagatgaacgagattaagacccaattcaccacccgggaaggctgctgacttgagtaaaccaatagataaaaggatatacaaaggaacacagcctacttgtcatgacttcaaccacctaacagccacagcagaaagtgtctctctcctagtgggcttttccgcaggccaagtccagcttatagacccaatcaaaaaagaaactagcaaactttttaatgaggaaagactaatagacaagtcacgagttacctgtgtcaaatgggttcccggttcggaaagccttttcctagtagcccactcgagtgggaacatgtacttatataatgtggagcacacttgtggcaccacagccccccactaccagcttctgaagcagggagagagctttgccgtgcacacttgcaagagcaaatccacgaggaaccctctccttaagtggacggtgggcgagggggccctcaacgagtttgctttctccccagatggcaagttcttagcgtgcgtgagccaggacgggtttctgcgggtgttcaactttgactcagtggagctgcacggtacgatgaaaagctactttgggggcttgctgtgtgtgtgctggagcccggatggcaagtacatcgtgacaggtggggaggacgacttggtgacagtctggtcctttgtagactgccgagtaatagccagaggccacgggcacaagtcctgggtcagtgttgtagcgtttgacccttataccactagtgtagaagaagtgaccctatggagtttagtggcagcgatgaggacttccaagaccttcttcattttgggcagagatcgagcaaatagtacacagtccaggctctccaaa

SEQ ID NO: 381240 - DNA, 876 bp, Homo Sapiens
ttggcggagcggccatgtcccacggccccaagcagcccggcgcggccgccgcgccggcgggcggcaaggctccgggccagcatgggggcttcgtggtgactgtcaagcaagagcgcggcgagggtccacgcgcgggcgagaaggggtcccacgaggaggagccggtgaagaaacgcggctggcccaagggcaagaagcggaagaagattctgccgaatgggcccaaggcaccggtcacgggctacgtgcgcttcctgaacgagcggcgcgagcagatccgcacgcgccacccggatctgccctttcccgagatcaccaagatgctgggcgccgagtggagcaagctgcagccaacggaaaagcagcggtacctggatgaggccgagagagagaagcagcagtacatgaaggagctgcgggcgtaccagcagtctgaagcctataagatgtgcacggagaagatccaggagaagaagatcaagaaagaagactcgagctctgggctcatgaacactctcctgaatggacacaagggtggggactgcgatggcttctccaccttcgatgttcccatcttcactgaagagttcttggaccaaaacaaagcgcgtgaggcggagcttcggcgcttgcggaagatgaatgtggccttcgaggagcagaacgcggtactgcagaggcacacgcagagcatgagcagcgcgcgcgagcgtctggagcagagctggcgctggagagcggaggacgctggcgctgcagcagcagctccaggccgtgcgccaggcgctcaccgccagcttcgcctcactgccggtgcccgggcacgggcgaaacgcccacgctgggcactctgggacttctacatggcccggcttc

SEQ ID NO: 381241 - DNA, 931 bp, Homo Sapiens
actttgtacaaaaaagttggggcgcgactcgcttctttcggttctacctgggagaatccaccgccatccgccaccatggtgaacttcacggtagaccagatccgcgccatcatggacaagaaggccaacatccgcaacatgtctgtcatcgcccacgtggaccatggcaagtccacgctgacagactccctggtgtgcaaggcgggcatcatcgcctcggcccgggccggggagacacgcttcactgatacccggaaggacgagcaggagcgttgcatcaccatcaagtcaactgccatctccctcttctacgagctctcggagaatgacttgaacttcatcaagcagagcaaggacggtgccggcttcctcatcaacctcattgactcccccgggcacgtcgacttctcctcggaggtgactgctgccctccgagtcaccgatggcgcattggtggtggtggactgcgtgtcaggcgtgtgcgtgcagacggagacagtgctgcggcaggccattgccgagcgtatcaagcctgtgctgatgatgaacaagatggaccgcgccctgctggagctgcagctggagcccgaggagctctaccagactttccagcgcatcgtggagaacgtgaacgtcatcatctccacctacggcgagggcgagagcggccccatgggcaacatcatgatcgatcctgtcctcggtaccgtgggctttgggtctggcctccacgggtgggccttcaccctgaagcagtttgccgagatgtatgtggccaagttcgccgccaaggggagggccagttggggcctgccgagcgggccaagaaagtagaggacatgatgaagaagctgtggggtgacaggtactttgacccagcccacggcagttcagcaagtcagccaccagcctcgaaaggaggagctgccac

SEQ ID NO: 381242 - DNA, 928 bp, Homo Sapiens
ctttgtacaaaaaagttgggagagcgagctgagtggttgtgtggtcgcgtctcggaaaccggtagcgcttgcagcatggctgaccaactgactgaagagcagattgcagaattcaaagaagctttttcactatttgacaaagatggtgatggaactataacaacaaaggaattgggaactgtaatgagatctcttgggcagaatcccacagaagcagagttacaggacatgattaatgaagtagatgctgatggtaatggcacaattgacttccctgaatttctgacaatgatggcaagaaaaatgaaagacacagacagtgaagaagaaattagagaagcattccgtgtgtttgataaggatggcaatggctatattagtgctgcagaacttcgccatgtgatgacaaaccttggagagaagttaacagatgaagaagttgatgaaatgatcagggaagcagatattgatggtgatggtcaagtaaactatgaagagtttgtacaaatgatgacagcaaagtgaagaccttgtacagaatgtgttaaatttcttgtacaaaattgtttatttgccttttctttgtttgtaacttatctgtaaaaggtttctccctactgtcaaaaaaatatgcatgtatagtaattaggacttcattcctccatgttttcttcccttatcttactgtcattgtcctaaaaccttattttagaaaattgatcaagtaacatgttgcatgtggcttactctggatatatctaagcccttctgcacatctaaacttagatggagttggtcaaatgagggaacatctgggttatgccttttttaaagtagttttctttaggactgtcagcatgttgttgttgaagtgtggagttgtaactctgcgtggactatggacagtcacaatatgtacttaaaagtt

SEQ ID NO: 381243 - DNA, 889 bp, Homo Sapiens
ttgtacaaaaaagttgggggttgcggccggcggaacggtgtctccttcacttcgccctccagctgctgcagctgcagcccgaccgcgagcgtgccaagcggcttcagcagctagcggagcggtggcggcggcccccctcaggacaccaccagattcccctcttcccgcggcctcgccatggcgacccacggacagacttgcgcgcgtccaatgtgtattcctccatcatatgctgaccttggcaaagctgccagagatattttcaacaaaggatttggttttgggttggtgaaactggatgtgaaaacaaagtcttgcagtggcgtggaattttcaacgtccggttcatctaatacagacactggtaaagttactgggaccttggagaccaaatacaagtggtgtgagtatggtctgactttcacagaaaagtggaacactgataacactctgggaacagaaatcgcaattgaagaccagatttgtcaaggtttgaaactgacatttgatactaccttctcaccaaacacaggaaagaaaagtggtaaaatcaagtcttcttacaagagggagtgtataaaccttggttgtgatgttgactttgattttgctggacctgcaatccatggttcagctgtctttggttatgagggctggcttgctggctaccagatgacctttgacagtgccaaatcaaagctgacaaggaataactttgcagtgggctacaggactgggggacttccagctacacactaatgtcaatgatgggacagaatttggaggatcaatttatcagaaagtttgtgaagatcttgacacttcagtaaacctttgcttgggacatcaggtaccaactgcactcgttttgggcattggcagctaaata

SEQ ID NO: 381244 - DNA, 489 bp, Homo Sapiens
aaagttgggagagctgcgacttagcgagagctgcgaagggccaggtgtcgggcgctgtttctcgttttcatcatatagacaaaacagccctgctgcaaagatggtcaacgtacctaaaacccgaagaaccttctgtaagaagtgtggcaagcatcagcctcacaaagtgacacagtataagaagggcaaggattctttgtatgcccagggaaggaggcgctatgatcggaagcagagtggctatggtgggcagacaaagccaattttccggaagaaggctaaaaccacatagaagattgtgctaaggctggaatgtgttgagccttactgcagatcccagacgatgctgggcattaagagatgcccgcacctcgcactgggaggagataataagagaaagggccaagtgatccagttctaaactttgggatatttttcttccattttgaagaagaaatggtgaagccatagaaaaagttacccgaggga

SEQ ID NO: 381245 - DNA, 845 bp, Homo Sapiens
ctttgtacaaaaaagttgggtgtatgcaccccccccgtttgtcccatggatatcctggggtgtgagtcggatgggaccacggccctgtttatatttgggtctttatgttggtgctgccaggtctctgagctccagaggtggcctcttggacagatctactgctataggaataaaagacactctgtctcgcaaatggctgcttgtcaacaagcccaaagatgcttgtcggaggacggttatggaagcccttaattcttggttgtgggaaaaggtggaatgacaagttattgattgtttttctgtcgctatttctttcatttgtctagtgaatcagaaaggcttagccaaggccacatctgggaagagtggagaaatttgccacttgacgatcacggattagctagcacctttaagccctgcatttctccaactgacaagtgggtgggggtgatggcacattcagtgtggctatgaagagcgaatcctctctattgtttaaatagattactgtagtttggccaggaatttggcgtcagtggtaacacacttagttaataaaataagccaggcttgcaactaagtatctaactttacaggcccactcacatttgaggcaaggggctattgagtatgtggagagatgtagtgatttaaattcagattatttaagttggatcagctgaagtgtgttttagacccaaaccatctggccccttccttttgctcagaggaagtaaatgttcacttaatgaaattgaaaacgccatgtggcaccacaaaagacctctctgtactttccccatgctgcctcaaaaatttctgtgagttttcggggtcattgtccc

SEQ ID NO: 381246 - DNA, 698 bp, Homo Sapiens
tgtacaaaaaagttggagcagagtagggacaggctggttagcccagactcccgcctctgaggagaggaaccagctctccttgggaagagggcctctgccctggccggccctgactcccaggggacttcgaccccttgcttcatccctttatgtttctatctcctcagtgcaaaagggcagcgtgcttcctctctgctggttccgtgggatcggagccaggccccagtgtgcaatgtctttgcacacagataatagcgtgcgtgacagaggactctgtgcttagctgtcacctgctgccttcctgctgcccggtccccggcagaacccgcatgcctccctccctctctggaccctggcagtctctgcgccctggctccgagggaaggggcagggggcccgctggtcggcgagggctgggagcccccgacaccttggctccaagggaaggggcaggggtccgctggtcggcgagggccgggggccccctggtgtcgggcctgggaacagccgggctaggccctcctgggtgtgttggcccaaggctctggccctgactcctccccggctgcctcctcccaacaggccggcctcggccgcgctggcgactcggcggtgctggtgctgccgccttccccgggccctcgttcctccaggcccaggtaccagcaggccccggagggtcgggttggggtcttgga

SEQ ID NO: 381247 - DNA, 923 bp, Homo Sapiens
ttgggacagtaacccctgccaccatggtgggagctgcctggaccagcccaatggttataactgccactgcccgcatggttgggtgggagcaaactgtgagatccacctccaatggaagtccgggcacatggcggagagcctcaccaacatgccacggcactccctctacatcatcattggagccctctgcgtggccttcatccttatgctgatcatcctgatcgtggggatttgccgcatcagccgcattgaataccagggttcttccaggccagcctatgaggagttctacaactgccgcagcatcgacagcgagttcagcaatgccattgcatccatccggcatgccaggtttggaaagaaatcccggcctgcaatgtatgatgtgagccccatcgcctatgaagattacagtcctgatgacaaacccttggtcacactgattaaaactaaagatttgtaatctttttttggattatttttcaaaaagatgagatactacactcatttaaatatttttaagaaaataaaaagcttaagaaatttaaaatgctagctgctcaagagttttcagtagaatatttaagaactaattttctgcagcttttagtttggaaaaaatattttaaaaacaaaatttgtgaaacctatagacgatgttttaatgtaccttcagctctctaaactgtgtgcttctactagtgtgtgctcttttcactgtagacactatcacgagacccagattaatttctgtggttgttacagaataaagtctaatcaaggagaagtttctgtttgacgtttgagtgccggctttctgagtagagtttaggaaaaccacgtaacgtagccatatgatgtataatagagtatacccgttacttaaaaagaagtctgaaatgttcgttttgtggaaaaagaaa

SEQ ID NO: 381248 - DNA, 1455 bp, Homo Sapiens
ttggagcggcgcaggcggccgagcgggactggctgggtcggctgggctgctggtgcgaggagccgcggggctgtgctcggcggccaaggggacagcgcgtgggtggccgaggatgctgcggggcggtagctccggcgcccctagctggtgactgctgcgccgtgcctcacacagccgaggcgggctcggcgcacagtcgctgctccgcgcgcgcgcccggcggcgctccaggtgctgacagcgcgagagagcgcggccctcaggagcaaggcgaatgtatgacaacatgtccacaatggtgtacataaaggaagacaagttggagaagcttacacaggatgaaattatttctaagacaaagcaagtaattcaggggctggaagctttgaagaatgagcacaattccattttacaaagtttgctggagacactgaagtgtttgaagaaagatgatgaaagtaatttggtggaggagaaatcaaacatgatccggaagtcactggagatgttggagctcggcctgagtgaggcacaggttatgatggctttgtcaaatcacctgaatgctgtggagtccgagaagcagaaactgcgtgcgcaggttcgtcgtctgtgccaggagaatcagtggctacgggatgaactggccaacacgcagcagaaactgcagaagagtgagcagtctgtggctcaactggaggaggagaagaagcatctggagtttatgaatcagctaaaaaaatatgatgacgacatttccccatccgaggacaaagacactgattctaccaaagagcctctggatgaccttttccccaatgatgaagacgacccagggcaaggaatccagcagcagcacagcagtgcagccgcggctgcccagcagggcggctacgagatccccgcgcggctgcggacgctccacaacctggtgatccagtacgcctcgcaggggcgctacgaggtagctgtgcccctctgcaagcaggccctggaggacctggagaagacttcaggacacgaccacccggacgtggccaccatgctcaacatcctggccttggtgtacagggatcagaataaatacaaagatgcagctaacctactgaatgatgccttggctattcgtgagaaaactttgggcaaagatcatcctgcggtggcggcgactttgaataaccttgcagtcctttatggtaaaagagggaagtacaaagaagcagagccgttgtgtaaaagagctctggaaatccgagaaaaggttttggggaaggatcaccccgatgttgcaagcagttaaataacttggccttactgtgccagaaccagggcaagtatgaagaagtagaatattattatcaaagagccctcgagatctacccagacaaaactgggacctgatgaccccacgttggctaagacgaaaaataacctgggcatcctgctatttgaaac

SEQ ID NO: 381249 - DNA, 614 bp, Homo Sapiens
tgtacaaaaaagttggcccttgacctcctctgagaaacggatgttaacctttaaccccaataaacggatcacagtggaggaagcgctggctcacccctacctggagcagtactatgacccgacggatgagccagtggccgaggagcccttcaccttcgccatggagctggatgacctacctaaggagcggctgaaggagctcatcttccaggagacagcacgcttccagcccggagtgctggaggccccctagcccagacagacatctctgcaccctggggcctggacctgcctcctgcctgcccctctcccgccagactgttagaaaatggacactgtgcccagcccggaccttggcagcccaggccggggtggagcatgggcctggccacctctctcctttgctgaggcctccagcttcaggcaggccaaggccttctcctccccacccgccctccccacggggcctcgggagctcaggtggccccagttcaatctcccgctgctgctgctgcgcccttaccttccccagcgtcccagtctctggcagttctggaaatggaagggttctggctgccccaacctgctgaaaggcagaggtggagggtgggggg

SEQ ID NO: 381250 - DNA, 440 bp, Homo Sapiens
gtacaaaaaagttggctctgaaggagcttataaaaaggagtagctggccaagctcagtggggagcctgggctctgagattccctcccacctgtggttctgactcttcccagtgtcctgcatgtctgcccccagcacccagggctgcctgcaagggcagctcagcatggccccagcacaactccgtagggagcctggagtatccttccatttctcagccaaatactcatcttttgagactgaaatcacactggcgggaatgaagattgtgccagccttctcttatgggcacctagccgccttcaccttcttcctctaccccttagcaggaatagggtgtcctcccttctttcaaagcactttgcttgcattttattttattcctccaagagtccttcatagagctcaatcaggaaggggatggggcaccaatccaagcccc

SEQ ID NO: 381251 - DNA, 1286 bp, Homo Sapiens
ttgtacaaaaaagttggcacaaatctaactacaaaaaacattgctccacgccctcccaccttttctttagacctcaacttcgctgcgggtgggggtttggtgtcctaaggagactcctggaagctgaatggagaggaggaagaaaatgaagaaggagtgattgaatgtcgggcaaggcactggctgagctgctgtggctccctagcctaaggggcctgctgtccctctgaggcctagtgaaaaagctgcaggaggtgcatcctccacctctaatcttggaggctattatcttacctccaagcactgagctgggttactgcccaattccatccttccctgaaggagagaagggaagtgaaaagtagagtaactccccagcatttccctctttttctcctcatcggccagcccctcctccagccccctctggtggcatgccatgccaagagcaacgtgtaaaggaacagagaatatccaatgcagtcaagtccaccctgcccagactttgccactgacttctcccacccttctgtctcccccataatagtttatttggttggtctggactcacttgtggcctttgattaaattcctaaggggcctgaagaagacatttctactgcagagggttagaggcacttgagcaaggcccccacatcccaactctgggagttgtggtgggaggaggcacttctgggggataggaccagacaagataacaggagctcacatggaagcagaagctgtgacaagtttagtagtcccaaaatgggttatatcccttccccctttacatcagaatcttgtgaaatgggaaaacaacagaaggaggggatcaaagatagctgatctcacatgcttcccaagcagggcagaggtgggagtcaaacccgggtgacaggtgggtggagagccctgtttgaggttgtggctgatccctctctggtattagtttttcccctgggagcaggaagccctaggaagaggggactgcaagggtcccccaggggatctttcctccctcccctgcatgaggcagatcaagctgccctgccaaccccctccctcagggaatgggctttgcccagaaatgcccaccacacatacccttcttctttttttctagttaactcttgtttattccttggcttgcctccctccttcctcccctctcaacttttatttctgatttctatttcctgaaatttgggaattgaagtttaactcacacatggccccaacacccagtcttggtggaaaaaaatataagtaactttatcaaaaaa

SEQ ID NO: 381252 - DNA, 322 bp, Homo Sapiens
agtctctgtaggatgtctgatctcctctggcaggaaggccattggtgggagtgtttcccctaaaaccaagagagctgaagagttgagagttgaatgaggtggggtgggaagagggggcaggacaaaagtctgagtaccaggtgggtcatttattcaaccttcaacaaatattgactgaggcactggaatatatatcatgaacaagcacaaactgttgctcatgggacatatgttctaatgcatgagcaacatgcatgttttgtatattctaataggaaagtgaccaattatatggataaaatagggccaggcacaatggcgt

SEQ ID NO: 381253 - DNA, 549 bp, Homo Sapiens
tgggaggacgaaagaagcccagccagccaggagccactcctcacacctccaagtgtggccaagtgggccctgaggccaaggacttacttgctcttcctggccatctctccctttctggaggaggcccggggcctgtgtacaccaaggctgacctcgtgctgcctgctgggacccagccctccctgccgctcccctgtgagcccagtccaccgtgggcgcccagggccagggacgggccagcgcccggctgcatcgcgaggttgggagtcacagtggctgtgggtttttttctggcacagccagagcaggggcccatgggaagggcaacggcccggggaagcctgggccggccccttccctgctcccaacgcaagtgtccaggtggcgggagcagcaccaaggacagccaagcttacccagtgggaggagcaggagcagagcatgtggcagggaggaacccctggcgaggcagggagcactgaaagtagggaagtcatcaaaataatacacgctcccaaaatggctccactgtctcatgaaatgtcaaaa

SEQ ID NO: 381254 - DNA, 869 bp, Homo Sapiens
tgtacaaaaaagttggcactgtagaccctaaaataccatcccaagattatcgggagaaagggggcagtaattacccaaatccggttggagcatgacgtgaacatccagtttcctgataaggacgatgggaaccagccccaggaccaaattaccatcacagggtacgaaaagaacacagaagctgccagggatgctatactgagaattgtgggtgaacttgagcagatggtttctgaggacgtcccgctggaccaccgcgttcacgcccgcatcattggtgcccgcggcaaagccattcgcaaaatcatggacgaattcaaggtggacattcgcttcccacagagcggagccccagaccccaactgcgtcactgtgacggggctcccagagaatgtggaggaagccatcgaccacatcctcaatctggaggaggaatacctagctgacgtggtggacagtgaggcgctgcaggtatacatgaaacccccagcacacgaagaggccaaggcaccttccagaggctttgtggtgcgggacgcaccctggaccgccagcagcagtgagaaggctcctgacatgagcagctctgaggaatttcccagctttggggctcaggtggctcccaagaccctcccttggggccccaaacgataatgatcaaaaagaacagaaccctctccagcctgctgacccaaacccaaccacacaatggtttgtctcaatctgacccagcggctggaccctccgtaaattgttgacgctcttcccccttcccgaggtcccgcaagggagcctagcgcctggctgtgtgtgcggccgctcctccaggcctgggccgtgcccgctcaggacctgctccactgtttaac

SEQ ID NO: 381255 - DNA, 639 bp, Homo Sapiens
ttggtccaggccaaataagcgccggctatgcccctgtattggattgccacacggctcacattgcatgcaagtttgctgagctgaaggaaaagattgatcgccgttctggtaaaaagctggaagatggccctaaattcttgaagtctggtgatgctgccattgttgatatggttcctggcaagcccatgtgtgttgagagcttctcagactatccacctttgggtcgctttgctgttcgtgatatgagacagacagttgcggtgggtgtcatcaaagcagtggacaagaaggctgctggagctggcaaggtcaccaagtctgcccagaaagctcagaaggctaaatgaatattatccctaatacctgccaccccactcttaatcagtggtggaagaacggtctcagaactgtttgtttcaattggccatttaagtttagtagtaaaagactggttaatgataacaatgcatcgtaaaaccttcagaaggaaaggagaatgttttgtggaccactttggttttcttttttgcgtgtggcagttttaagttattagtttttaaaatcagtactttttaatggaaacaacttgaccaaaaatttgtcacagaattttgagacccattaaaaaagttaaatgag

SEQ ID NO: 381256 - DNA, 829 bp, Homo Sapiens
tttgtacaaaaaagttgggctgcggagggtgcgtgcgggccgcggcagccgaacaaaggagcaggggcgccgccgcagggacccgccacccacctcccggggccgcgcagcggcctctcgtctactgccaccatgaccgccaacggcacagccgaggcggtgcagatccagttcggcctcatcaactgcggcaacaagtacctgacggccgaggcgttcgggttcaaggtgaacgcgtccgccagcagcctgaagaagaagcagatctggacgctggagcagccccctgacgaggcgggcagcgcggccgtgtgcctgcgcagccacctgggccgctacctggcggcggacaaggacggcaacgtgacctgcgagcgcgaggtgcccggtcccgactgccgtttcctcatcgtggcgcacgacgacggtcgctggtcgctgcagtccgaggcgcaccggcgctacttcggcggcaccgaggaccgcctgtcctgcttcgcgcagacggtgtcccccgccgagaagtggagcgtgcacatcgccatgcaccctcaggtcaacatctacagcgtcacccgtaagcgctacgcgcacctgagcgcgcggccggccgacgagatcgccgtggaccgcgacgtgccctggggcgtcgactcgctcatcaccctcgccttccaggaccagcgctacagcgtgcagaccgccgaccaccgcttcctgcgccacgacgggcgcctggtggcgcgccccgagccggccactggctacacgctggagttccgctccggcaagtggccttccgcgactgcgagggccgttacctggcgcc

SEQ ID NO: 381257 - DNA, 662 bp, Homo Sapiens
tgcttttttttaatggccaactttgtacaaaaaagttggcggtttcggtatcgacggtatctctagccgggcctgagctgtgctagcaccccccccaggagaccgttgcagtcggccagcccccttctccacggtaaccatgtgcgaccgaaaggccgtgatcaaaaatgcggacatgtcggaagagatgcaacaggactcggtggagtgcgctactcaggcgctggagaaatacaacatacagaaggacattgcggctcatatcaagaaggaatttgacaagaagtacaatcccacctggcattgcatcgtggggaggaacttcggtagttatgtgacacatgaaaccaaacacttcatctacttctacctgggccaagtggccattcttctgttcccacctcgttaaaagcatggactgtgccacacacccagtgatccatccaaaaacaaggactgcagcctaaattccaaataccagagactgaaaattttcagccttgctaagggaacatctcgatgtttgaacctttgttgtgttttgtacagggcattctctgtactattttgtcgtggttataaaacaattagcagaataagcctacatttgtatttattttccattccatacttctgcccacgattgtttttctctcaaaatc

SEQ ID NO: 381258 - DNA, 691 bp, Homo Sapiens
tttgtacaaaaaagttggggtttgcttacgcgcagacggggaagcggagccaacatgccagtggcccggagctgggtttgtcgcaaaacttatgtgaccccgcggagacccttcgagaaatctcgtctcgaccaagagctgaagctgatcggcgagtatgggctccggaacaaacgtgaggtctggagggtcaaatttaccctggccaagatccgcaaggccgcccgggaactgctgacgcttgatgagaaggacccacggcgtctgttcgaaggcaacgccctgctgcggcggctggtccgcattggggtgctggatgagggcaagatgaagctggattacatcctgggcctgaagatagaggatttcttagagagacgcctgcagacccaggtcttcaagctgggcttggccaagtccatccaccacgctcgcgtgctgatccgccagcgccatatcagggtccgcaagcaggtggtgaacatcccgtccttcattgtccgcctggattcccagaagcacatcgacttctctctgcgctctccctacgggggtggccgcccgggccgcgtgaagaggaagaatgccaagaaaggccagggtggggctggggctggagacgacgaagaggaggattaagtccacctgtccctcctggggctgctggattgtctcgttttcctgccaataa

SEQ ID NO: 381259 - DNA, 874 bp, Homo Sapiens
ccacgggctcctcaccgaaagtcgatgagcgtgacctcagccccgctgccttggctggccttggtgccccggcacccgcgcgagggcttcgccagccacagccctcggggcaggcctggcttccgcaggcccagcctcttgaagtcgctggacaaggggtcttggtcctcgctcacagggtcataggtggttttttcacccctcctagatgctgggggggccgggaggtgctcagttccacgctcaggaggtcgggggggtccatggggtttcccagatacagttcgtcaatcctgtccgggaagccccagcagtggcgggggtcactgtcgccatgccctgtgtggatgaagctgttctgcaggggctggctgatgtcctgggccgacaggccggccacggaggtcaccacgttgcgagggaagggccccacacacagcgtccgtgtgttctggccacgccaccagtagttctcggcccttccctcgatgacggtgatgacatcattcatctggatgtgcagcttgtccggttcctcaaagtcctgaagggcccgcatgtctgtgggctgggcctccagcaggaagtcccgcagggccacaaacgtgggtctgtcctctggcttgtgagcccagcactggaccatgacgttgtagatgtcctggggacagtcctcgggccggggcagccgctccccctccttgtcgatcttatgcaggatctgactgccgttgaggccgatccagggctcctggccgtaggtgaacatttcccacagtgtcaccccgaacatccaggtgtcgctggcatgggagaaggtgcgtgtcttcaggctctcgggggcacaccaggcgaagggcaccttgcgatccaa

SEQ ID NO: 381260 - DNA, 299 bp, Homo Sapiens
ccccactccccgcgtcccgcgtcctagccgaccatggccgggcccctgcgcgccccgctgctcctgctggccatcctggccgtggccctggccgtgagccccgcgaccggctccagtcccggcaagccaccgcgcctggtgggaggccccatggaccccagcgtggaggaggagggtgtgcggcgtgcactggactttgccgtcggcgagtacaacaaacccagcaacaacatgtaccacagccgcgcgctgcaggtggtgcgcgcctgcaattagatcgaagcaggggtgaactactt

SEQ ID NO: 381261 - DNA, 947 bp, Homo Sapiens
tgtacaaaaaagttggcaagtatgactcatgggttaggctgggtcctcaggctccgtgctgttggaaggaagtgggaggattccaggggagttctgggaccttttcaaactgaagagaggaggctggctgcatcatgggagaagagactattgggaagaagttacctgcaactacagcaactccagactcatcaaaaacagaaatggacagcaggacaaagagcaaggattactgcaaagtaatatttccatatgaggcacagaatgatgatgaattgacaatcaaagaaggagatatagtcactctcatcaataaggactgcatcgacgtaggctggtgggaaggagagctgaacggcagacgaggcgtgttccccgataacttcgtgaagttacttccaccggactttgaaaaggaagggaatagacccaagaagccaccgcctccatccgctcctgtcatcaaacaaggggcaggcaccactgagagaaaacatgaaattaaaaagatacctcctgaaagaccagaaatgcttccaaacagaacagaagaaaaagaaagaccagagagagagccaaaactggatttacagaagccctccgttcctgccataccgccaaaaaagcctcggccacctaagaccaattctctcagcagacctggcgcactgcccccgagaaggccggagagaccggtgggtccgctgacacacaccaggggtgacagtccaaagattgacttgggccggcagttcgctatctggcatcctggacaaagatctctcggaccgcagcaatgacattgacttagaaggttttgactccgtggtatcatctactgagaaactcagtcatccgaccacaagcagaccaaaagctacagggaggcggcctccgtcccagttccctcacatcttcatccctttcaggccctgatatcttcgact

SEQ ID NO: 381262 - DNA, 829 bp, Homo Sapiens
ttgtacaaaaaagttggggattaatgaccacataatttttacttttcatacattgtgtcaaactgctttccaaaaaatacggaaacagttgatcctcccaccagcagagaagactctcttcacccttgcatgactgggaataattcttcattcttggaattctgtgggttaaaaaagacgtttcattaaatatctgttcctgtttttatatcttccccgttggccccaaagtgctccttgcctattagcctagttggcaccttgttacaggttgcacccacctttggctcttagtttcttaattgttcactgcttatagcttttttgtaagcaaatcagatttctgtaatacagccgtaaagttagagatatatagatctgtatttttatttacctacagtaagtgtggtgtggaaggagagggaatttgaacaaagatcagataggttgtggttccatgcttgtggagtggccctccgttggtggggctggaagtgcgtgggtgcaggggcggggtggggtccctctaagctggcagggtcggggcagcaacttgtagggcactcagagcagcctctccagctccttctgccctgcccgcagctcatgatggagcagtccaagaagtcctccctcatggtggcccgcagtattctcaacaacaagctcatcagcaagaagctggagcgctacctgaagggcgagaaccctttcaccgacagcccccaggaggagaaagagcaggaagaggctgagggcggtgcccctggacgagggggcgcagggcgaaacggcacggatctcggaaggcagcagaaggcgtgccggc

SEQ ID NO: 381263 - DNA, 233 bp, Homo Sapiens
gcttgggggcagggagcagtgttgggagagggctccccaacccccagctcggactgttctctgctgggaccacccagggtcggacacccaagggtgcctggcaggtcacacatttggcaagccgggcctcgtatggggactcgggtgagggtggcgagtactggttcctaacacacgcaggggagaagggagggaagcggcgctgacccttccaggtcagctggaattgaccc

SEQ ID NO: 381264 - DNA, 795 bp, Homo Sapiens
gcccaaactgtcactttctaagtgggtggccatgggcaatgctcagaggctcagtttcccctttggtgaaaatgggacgtggttgttgtgaggattaaatgcacacacagtaaggctctttcttcatgaactattatttgaaatctcactgtgtgcccagcatcccacacctgttttattgacatctcacttatttttcagataggtgaagtaactcttccatggccacacaccactaagcggggaaccaggtcctcaaactgagatgctctgactcttgagcccacatgtttttttccctgtgccccttctgatgtcgattcttttagggtagggagaaattctcctacaaagggacggctattaggctgtacagggcaccggggatagagagggacaggcccacagtagtgaaaggggaggtcctgggtgtgcaggctgggggccggccatgagggagggctccccgtgttttctcagttagaagggaagttcagagactgagaaggacccccgcccccaccaaccctctaggtctctccccagttatctgaacagagcccactaggcagacaggccttttgggggactgacagcagtgagcacaccctcaggacccccaccagccatggcagggaacaaccttgtggggtccaagctcagcgtggcctattaggcccaaggtgggacaggggtggagggcagacaggggaggcctgctagggtaagctcccggcagcagttcaggcctctgggcctgggtgcgtgtggccagcccaacttttttgtacaaag

SEQ ID NO: 381265 - DNA, 889 bp, Homo Sapiens
ttggcaacgtggcggcccagggcaagtacatagctattgccagcactactgtggagaccacggaccctgaaaaggaggtggagccggctctggagctgttggagcccattgaccagaagtttgtggctatcagtgacttgtatgagcctattgatgatggttgtgagagccaggtgttctgttcctgctcctacgatgccaccacacactttgagacaacctgcaacgacatcaaagacatctacaaacgcatggctggcacggcctttgactttgagaacatgaagcgcaaacagaacgacgtctttggagaagctgagcagtgattgtggccgcccccagcccctgctgccccagcctgtgtctgttctcctcgagggctccagcatcctctgcttcccccaccacgttcccatcacccacctcattgatccactgaccaaatccttaaccctagcgatggcttgggagatggggggttggatagcatcctctttcttggcccttccttatcctaggaaaagagggttcctctccttgtgtgtgtctcttccccccacccctaattcttctgctctgtttgggaagacgtggaggaaaaggtgacttctgcccccaccgctcttacccccactgtagtggcctttggagatgcccccacctcccccccaccaactctcgcgtgttggagagaaagggccctcccagcacaaagttgcattcctcccccctaatttattctaatttattaactttgacccaccctttctgagcctgcagccttcccgtgtggcctgagggctgtcaagtgagctgaatttaccctctaaactcttgcccaccctggaggagtggggaaggcttgggcatggccccgatggaggttgat

SEQ ID NO: 381266 - DNA, 1498 bp, Homo Sapiens
  misc_feature (60)..(91): n is a, c, g, or t
  misc_feature (475)..(509): n is a, c, g, or t
ttgggcgagttcaaggaagggaaggctcaggagccgtccgccgccatccccaaggtcatnnnnnnnnnnnnnnnnnnnnnnnnnnnnnnnntgccccagaaggtccaagcccaagtaatccaagagaccatcgtgcccaaagagcctcctcctgagtttgagttcattgctgatcctccctctatctcagccttcgacttggatgtggtgaagctgacggctcagtttgtggccaggaatgggcgccagtttctgacccagctgatgcagaaagagcagcgcaactaccagtttgactttctccgcccacagcacagcctcttcaactacttcacgaagctagtggaacagtacaccaagatcttgattccacccaaaggtttattttcaaagctcaagaaagaggctgaaaacccccgagaagttttggatcaggtgtgttaccgagtggaatgggccaaattccaggaacgtnnnnnnnnnnnnnnnnnnnnnnnnnnnnnnnnnnngcgggtggcctatgctcagatcgactggcatgattttgtggtggtggaaacagtggacttccaacccaatgagcaagggaacttccctccccccaccacgccagaggagctgggggcccgaatcctcattcaggagcgctatgaaaagtttggggagagtgaggaagttgagatggaggtagagtctgatgaggaggatgacaaacaggagaaggcggaggagcctccttcccagctggaccaggacacccaagtacaagatatggatgagggttcagatgatgaagaagaagggcagaaagtgcccccacccccagagacacccatgcctccacctctgcccccaactccagaccaagtcattgtccgcaaggattatgatcccaaagcctccaagcccttgcctccagcccctgctccagatgagtatcttgtgtcccccattactggggagaagatccccgccagcaaaatgcaggaacacatgcgcattggacttcttgaccctcgctggctggagcagcgggatcgctccatccgtgagaagcagagcgatgatgaggtgtacgcaccaggtctggatattgagagcagcttgaagcagttggctgagcggcgtactgacatcttcggtgtagaggaaacagccattggtaagaagatcggtgaggaggagatccagaagccagaggaaaaggtgacctgggatggccactcaggcagcatggcccggacccagcaactgcccaggccaacatcaccctccaggagcagattgaggccattcacaaggccaaaggcctggtgccagaggatgacactaaagagaagattggccccagcaagcccaatgaaatccctcaacagccaccgccaccatcttcagccaacaaacatccccagctcggctccacccatcacttcagtgccccgaccacccacaatgccacctccagttcgtactacagttgtctccgcagtacccgtca

SEQ ID NO: 381267 - DNA, 1220 bp, Homo Sapiens
  misc_feature (1008)..(1061): n is a, c, g, or t
ggggtgcctggagccatggcatcatcagaagggaatcttgctcgagggcagttgggctagctgctccagttctgctccatatgctctgcagctcactgggctcagcaggacctggcagatggggcaaattggggcctggctgtcgaacaatgccgctgctttcttcttacatctgtcattccgatcctctgggctagatgaggcttcccgatcagaaatgaggccagagacagcaaaaatcttcttcccagtgtcatcaacctttagtgaaccgggggagctagatggcagctgtgtcccaaagtcatattccttgccatctgcatctgagaagcgcaagtggggagactctgtgtcatggcagttcttaagtcgcttggccggcgtaaaggctgactgatagctctcccggtcctcggtggaggcaaagggccggaaagcccccacaccactatgattcagcatactgattggggtgcaatctagatttgggggagcaaattgagggtggaggtgtagtagagaaggggggaaatcacgattggcaaaagtgcctggcaccccaccttgccgatggtacatagaggcaaaggtataggaaccgttggtgaaaggaatatgcacgtccttgtcaactgagacaggtacaccaaagggtcgtggctgctgacaagggatggaagcatcacggctggcctcagccgtggatgccaggaccatcagtgctggggatgccagagggttgggaaggtaggatgagttctccatcttgaaggctgcccggtgtaagtccatcggagtctctttctgtggccggcgttacgcaagaagcagtcttccctgggagggaggccaaccagcactttgggtcagggcagggaatattactggggaatcattccctcctaagaccgtggaaattccttgggagaacggtcgcacttttcaggacacggagggaagcaggcggagagtgtggtgcatgaaaagtcccgggttcgcagagcnnnnnnnnnnnnnnnnnnnnnnnnnnnnnnnnnnnnnnnnnnnnnnnnnnnnnntaggcggctggccccgggtttgtgttcgcgagctgcctgggattgcatgtacagatcaagagactcagttggcgtgagagaaggagcagtgctgcctctcagcgctggatctaatcagtgaatgagcctccactctcccagggactcggagacacccaa

SEQ ID NO: 381268 - DNA, 755 bp, Homo Sapiens
agagcgcgggactagagtgcagagctccgggacgtggatcggagccggcgcgatgggcggagagcaggaggaggagcggttcgacggcatgttgctggccatggctcagcagcacgagggcggcgtgcaggagcttgtgaacaccttcttcagcttccttcgacgcaaaacagactttttcattggaggagaagaagggatggcagagaagcttatcacacagactttcagccaccacaatcagctggcacagaagacccggcgggagaagagagcccggcaggaggccgagcggcgggagaaggcggagcgggcggccagactggccaaggaagccaagtcagagacctcagggccccagatcaaggagctaactgatgaagaggcagagaggctgcagctagagattgaccagaaaaaggatgcagagaatcatgaggcccagctcaagaacggcagccttgactccccagggaagcaggatactgaggaagatgaggaggaagatgagaaggacaaaggaaaactgaagcccaacctaggcaacggggcagacctgcccaattaccgctggacccagaccctgtcggagctggacctggcggtccctttctgtgtgaacttccggctgaaagggaaggacatggtggtggacatccagcggcggcacctccgggtggggctcaaggggcagccagcgatcattgatggggagctctacaatgaagtgaaggtggaggagagctcgtggctca

SEQ ID NO: 381269 - DNA, 900 bp, Homo Sapiens
ttggctctcgggaaggcttggaccgacgcggcccagaggccaggaacattccgcgcgtggagccgggccagggcgatgctgcgggtgcggtgtctgcgcggcgggagccgcggcgccgaggcggtgcactacatcggatctcggcttggacgaaccttgacaggatgggtgcagcgaactttccagagcacccaggcagctacggcttcctcccggaactcctgtgcagctgacgacaaagccactgagcctctgcccaaggactgccctgtctcttcttacaacgaatgggaccccttagaggaagtgatagtgggcagagcagaaaacgcctgtgttccaccgttcaccatcgaggtgaaggccaacacatatgaaaagtactggccattttaccagaagcatggagggcattattttcccaaagatcatttgaaaaaggctgttgctgaaattgaagaaatgtgcaatattttaaaaacggaaggagtgacagtaaggaggcctgaccccattgactggtcattgaagtataaaactcctgattttgagtctacgggtttatacagtgcaatgcctcgagacatcctgatagttgtgggcaatgagattatcgaggctcccatggcatggcgttcacgcttctttgagtaccgagcgtacaggtcaattatcaaagactacttccaccgtggcgccaagtggacaacagctcctaagcccacaatggctgatgagctttataaccaggattatcccatccactctgtagaagacagacacaaattggctgctcagggaaaatttgtgacaactgagtttgagccatgctttgatgctgctgacttcattcgagctggaagagatatttttgcacagagaagccaggttacaaactac

SEQ ID NO: 381270 - DNA, 636 bp, Homo Sapiens
tctgggcacagaactggcacaggaagtccttgcatcctgtgtggaccaccaggtggcgtcgcacatccttccgggtgtagaagcatctttcacagtggtcgcactggtgcttcttttccttggttccgctagggggcttctcttccgcatgggctttgaggtggtccagtagcacctcggtgctccctagctccagggcacagacaccacaggtgaggtccccactgctggccgcatggagggccaggtgcctcttatagcccagcatggtgttgtacttcttcccacactcctcacacccaaaggccattttgttggggtcgtgggtctggaggtggtttttcaggtggtctttccggttgaacgtcttctcacagtgagcacactggtgagatttctggggagaatgggtagccatatgcctaggagcagaaggagaaatttcacaatagagagttgttttaagagctgaagaaaggtgtagcaacaatattatatcaaaatgttaatagttttctctgggtcttggtataattttcaaaattctttcatatattttccaaatatataaacttttataattaagaaaagcaagcaatactaaagccataatacatttttcacacctataaaacg

SEQ ID NO: 381271 - DNA, 877 bp, Homo Sapiens
ttggcaacttcctcggcgctccggactcccaagtctccgccggaccctcctttggatattcctcgtgtctccgattctgagacagagggggaagacggtggggcctccccacctgccccgcagaagatgcagttctttggccgcctggtcaataccttcagtggcgtcaccaacttgttctctaacccattccgggtgaaggaggtggctgtggccgactacacctcgagtgaccgagttcgggaggaagggcagctgattctgttccagaacactcccaaccgcacctgggactgcgtcctggtcaaccccaggaactcacagagtggattccgactcttccagctggagttggaggctgacgccctagtgaatttccatcagtattcttcccagctgctacccttctatgagagctcccctcaggtcctgcacactgaggtcctgcagcacctgaccgacctcatccgtaaccaccccagctggtcagtggcccacctggctgtggagctagggatccgcgagtgcttccatcacagccgtatcatcagctgtgccaattgcgcggagaacgaggagggctgcacacccctgcacctggcctgccgcaagggtgatggggagatcctggtggagctggtgcagtactgccacactcagatggatgtcaccgactacaagggagagaccgtcttccattatgctgtccagggtgacaattctctgtgctgcagctccttggaaggaacgcagtggctggcctgaaccaggtgaataacccaagggctgaccccgctgcacctggcctgccagctggggaagcagagatggtccgcgtgctgctgctgtgcaatgctcggtgcaacatcatgggccc

SEQ ID NO: 381272 - DNA, 863 bp, Homo Sapiens
ttgggtgttttagaacagcgctgcacccccttcatgtagctttcgatgcttgtttctttccgtctttgttgtcactatctttgtctatcagtacgaaagtacaaagtagctgccggcaatgaaataggggtgctgtttgcacctgcaggttaggggtggaggcgtttagaattttggggtgtgattgagccccgtttataattagaatgcccctggacccctaccactctgtgacgtgggggcacgcgcagggatcccatcattttgtgtttggggagctcagagtgcgcccaatcttggaatctttaagggatgagccagacccagacccgcggccttctagagagggtccggcagggagggtcggcgccctggcccggggtgggccggagccctgtgatgctgcatcgcccccaggaggagccagctgtgccccagagttggcgcggccgagagaggacaagagcgcgcagcaggcgaagctggagggcgggactcgactttgttgtcgctgcccggaggagtcgagactggtacccggaggagctgtctcaccaggagaccacgtcctggaagtgtccgggactcgcgggacctgtggctgcagaccccgccggcacgcaggcccagagctggcgcactcctgaggatgagactctgggggccctagccggggtccacgggagggctgtccttggggactctaggatggcttcgttctggcccgggctcacttctggagctgtgagacccaagacaaaaggggctgagggatttctcattgacaagagttcgtgcggggaaaccacctgatccctagggatttgtcatcttatgactcaaaagcctaataccaggaaacc

SEQ ID NO: 381273 - DNA, 818 bp, Homo Sapiens
tcttcaccaagtaacattccacttgtagttagtgaccagcccaatacgaactttcatgtatgtcaatatcttttgtatataaatgccttactgggatcttctctgtaacgttcatctcaaaacacactttgccttttgacacaccataggatgctcttcctccagcccaaagaaaagcaaaactctccattgtaagggaagaagcactgagacgatctcttgatattttaaaatgtagatcacaattataagtatcaagacaaaccactgtgtcatcgaagtgttcatcttcttcttcaacaggtggctgaggagatttggctctgctatacttgttctcttcaatgtactcaaaatatccacggccatgatcttctcgtggtcttttaacacccctctttttatctccgcctttctgttctgttttgccgtcccctcccgcctgctgctggccctgcctcgccccgggcggcgccaccgtcaccgcgaacagcgaggtggggccgctgctcttccccgcggcctccttggcggccccgcgctgctgttggggctgttgctgctgcgtcgccggcggttgaggctgctgctccccgtgcccgttctcgtcgcccgcgccttcctcttcgtccccgagctcatcttccccttcctggaaaccctgatcgtcgccgttctcgtcttccgaggcggcctcctcctcctccatcgggcccgagtcggccgcccccgcggccccgttctcctctcctagctccatctggtcgccgtccagagcggagattccttcctcctcctcttcctccagccctgcccaa

SEQ ID NO: 381274 - DNA, 725 bp, Homo Sapiens
  misc_feature (52)..(64): n is a, c, g, or t
atccacagtgattcggccgccgcgccggggggtgggggggctgcgcgggacnnnnnnnnnnnnncagactgaccgcggggcagctgcggagcatgtcgaccccggcccggaggaggctcatgcgggatttcaagcggttacaagaggacccacctgtgggtgtcagtggcgcaccatctgaaaacaacatcatgcagtggaatgcagttatatttggaccaaaagggacaccttttgaagatggtacttttaaactagtaatagaattttctgaagaatatccatataaaccaccaactgttaggtttttatccaaaatgtttcatcccaatgtgtatgctgatggtaacatatgtttagatatccttcaaaatcgatggagtccaacatatgatgtatcttctatcttgacatcaattcagtctctgctggatgaaccgaatcctaacagtccagccaatagccaggcagcacagctttatcaggaaaacaaacgagaatatgagaaaacagtttcggccattgttgaacaaagctggaatgattcataataaacaactggtctgttaatcttttacatcattgttgtgtataatttacctctcattagacaggctaacaaattttaagtgccacaggtgtacaggattctgcagaaaaaaacgaaacaaagtccttcagtttagatcctacaaaagcttgtgtatcttgattaatgtactttt

SEQ ID NO: 381275 - DNA, 831 bp, Homo Sapiens
  misc_feature (119)..(135): n is a, c, g, or t
  misc_feature (494)..(560): n is a, c, g, or t
ttggatttttgtaatccttttacaactccggcttcaccccgttggcccaattaggtctcacagtcccgaccgcaagtgatccacccaccaaatcctctatctatttttaatttatctcnnnnnnnnnnnnnnnnngacacagggcctccttctgtcacccacgcaggattgcagaggtatattcattgtacactgcagcctctaccccctcggctcaagcaattctctcgcctcaccctcccaagtacctgggaccaaaggtgcctgccatcatgctggccctgccaccatatttgaaattgcagccctgaccccttccactgtctatagtcttcaccatcttactacataacatagcatatatgatgtactgtataacatggtatatgcagtgtactgtataacatagtatacatgatgtagtcatctcatttatttgcttctcctctgggaagcaggaggaagcttctcctcttgtctgctttgctctcaannnnnnnnnnnnnnnnnnnnnnnnnnnnnnnnnnnnnnnnnnnnnnnnnnnnnnnnnnnnnnnnnnnattgtgggtgagatagaaggtgaatatccacatttccctttagaagtcacctgatctgggtttgagatctgcagggatctactccagacaggagaacgaataattccacctgtgctgatgagttggaaggatctagagggcttgagatctttccactggggtcagtgggggtgggtgcacctccaacacccttcttttctttgaacaagatttttccttaattccccaatactccctttgaatatatgattttaggcaccatcatagcgaa

SEQ ID NO: 381276 - DNA, 1108 bp, Homo Sapiens
gcagtacaacatgaagatagtgatccggggagacaggaacacgggcaagacagcgctgtggcaccgcctgcagggccggccgttcgtggaggagtacatccccacacaggagatccaggtcaccagcatccactggagctacaagaccacggatgacatcgtgaaggttgaagtctgggatgtagtagacaaaggaaaatgctaaaagcgaggcgacggcttaaagatggagaacgacccccaggaggcggagtctgaaatggccctggatgctgagttcctggacgtgtacaagaactgcaacggggtggtcatgatgttcgacattaccaagcagtggaccttcaattacattctccgggagcttccaaaagtgcccacccacgtgccagtgtgcgtgctgggaaactaccgggacatgggcgagcaccgagtcatcctgccggacgacgtgcgtgacttcatcgacaacctggacagacctccaggttcctcctacttccgctatgctgagtcttccatgaagaacagcttcggcctaaagtaccttcataagttcttcaatatcccatttttgcagcttcagagggagacgctgttgcggcagctggagacgaaccagctggacatggacgccacgctggaggagctgtcggtgcagcaggagacggaggaccagaactacggcatcttcctggagatgatggaggctcgcagccgtggccatgcgtccccactggcggccaacgggcagagcccatccccgggctcccagtcaccagtggtgcctgcaggcgctgtgtccacggggagctccagccccggcacaccccagcccgccccacagctgcccctcaatgctgccccaccatcctctgtgccccctgtaccaccctcagaggccctgcccccacctgcgtgcccctcagcccccgccccacggcgcagcatcatctctaggctgtttgggacgtcacctgccaccgaggcagcccctccacctccagagccagtcccgggccgcacagggcccagcaacggtccagagtgtggaggactttgttcctgacgaccgcctggaccgcagcttcctggaagacacaacccc

SEQ ID NO: 381277 - DNA, 427 bp, Homo Sapiens
tttgtacaaaaaagttggcacagactcagaccagaacccaccatggtgctgtctcctgccgacaagaccaacgtcaaggccgcctggggtaaggtcggcgcgcacgctggcgagtatggtgcggaggccctggagaggatgttcctgtccttccccaccaccaagacctacttcccgcacttcgacctgagccacggctctgcccaggttaagggccacggcaagaaggtggccgacgcgctgaccaacgccgtggcgcacgtggacgacatgcccaacgcgctgtccgccctgagcgacctgcacgcgcacaagcttcgggtggacccggtcaaattcaagctcctaaaccactgcctgctggtgaccctggccccccacctaccccccgagttcaccactgcggtgcacgcttccctggaaaagt

SEQ ID NO: 381278 - DNA, 764 bp, Homo Sapiens
ttggaactcttccaaacattttagcactgaggctggggtagcttttggcttttcccaggtctcaggaggtggcctgagtcagcacacatcttcccactcggtagacaggctggcctctccctcactttgagactttggcaactcctgggccacacggcctgcctctttgattactaatgattgtcagtgactcagagcttcctgggacttcgggtacccacccgctgttctccatgcaaacaaagcgccagggaaatgacccacagggatcgcagctgcagggagggccagggaggttgggggtgggagtgaatgctaaaagcagatcgtccagtgcccttttcagtgctaccggcctctcaccaagcagtcctccatgtgagcaaccccgagacaaaaatgctaagtgggatcaagagagcagcactcggagagggtgtttgccagtctgagtgtcccgcggtgcccgccaacccgcttcctgactgacctgagcaaggtcttactaagcagtcccatctctgtgggaggcatgcaacgcgtgcagggagttcaggtgccggtcggcgtagccaggcctggaggccccccaggcaggaggccgcccaaaggcggggccggcgtctcgcagactaggggctgggggcggccacagacggcctcgaaccacagcccttaccccaatcccacgagccccgccaacgaaccacaggtgctgggctttagagaacatgggaaaggcggccccagacctggcgggaacg

SEQ ID NO: 381279 - DNA, 795 bp, Homo Sapiens
tttgtacaaaaaagttggcgagtgtctgccctgtacaatacccgcactctattcccccagcctctttctgctttcatgctcagcacatcatcttcctaggcagtctcttccccaaagtctcaccttttcttccaatagaaaattccgcttgacctttggtgcactgcccacttcccagctccactggcccaagtctgagccggaggcccttgttttgggggcggggggagagttggatgtgattgcccttgaagaacaaggctgacctgagaggttcctggcgccctgaggtggctcagcacctgcccagggtaggcctggcatgaggggttaggtcagccaatgtcagctgcttctcttggggccctctcagagtctatctccccaagacaggaagggaaaagcaaatttctaattcaccagcaataaaaattggaggaggcttggccctcagcccttatatctctctctttttcactctcttcctcccacccccaagactgagttttggggggcaaggtggagagagctggcaactactgtgagcaagtcccctagcccctgaccaccctcctcccatgactggtgactgtttaatgagctgtgcatcccccacaaaaacatgagtgcccctctgtgtggcctctaaccctctgcacagcccttctgggtggtcctcaccaggtctctgagctgggtgggaggccatcctggcgaccactgcccattccattcacccctcactgtacctgccctagaacctgggcctaggccacaggagcagggagaagagaa

SEQ ID NO: 381280 - DNA, 929 bp, Homo Sapiens
ttggcgcctgcagctcttgggttttttgtggcttccttcgttattggagccaggcctacaccccagcaaccatgtccaagggacctgcagttggtattgatcttggcaccacctactcttgtgtgggtgttttccagcacggaaaagtcgagataattgccaatgatcagggaaaccgaaccactccaagctatgtcgcctttacggacactgaacggttgatcggtgatgccgcaaagaatcaagttgcaatgaaccccaccaacacagtttttgatgccaaacgtctgattggacgcagatttgatgatgctgttgtccagtctgatatgaaacattggccctttatggtggtgaatgatgctggcaggcccaaggtccaagtagaatacaagggagagaccaaaagcttctatccagaggaggtgtcttctatggttctgacaaagatgaaggaaattgcagaagcctaccttgggaagactgttaccaatgctgtggtcacagtgccagcttactttaatgactctcagcgtcaggctaccaaagatgctggaactattgctggtctcaatgtacttagaattattaatgagccaactgctgctgctattgcttacggcttagacaaaaaggttggagcagaaagaaacgtgctcatctttgacctgggaggtggcacttttgatgtgtcaatcctcactattgaggatggaatctttgaggtcaagtctacagctggagacacccacttgggtggagaagattttgacaaccgaatggtcaaccattttattgctgagtttaagcgcaagcataagaaggacatcagtgagaacaagagagctgtaagacgcctccgtactgcttgtgaacgtgctaagcgtaccctctcttccagcacccaaggccagtattgagatcgattc

SEQ ID NO: 381281 - DNA, 926 bp, Homo Sapiens
gtacaaaaaagttggggaggagagccatgacaagacatgactttgtcttctccgcacgactgttacagaggtctccagagccttctctctcctgtgcaaaatggcaactcttaaggaaaaactcattgcaccagttgcggaagaagaggcaacagttccaaacaataagatcactgtagtgggtgttggacaagttggtatggcgtgtgctatcagcattctgggaaagtctctggctgatgaacttgctcttgtggatgttttggaagataagcttaaaggagaaatgatggatctgcagcatgggagcttatttcttcagacacctaaaattgtggcagataaagattattctgtgaccgccaattctaagattgtagtggtaactgcaggagtccgtcagcaagaaggggagagtcggctcaatctggtgcagagaaatgttaatgtcttcaaattcattattcctcagatcgtcaagtacagtcctgattgcatcataattgtggtttccaacccagtggacattcttacgtatgttacctggaaactaagtggattacccaaacaccgcgtgattggaagtggatgtaatctggattctgctagatttcgctaccttatggctgaaaaacttggcattcatcccagcagctgccatggatggattttgggggaacatggcgactcaagtgtggctgtgtggagtggtgtgaatgtggcaggtgtttctctccaggaattgaatccagaaatgggaactgacaatgatagtgaaaattggaaggaagtgcataagatggtgggttgaaagtgcctatgaagtcatcaagctaaaaggatataccaactgggctattggattaagtgtggctgatcttattgaatccatgttgaaaaatctatccaggattcatcccgtgtca

SEQ ID NO: 381282 - DNA, 931 bp, Homo Sapiens
  misc_feature (553)..(567): n is a, c, g, or t
gacaatgtcatttgtggtcagtgtggtctgggctccatggtggggcaatcagccttgctgcggataagagtggtgggggatatctgtgtcagcatactcatcatccaggtctaccacataggccatgcggcccggcaggaacaactcattccgctcatatgctttgctcttaaaaagcattcggtaaacattgcggcccagacgtgttttaaattcaattttattttcaggatcctcatctttcttggtttctttctggggcttttccatcagttcctcttcctctttctctttgctggcaatctcagctcgtaccttttgaagcagagcaaaatccaagcctttcaccaaatgggtgtgttccatgtcaccacccaagaatttggactcctggatcaactgtcttctcttctctgcagctgatttgtccgcctcagcagtggggccaacagccctatagttagctgtggtgctgataagctcggtttcttcataatctttgttcactccatctctccgttccttggcacgatcccggtacttctctgctagnnnnnnnnnnnnnnnaatttcttgttggcgtagcttggcataataacttttctttttcctccttcgtgcagctgggtcttcatcctcattgtactcccttggcatctcatggtgacgtgacttagaaggtggtgcagaggtaggtgcagccctgggggtcatgagaagtttcctgaagtcttcattggtgagttttgattggtggaaggagtgaggatcatccacatcgtggccatcgggggccaaagggttggagaacggctcactatctcgctccggcattttgttatcgttctttcgctgtcaccaacaatcgagtctccaacagcaacaccgcagcgacaagctcttaacccacagtgcacccaacttttttgta

SEQ ID NO: 381283 - DNA, 614 bp, Homo Sapiens
ttctgcgacttgtgttgggactagctgataggaagatgtcttcaggaaatgctaaaattgggcaccctgcccccaacttcaaagccacagctgttatgccagatggtcagtttaaagatatcagcctgtctgactacaaaggaaaatatgttgtgttcttcttttaccctcttgacttcacctttgtgtgccccacggagatcattgctttcagtgatagggcagaagaatttaagaaactcaactgccaagtgattggtgcttctgtggattctcacttctgtcatctagcatgggtcaatacacctaagaaacaaggaggactgggacccatgaacattcctttggtatcagacccgaagcgcaccattgctcaggattatggggtcttaaaggctgatgaaggcatctcgttcaggggcctttttatcattgatgataaaggtattcttcggcagatcactgtaaatgacctccctgttggccgctctgtggatgagactttgagactagttcaggccttccagttcactgacaaacatggggaagtgtgcccagctggctggaaaccctggcaatgataccatcaaaccagatgtccaaaagagcaaaga

SEQ ID NO: 381284 - DNA, 893 bp, Homo Sapiens
actttgtacaaaaaagttgggcgagatccctacttgcagtagccgcctctgccgccgcggagcttcccgaacctcttcagccgcccggagccgctcccggagcccggccgtagaggctgcaatcgcagccgggagcccgcagcccgcgccccgagcccgccgccgcccttcgagggcgccccaggccgcgccatggtgaaggtgacgttcaactccgctctggcccagaaggaggccaagaaggacgagcccaagagcggcgaggaggcgctcatcatcccccccgacgccgtcgcggtggactgcaaggacccagatgatgtggtaccagttggccaaagaagagcctggtgttggtgcatgtgctttggactagcatttatgcttgcaggtgttattctaggaggagcatacttgtacaaatattttgcacttcaaccagatgacgtgtactactgtggaataaagtacatcaaagatgatgtcatcttaaatgagccctctgcagatgccccagctgctctctaccagacaattgaagaaaatattaaaatctttgaagaagaagaagttgaatttatcagtgtgcctgtcccagagtttgcagatagtgatcctgccaacattgttcatgactttaacaagaaacttacagcctatttagatcttaacctggataagtgctatgtgatccctctgaacacttccattgttatgccacccagaaacctactggagttacttattaacatccaggctggaacctatttgcctcagtcctatctgattcatgagcacatggttattactgatcgcattgaaacattgatcacctgggtttctttatttatcgactgtgtcatgacaaggaaacttacaaactgcaacgcaga

SEQ ID NO: 381285 - DNA, 884 bp, Homo Sapiens
tggcgcatccccacctccgccgccatggccgcctacaaactggtgctgatccggcacggcgagagcgcatggaacctggagaaccgcttcagcggctggtacgacgccgacctgagcccggcgggccacgaggaggcgaagcgcggcgggcaggcgctacgagatgctggctatgagtttgacatctgcttcacctcagtgcagaagagagcgatccggaccctctggacagtgctagatgccattgatcagatgtggctgccagtggtgaggacttggcgcctcaatgagcggcactatgggggtctaaccggtctcaataaagcagaaactgctgcaaagcatggtgaggcccaggtgaagatctggaggcgctcctatgatgtcccaccacctccgatggagcccgaccatcctttctacagcaacatcagtaaggatcgcaggtatgcagacctcacagaagatcagctaccctcctgtgagagtctgaaggatactattgccagagctctgcccttctggaatgaagaaatagttccccagatcaaggaggggaaacgtgtactgattgcagcccatggcaacagcctccggggcattgtcaagcatctggagggtctctctgaagaggctatcatggagctgaacctgccgactggtattcccattgtctatgaattggacaagaacttgaagcctatcaagcccatgcagtttctgggggatgaagagacggtgcgcaaaagccatggaagctgtggctgcccagggcaaggccaagaagtgaaagccggcggggaagatactgtccccaggagcaccctccctgcccgtcttgtccctctgcccctcccacctgcacatgtcacactgaccacatc

SEQ ID NO: 381286 - DNA, 865 bp, Homo Sapiens
ccatactcgacggatgactccccccaggaggaagacgggcgccaccgtcacgtctgggtctttgtggaagatgttgggcttggcgtggtgctggaagtggcggaagttccaccagtgggcggagaagccctttagctgccccatcacgaacttctgggccacgtggtttccaccaggacttcttgaagatggaggcatggcccaggtcatgctgcagacaccaggactgagcctgagagatggccaggatgaaggcggccagggcactgggcacccagccaggacccaggaggtagataaggagccaggccagcacctccatggccaggatgtggcccagtaggaaagcaaagaaggtgggactggcatcaaacagcttcatgtcctcggctgcctggtgcagggctcggaagtcctcgaccagctgcgcattcaggggtccatcctggctgggttcttccggagccagctctccaatcaacaggggctgtaggaacttgcgcacaaaattgagatcttgatggaaggcacggaaggcatccgtggcgtcctcagcgccgtggtggccgatgaggcggctgccccctgggtgccgctgtgcccagcggctgatgtcgtagacgcggcgctcgatgaccagccacttgtcgccgggctggtcgtgcgcgcggatctgctcccagcagaaggtgggcagcggtgcccccggctgcgcgggtccctcccgcggtcccggctccccgacgccgcccatgctgcacgcacgagtcctggggatcccaggcggtggccgaggtccgagcaagaccccgagggaagcgaagagcgctcccgggaagcacgcctccgccccaacttttttgta

SEQ ID NO: 381287 - DNA, 715 bp, Homo Sapiens
ttggcaggagcggccgggtggcgggaggaaccgttacgggaactgaagttgcggattaagcctgatcaagatgacaacctcccaaaagcaccgagacttcgtggcagagcccatgggggagaagccagtggggagcctggctgggattggtgaagtcctgggcaagaagctggaggaaaggggttttgacaaggcctatgttgtccttggccagtttctggtgctaaagaaagatgaagacctcttccgggaatggctgaaagacacttgtggcgccaacgccaagcagtcccgggactgcttcggatgccttcgagagtggtgcgacgccttcttgtgatgctctctgggaagctctcaatccccagccctcatccagagtttgcagccgagtagggactcctcccctgtcctctacgaaggaaaagattgctattgtcgtactcacctccgacgtactccggggtcttttgggagttttctcccctaaccatttcaacttttttttggattctcgctcttgcatgcctcccccgtcctttttcccttgccagttccctggtgacagttaccagctttcctgaatggattcccggccccatccctcacccccaccctcactttcaatccgtttgataccatttggctccttttttggcagaacagtcactgtccttgtaagttttttagatcaataaagtcagtggctttcatg

SEQ ID NO: 381288 - DNA, 888 bp, Homo Sapiens
agggccatctcttccgccccccaggcgctctatgcgggtgggggtccaagtgatgtctcggtggtggactaaacagggggggagtgggtggaaagcgccttttgccaggcccggaagcctctctcgatactgatctggtattcttagcaggttaaaggggttattgtctgcaatatgaatcccatggagaggtggctgggaaggacattctgcacgtagtcttgaagggataccaacccgcggggtcaggggacttccgtgttcgctttctaagtagattcttaatccatgagtgttctgtgcgtgttgcaagagaaaccatgcactggtgaatggctgtttgcaagttgtacatgtgtagctgctgggctcatctttacaaataccctgcggggcatattctgcactcatcccaggcgtggggattagagctccatgtgcagaacgaggggaggagaggcccctccagtgcagaagtttatctgctatgtgttcctgtttggggcaaattcctctagatgacgttgataaacaatcgtcatcctctggcgtgacctggatgccaacctccacgggattggatgcttttttcatctcgattggtgaaggggaaggtggcttatccacagctttttctaagcagaggctgccattgcattgtttccgtttgtgctcgataaaaataagaatgtcccccaatgggaagttcatctggcactgcccacaggtgaggaggtcatgatccccttctggagctcccaacgggccgtggtctggttcatcatctgtaagaatggcttcaagaggctcgggcgagaattcccgtttgcttaagtgctggggtttgccttgcttgcggcgagacatggtgggctgcggggcggccaa

SEQ ID NO: 381289 - DNA, 544 bp, Homo Sapiens
tggcctcgttgagactttaggtgcgacattcggtgttttgggaagagagtcctgtgggcccaggtatcgtagcggcgacacgagagagacgggcggtgtgacagccttccactacctgcacgagtgtattgggggtctgtctgctatcagctatgccgctgcccgttgcgctgcagacccgcttggccaagagaggcatcctcaaacatctggagcctgaaccagaggaagagatcattgccgaggactatgacgatgatcctgtggactacgaggccaccacgttggagggcctaccaccaagctggtacaaggtgttcgacccttcctgcgggctcccttactactggaatgcagacccagaccttgtatcctggctctccccacatgaccccaactccgtggttaccaaatcggccaagaagctcaaaagcagtaatgcaaatgctgaagaaaagttggaccggagccatgacaagtccgacaggggccatgacaagtcggaccgaacccatgagaaactagacaggggccacgacaagtc

SEQ ID NO: 381290 - DNA, 867 bp, Homo Sapiens
ttggcactgccaggcatgcagaggtccaatgtctggctctcccggactccttgctgctggcttactgcccgatcagtccctgggaaacgcctgcctttggctctgccagcactggtgggaacctgcaagaaatttgagccctgaacgtctgccttgtcctgttgtcctgtgctccagggaagacaggcgcgatgatggactccccgttcctggagctgtggcagtccaaggcagtgtccatcagggagcagctgggactcggggaccggcccaacgactcctattgctacaactcggccaaaaacagcaccgtgctccagggggtcacctttggtggcatccccactgtcctgctcatagacgtcagctgcttcctgttcttaatcttggtgttttctattataagaagaagattctgggactatggccgcattgccctggtgtcagaagcagacagcgagtccagatttcagagattgtcatcgacttcctcctcaggtcaacaagactttgaaaatgagctgggatgctgtccctggctgactgccatcttccgtctgcatgatgaccagatcctggaatggtgtggggaggacgccatccactacctgtccttccagaggcacatcatcttcctgttggtggtggtcagctttttgtccctgtgtgtcatcctgcctgtcaacctctcacgggacttgctggacaaagacccgtatagttttgggaggacaacaatagcaaacctacagactgacaatgacctcctttggctgcacaccatctttgctgtcatttacctcttcctcactgtgggtttcatgcggcaccacactcagtccattaagtacaaagaggagaacctgg

SEQ ID NO: 381291 - DNA, 929 bp, Homo Sapiens
aattgatgagcaatgcttttcctataatagccaactttgtacaaaaaagttggcgagcgggaccggacctacctggcggccttggagaccctggacaatggcaagccctatgtcatctcctacctggtggatttggacatggtcctcaaatgtctccggtattatgccggctgggctgataagtaccacgggaaaaccatccccattgacggagacttcttcagctacacacgccatgaacctgtgggggtgtgcgggcagatcattccgtggaatttcccgctcctgatgcaagcatggaagctgggcccagccttggcaactggaaacgtggttgtgatgaaggtagctgagcagacacccctcaccgccctctatgtggccaacctgatcaaggaggctggctttccccctggtgtggtcaacattgtgcctggatttggccccacggctggggccgccattgcctcccatgaggatgtggacaaagtggcattcacaggctccactgagattggccgcgtaatccaggttgctgctgggagcagcaacctcaagagagtgaccttggagctgggggggaagagccccaacatcatcatgtcagatgccgatatggattgggccgtggaacaggcccacttcgccctgttcttcaaccagggccagtgctgctgtgccggctcccggaccttcgtgcagaagacatctatgatgagtttgtggagcggagcgttgcccgggccaagtctcgggtggtcgggaacccctttgatagcaagaccgagcacgggccgcagtggatgaaactcagtttaaagaagatcctcggctacatcaacacgggggaagcaagatggggcgaagctgctgtgtggtgggggcattgctgctgaccgtggttacttcatccagcccactgtgtttgg

SEQ ID NO: 381292 - DNA, 997 bp, Homo Sapiens
  misc_feature (19)..(20): n is a, c, g, or t
  misc_feature (38)..(39): n is a, c, g, or t
  misc_feature (47)..(47): n is a, c, g, or t
  misc_feature (67)..(67): n is a, c, g, or t
  misc_feature (782)..(782): n is a, c, g, or t
  misc_feature (785)..(785): n is a, c, g, or t
  misc_feature (791)..(851): n is a, c, g, or t
  misc_feature (950)..(951): n is a, c, g, or t
  misc_feature (957)..(957): n is a, c, g, or t
  misc_feature (965)..(965): n is a, c, g, or t
  misc_feature (989)..(991): n is a, c, g, or t
gttcaaggctgaagttganntaagaggcaacgaagcgnntgtcctgntgagccctgacaccatcttncccccagggccccacggacaagcccctgcgctccgctgcagactttacaagattgccggcattggcacgtgcccgtggccgggtggagaccggcatctgcggccgggcatggtggtgacctttgcgccagtgaacatcaccactgaggtgaagtcagtggagatgcaccacgaggctctgagcgaagctctgcccggcgacaacgtcggcttcaatgtgaagaacgtgtcggtgaaggacatccggcggggcaacgtgtgtggggacagcaagtctgacccgccgcaggaggctgctcagttcacctcccaggtcatcatcctgaaccacccggggcagattagcgccggctactccccggtcatcgactgccacacagcccacatcgcctgcaagtttgcggagctgaaggagaagattgaccggcgctctggcaagaagctggaggacaaccccaagtccctgaagtctggagacgcggccatcgtggagatggtgccgggaaagcccatgtgtgtggagagcttctcccagtacccgcctctcggcccttcgccgtgcgcgacatgaggcagacggtggccgtaggcgtcatcaagaacgtggagaagaagagcggcggcgccggcaaggtcaccaagtcggcgcagaaggcgcagaaggcgggcaagtgaagcgcgggcgcccgcggcgcgaccctccccggcggcgccgngcnccgaannnnnnnnnnnnnnnnnnnnnnnnnnnnnnnnnnnnnnnnnnnnnnnnnnnnnnnnnnnnnccaggcgcatgtctgcacctccgcttgccagaggccctcggtcagcgactggatgctcgccatcaaggtccagtggaagttcttcaagaggaaaggcgnncccgcnccatgttnccgcccaccctcccacgctcatcnnnttttac

SEQ ID NO: 381293 - DNA, 880 bp, Homo Sapiens
ttggggacatccggcggggcaacgtgtgtggggacagcaagtctgacccgccgcaggaggctgctcagttcacctcccaggtcatcatcctgaaccacccggggcagattagcgccggctactccccggtcatcgactgccacacagcccacatcgcctgcaagtttgcggagctgaaggagaagattgaccggcgctctggcaagaagctggaggaccacccctagtccctgaagtctggagacgcggccatcgtgaagatggtgccgggaaagcccatgtgtgtggagagcttctcccagtacccgcctctctgccgcttcgccgtgcgcgacatgaggcaaacggtggccgtaggcgtcaccaatctgacaccaaaataagagaggcggcgccggccctttcaccaaataggcgcacaaggtgctgaatgtgggcacctgaaacgagggttccagcggcatgaccttcccatttggcgccgctgtcccaaatgcaccccttcccccggaaaaccctggtactgattggcgctcacggcgtgcgacggcacaacctgaagaacaagctcatcatgtgagatccagatcgctatggcaccacgatgacctacacctcccggcggccgaaagaatcagagcgcgaaggtcagggttacagctttgtgtcccgtggggagatggaggctgacgtccgtgctgggcgctacctggagcatggcgaatacgagggcaacctgtatggcacacgtattgactccatccggggcgtggtcgctgctgggaaggtgtgcgtgctggatgtcaacccccaggcggtgaaggtgctacgaacggccgagtttgtcccttacgtggtgttcatcgaggccccagacttc

SEQ ID NO: 381294 - DNA, 998 bp, Homo Sapiens
ccagagctggtaccgccccggatttacgggatatcgtcgacccacgcgtcggggcgccgatggcggagggaacggcggaggctcctctagagaatggtggtggtggcgactcgggagccggagctttggaagcgatggagtggcgcccattaagcgtcaagtacctcaccaccaaggagcagtttcaccaattcctggatagccaaagggcaggagaacgacttgccgggaaaccgaggtaggagaccctgctggcaatgagctggctgagcctgaggctaagcggatccgactggaggatggacagacggcggacgggcagacggaggaggcagcagagcccggggagcagctacagactcagaagagggcccggtggacaaaacaagggccggccccatgtgaagcccacgaactacgacaagaacaggctgtgtccctccctaatccaggagtcggctgctaagtgtttcttcggtgatcgctgccgctttctgcacgacgtggggcgctacctggagaccaagccggccgacctgggcccccgctgcgtgctcttcgagaccttcggccggtgcccctacggcgtgacctgccgcttcgctggggcccacctgaggcccgagggacacgaacctggtgcaggaggagtacggcggcccgcgggacccagcccccgtccatccgccaacggcctggacaaagacctgcagcagcagctgcggaagcgcgaggtccgcttcaagcgagctgagcaggccctgcgccggttcagccaggacccacacccgctgccgctgtccccgagggcaccgaagccgaaggcgctcacaggcaggaaaactgtggtgcccagcagggtcccggcagggcggggaactagacacccttccacagcacacccgtcaggaactgcgggccctgacggatgacggacgtggacaagcagccgcctgtgaaacgaacgcgcgcaaatccacgccaaacattagcctgga

SEQ ID NO: 381295 - DNA, 975 bp, Homo Sapiens
tgcgaggcctgggtggacgaattcggcacgaggcgatggcggagggaacggcggaggctcctctagagaatggtggtggtggcgactcgggagccggagctttggaacgaggagtggcgcccattaagcgtcaatacctcaccaccaaggagcagtttcaccaattcctggaagccaaagggcaggagaagacttgccgggaaaccgaggtaggagaccctgctggcaatgagctggctgagcctgaggctaagcggatccgactggaggatggacagacggcggacgggcagacggaggaggcagcagagcccggggagcagctacagactcagaagagggcccggggacaaaacaagggccggccccatgtgaagcccacgaactacgacaagaacaggctgtgtccctccctaatccaggagtcggctgctaagtgtttcttcggtgatcgctgccgctttctgcacgacgtggggcgctacctggagaccaagccgggcgacctgggcccccgctgcgtgctcttcgagaccttcggccggtgcccctacggcgtgacctgccgcttcgctggggcccacctgaggcccgagggacagaacctggtgcaggaggagttggcggccgcgggacccagaccccgtccatccgcaacggctggacaaagccctgcagcagcagctgcggaagcgcgaggtccgcttcgagcgagctgagcaggccctgcgccggttcagccagggccccaaacccgatgacgtgtccccgagggcacggcagccgagggcgctccccaggcaggaaaaactgtggtgcccaacaggtccccgcaaggccggggcactagaaccacttccagaaagcccggtgcggaacttggggccctgaggatgaggaggtggcaagctggggcctgtgagaagagcggtggaactcgtgggaaatttactggccccctacaagtgtggaact

SEQ ID NO: 381296 - DNA, 878 bp, Homo Sapiens
ctgcgcggttctggccctctggggcccacttggggccgagcggttctcacccgccctctccgcacgtccgccggcgcctcaggtttcccccggacagttgctgtgcgacttggacagtagaggagcgcctcccaagttttcatccaactgccaacccctaaagcttccacccttctcccctcagagaggacgtttgatgccgggccccttgagaggctcattgacaagcctgcccctctgggtccccctgagcagagcctgctgacccaattgcccacctttgcggctttgatgcctagccatgtctgcctcatcctcaggcggctcccccaggtttccatcgtgtgggaagaacggagtaacgagtctcacgcagaaaaaggtcttgagagcaccttgtggcgcacccagtgtaactgtgacgaaatctcacaagcgaggaatgaaaggggacactgtgaatgtgcggcggagtgtccgggtgaaaaccaaggtcaagatgcaaaaaggtgagcgccagatggccaaaaggttcctggaggaacggaaggaagagctggaggaggtggcccacgaactggctgagactgagcacgagaacacggtgttgaggcacaacatcgagcgcatgaaggaggagaaggacttcaccatacttcagaagaaacacctacaacaggagaaggagtgcctcatgtccaagctggtggaggcggaaatggatgggggctgcggcttgccaaagcaggtcattggccttgaaggataccatcgggaacgctgaaaaacggaagaaaccaaatgacctgcacggacatcaacacctgacaaggcagaaggactttctcctgcggaagctgagcacatttgaggagacc

SEQ ID NO: 381297 - DNA, 958 bp, Homo Sapiens
  misc_feature (173)..(173): n is a, c, g, or t
tgtcccttgttctggcagccagtaacaagcagggcgggcttttcttgggagtcggccctccgcccaagccgttttcaggcagtgctccctggttgctcccattagtctttccaagaatcctcttttgcagtgcctgttcccttcagggaggtctccgaagggtccgttggttnctcctcaaaatgtgctcagtttctgcaggagaagtttccttctgccctggtcagggtgttgatgtccgtgcaggtcatttgtttctccgtttcaagcttccccgatggtatcccttcaaggccatgacctgcttggcacccgcagccccatccatttccgcctgccaccagcttggacatgaggcactccttctcctgttgtaggtgtttcttctgaagtatggtgaagtccttctcctccttcatgcgctcgatgttgtgcctcaacacccgtgttctcgtgctcagtctcagccagttcgtgggccacctcctccagctcttccttccgttcctccaggaaccttttggccatctggcgctcacctttttgcatcttgaccttggttttcacccggacactccgccgcacattcacagtgtcccctttcattcctcgcttgtgagatttctggctgctggtcgctgatggtttcgggagtttttttatgtggacgtggacaggggtgttctcatccacgtgaacatgtaaggggggagttgaagagcggtccttcatggttggcttctggcaggtgggggaggacaacacaaaaatggttgatcgtcacagttacactgggtgcgccacaaggtgctctcaagacctttttctgcgtgagactcgttactccgttcttcccacacgatggaaaccaggagcgacacggctgcgcccagaaacgccgccttatgaagtcgttgaagtcggaggccagggtcgtgccatggagacgccgcggcgg

SEQ ID NO: 381298 - DNA, 912 bp, Homo Sapiens
  misc_feature (43)..(43): n is a, c, g, or t
  misc_feature (106)..(107): n is a, c, g, or t
  misc_feature (199)..(199): n is a, c, g, or t
agaaggggcaccgtaccccaggcccagtgccccacctgctttncaagaggtgtctgagcccttaatccctttaggggtctgcttcccccgggcccctactcaggcnncctgtgaatccccacgtggggcagggcagcctcaagggagaaggtgcccttgtgccccccttcttctgcccttttctcagactccgtcagtncatgggtgataaattgggttccttgggcccctgttagagggtgtggcaccacagtgctctgtctccgctaggtgccaagccttgccatcttcctggtggggtgtagagagcccgggagggccagggtccccctcttcgggaatggggtatggaggttcgggggtagctgggaggtctccaggacccggtggtccccccagtactggtccattgtagatgtagatgttgccagtgatagtcatagacccgccggtgacatgaatgccattggtaccgtgggccacctggctctgctccccgggttccaactgcggctccctggtcaggtccagaggactctgctgttgcggcacccctgcctccaaaactggggctgcggggagcccagtggatactggggaaacatctccagaaatgggtagcagtggctgtaccaagtcagggaagtatggatgggccttcggaggctcccagcttccagctacaggattgggtccctctccctgcggacgcctcttgagcagcgatcctgacatctctgggggcagtggctctaatggatttttgcaggttgtgtcggactgggcagtgcctggagctgcctccaccagaccttggttctcacacctggtgtggggctggcagcgggcgctgggggaggaggtattctggaagtgccctgccttgcaggggacgcagtggttgttacccaa

SEQ ID NO: 381299 - DNA, 378 bp, Homo Sapiens
ctacctgcgtggagagggaagggccagagtaagcggactttcccatctgagtggctcaggagacccacccctctcccctcagagcagcaggggacagagaaaagccatcacttctatggtctttgtgaaggctcagcatgtgggatgggaaggagccagagctgccgcaacagcagagtcctctggacctgaccagggagccgcagttggaacccggggagcagagccaggtggcccacggtaccaatggcattcatgtcaccggcgggtctatgactatcactggcatcatctacatctacaatggaccagtactggcggggaccacagggtcctggagacctcccagctacccccgatactccatcacgtagtcac

SEQ ID NO: 381300 - DNA, 1064 bp, Homo Sapiens
  misc_feature (198)..(198): n is a, c, g, or t
  misc_feature (446)..(446): n is a, c, g, or t
acaaggcaaatatccggttgtgccaaaattacaagttgaaaaagggggcttccaaaaatggctatttttctaaccaagcaaaaaagcagttctctaaatatgcattcccattaaaacggttaaagaaaaacaagttttaacacttaactcgtatgacaagccttggcaaaacattgcttgccttctcccttttcctanctttaaagaactgtttcctctaaaggaatactagtgcagcataacccttaaataatgtcatttatttttaaagttacaacctacagagaaattaacatcttgtcaatctaataacagtggcaaccattcttcacatgcacttctcttagaataaatccccttggctggcaggataaggcttatgctgtagaaccttctcccccacagccacaaatccccttctataagtccctcctaccctcatcccnccgcatccccactggcattcacctttcccaccccaaaaagtgcagctcatggtagccttctagaaaatggttttaatgggtatcccagcatacacgcttttttatttttaagcctccactgggtcaaaaatatgtgctcttaatacttgagtttttgctttgtgtgtgggttttctttctttttcatttagatatcgtgggataaagtggagaggacatctccattttcccatacaaacggagggtgagaagagaaagagaagcaagctgttgcccccactgccactgctactgctgaggccccggttgttgttggctttgtcacttgttttattctctgccccttctgccctgtctccagaaatggcatcaggctcaggtttgctccctggcagatcctccacagatgtgctgctgccctcagcaccaacaccgcatccccgaggccccatggcactggagcgccgccgctcgtggatctcatctgagatcatctccaggttcttcagggccatcttgtactcgccttttgccagggtcagttttgcctgcaggtattcacagtctttttcagttggtcgagctgccattatactttgccttgagttcaaaataagg

SEQ ID NO: 381301 - DNA, 1605 bp, Homo Sapiens
  misc_feature (266)..(317): n is a, c, g, or t
  misc_feature (1057)..(1057): n is a, c, g, or t
tcctaggtagcgaggcctgggtggcgaattcggcacgaggggccggaggtatccgcatcggcgagctgcgtctcccgggtgtcggccccggcggctccccgaccgtgcccggctgtggcgaggcggctccagcccagcctgtggcagccgcgacccccggggcgctccggagcccactgcgcggcgcgcgtgccggctgcctgcatggacgcggcactgaagcggagccgctcggaggagccagccgaaatcctgccgcctgcccnnnnnnnnnnnnnnnnnnnnnnnnnnnnnnnnnnnnnnnnnnnnnnnnnnnnagaagaggtggatccccggatccagggagaactggagaagttaaatcagtccacggatgatatcaacagacgggagactgaacttgaggatgctcgtcagaagttccgctctgttctggttgaagcaacggtgaaactggatgaactggtgaagaaaattggcaaagctgtggaagactccaagccctactgggaggcacggagggtgggcgaggcaggctcagctggaagctcagaaagccacgcaggacttccagagggccacagaggtgctccgcgcccccaaggagaccatcctccctggccccagcaagcggctgctggaggatgacaagcggcagttcgactccgcctggcaggagatgctgaatcacgccactcagagggtcatggaggcggagcagaccaagaccaggagcgagctggtgcataaggagacggcagccaggtacaatgccgccatgggccgcatgcgacagctggagaagaaactcaagagagccatcaacaagtccaagccttattttgaactcaaggcaaagtactatgtgcagctcgagcaactgaaaaagactgtggatgacctgcaggccaaactgaccctggcaaaaggcgagtacaagatggcccctgaagaacctggagatgatctcagatgagatccacgagcggccgcgctccagtgccatggggccctcggggatgcggtgttggtgctgagggcagcagcacatctgtgngaggatctgccagggagcaaacctgagcctgatgccatttctgtggcctcggaggcctttgaagatgacagctgtagcaactttgtgtctgaagatgactcggaaacccagtccgtgtccagctttagttcaggaccaacaagcccgtctgagatgcctgaccagttccctgcggttgtgaggcctggcagcctggatctgcccagccctgtgtccctgtcagagtttgggatgatgttcccagtgttgggccctcgaagtgaatgcagcggggcctcctcccctgaatgtgaagtagaacgaggagacagggcagaaggggcagagaataaaacaagtgacaaagccaacaacaaccggggcctcagcagtagcagtggcagtggtggcagcagtaagagccaaagcagcacctcccctgagggccaggccttggagaaccggatgaagcagctctccctacagtgctcaaagggaagagatggaattattgctgacataaaaatggtgcagattggctgattcatcctgggccctggccgatgtgc

SEQ ID NO: 381302 - DNA, 553 bp, Homo Sapiens
cggtggtcgtccaaggtctccaacaactccgggtcttccagcgacttcaagtcttccaataactctcagcctccagataatcctgagctccagaaaatccacatcttccagacaatccatgcccttccgagacaactccatgtcttccaacgaagactccaagctcttccagctaaagtcaagctcttccagacacactccagatcttccagcaacttactggatcttccacacaaagtccagactcttccagcgaaaactctacgctcttccaaaaaaagccatgtcttccagaaaatccacatcttccaatggcctccaggtcttccagactatccatgtcttccagaaaatccttgtcttcccttaaatctatagcttccaaaaaatccgggtcctccaggaaatccgtgtcttccagcaagtccacgtcttccaacaaagacatgtcttcgctggaagctctgtattcgaggaagacatggctttgctggaagacgtggatttgctggaagacacggatttcctggaagacctggatttgacggaagct

SEQ ID NO: 381303 - DNA, 382 bp, Homo Sapiens
actagtccacggtgggctccaggtcttccagcatatatgtcgttcctgaagatccacgtcttccagaaaatccaggtcttccagaaaatccatgtcttccagtaacctcccagtcttccagaaaaatccaccgtcttcccaacaatccaagtcttccggataattggggtcttcctaaaaatctagatcttccagtcaatcagtgtcttccagaaagaaatccaggtcttccagtcaatcagggtcttccagaaagaaatccaggtcttccagtcagtcagtgtcttccagaaaaatctacgtcttccaccaaatccaggtcttccagtcaatccacatgttcgggaaaaaatccaggtcttccagcccagcgtggactagt

SEQ ID NO: 381304 - DNA, 531 bp, Homo Sapiens
tgcgtctcgcttctgaatcgtatccacttgagcatcactagactgatctattttaacactggtggggggcagcgaggacatggttttaaactttaaaatgaaaatgtgaaactaggaatgttgctgtgagaccccttggacaaacagatttttgcactggggatagaacttgagcaatttctgtcttggcctcgccactgacgtcccttctttcctgtggggacaggatggacagattcctggtaaaaggggctcaagggggccttttgagaaagcaggaggagcaagagccaactggagaagagccagctgtgtcttccggcataaggattcccgtgggaaaagcccctccaggagggtggcggtggtcaggctgccgctggcccacgggagcttactaatgatgaaccacccgaccaacacgcactggtaccacagtcttcccgtgagaaagaaggttctggctccacgggtgaatctgacttttcgtaaaattttgcttactaaaaaataaaaacatttttaacagtt

SEQ ID NO: 381305 - DNA, 441 bp, Homo Sapiens
ggcacgagggtttacccgtgtttaacctctttgcgtctcgcttctgaatcgtatccacttgagcatcactagactgatctattttaacactggtggggggcagcgaggatggacagattcctggtgaaaggggctcaagggggccttttgaggaagcaggaggagcaagagccaactggagaagagccagctctgtctccttcggtgcctgcagagactttgtcttccggcataaggattcccgtgggaaaagcccctccaggagggtggcggtggtcaggctgccgctggcccacgggagcttactaatgatgaaccacccgaccaacacgcactggtaccacagtcttcccgtgagaaagaaggttctggctccacgggtgaatctgacttttcgtaaaattttgcttactaaaaaataaaaacatttttaacagttaa

SEQ ID NO: 381306 - DNA, 408 bp, Homo Sapiens
  misc_feature (66)..(152): n is a, c, g, or t
  misc_feature (268)..(317): n is a, c, g, or t
caataagctcctagtccagacgccatgggtcatttcacagaggaggacaaggctactatcacaagnnnnnnnnnnnnnnnnnnnnnnnnnnnnnnnnnnnnnnnnnnnnnnnnnnnnnnnnnnnnnnnnnnnnnnnnnnnnnnnnnnnnnnntgacagctttggcaacctgtcctctgcctctgccatcatgggcaaccccaaagtcaaggcacatggcaagacggtgctgacttccttgggagatgccataaagcacctggatgatnnnnnnnnnnnnnnnnnnnnnnnnnnnnnnnnnnnnnnnnnnnnnnnnnntgtggacctgagaacttcaagctcctgggaaatgtgctggtgaccgttttggcaatccatttcggcaaagaattcacccctgaggtgcagg

SEQ ID NO: 381307 - DNA, 428 bp, Homo Sapiens
  misc_feature (13)..(13): n is a, c, g, or t
  misc_feature (41)..(41): n is a, c, g, or t
  misc_feature (84)..(197): n is a, c, g, or t
  misc_feature (242)..(242): n is a, c, g, or t
  misc_feature (286)..(335): n is a, c, g, or t
  misc_feature (366)..(366): n is a, c, g, or t
  misc_feature (377)..(377): n is a, c, g, or t
  misc_feature (382)..(382): n is a, c, g, or t
  misc_feature (401)..(401): n is a, c, g, or t
  misc_feature (421)..(421): n is a, c, g, or t
  misc_feature (427)..(427): n is a, c, g, or t
ggaaccgtctgangttatcaataagctcctagtccagacgncatgggtcatttcacagaggaggacaaggctactatcacaagnnnnnnnnnnnnnnnnnnnnnnnnnnnnnnnnnnnnnnnnnnnnnnnnnnnnnnnnnnnnnnnnnnnnnnnnnnnnnnnnnnnnnnnnnnnnnnnnnnnnnnnnnnnnnnnnnnctctgccatcatgggcaaccccaaagtcaaggcacatggcaaganggtgctgacttccttgggagatgccacaaagcacctggatgatnnnnnnnnnnnnnnnnnnnnnnnnnnnnnnnnnnnnnnnnnnnnnnnnnntgtggatcctgagaacttcaagctcctgggnaatgtgctggngaccnttttggaatccatttcggnaaagaattcacccctgaggngcaggnt

SEQ ID NO: 381308 - DNA, 438 bp, Homo Sapiens
  misc_feature (21)..(21): n is a, c, g, or t
  misc_feature (32)..(32): n is a, c, g, or t
  misc_feature (61)..(61): n is a, c, g, or t
  misc_feature (105)..(154): n is a, c, g, or t
  misc_feature (198)..(198): n is a, c, g, or t
  misc_feature (270)..(350): n is a, c, g, or t
tctgccaggaagcctgcaccncaggggtgaantctttgccgaaatggattgccaaaacggncaccagcacatttcccaggagcttgaagttctcaggatccacannnnnnnnnnnnnnnnnnnnnnnnnnnnnnnnnnnnnnnnnnnnnnnnnnatcatccaggtgctttatggcatctcccaaggaagtcagcaccntcttgccatgtgccttgactttggggttgcccatgatggcagaggcagaggacaggttgccaaagctgtcannnnnnnnnnnnnnnnnnnnnnnnnnnnnnnnnnnnnnnnnnnnnnnnnnnnnnnnnnnnnnnnnnnnnnnnnnnnnnnnnggcaggcttgtgatagtagccttgtcctcctctgtgaaatgacccatggcgtctggactaggagcttattgataacggcagacgttcc

SEQ ID NO: 381309 - DNA, 413 bp, Homo Sapiens
  misc_feature (13)..(13): n is a, c, g, or t
  misc_feature (26)..(26): n is a, c, g, or t
  misc_feature (36)..(36): n is a, c, g, or t
  misc_feature (80)..(129): n is a, c, g, or t
  misc_feature (245)..(331): n is a, c, g, or t
gggtgaatctttnccgaaatggattnccaaaacggncaccagcacatttcccaggagcttgaagttctcaggatccacannnnnnnnnnnnnnnnnnnnnnnnnnnnnnnnnnnnnnnnnnnnnnnnnnatcatccaggtgctttatggcatctcccaaggaagtcagcaccttcttgccatgtgccttgactttggggttgcccatgatggcagaggcagaggacaggttgccaaagctgtcannnnnnnnnnnnnnnnnnnnnnnnnnnnnnnnnnnnnnnnnnnnnnnnnnnnnnnnnnnnnnnnnnnnnnnnnnnnnnnnnnnnnnncttgtgatagtagccttgtcctcctctgtgaaatgacccatggcgtctggactaggagcttattgataacctcagacgttcc

SEQ ID NO: 381310 - DNA, 573 bp, Homo Sapiens
  misc_feature (84)..(170): n is a, c, g, or t
tggaacgtctgaggttatcaataagctcctagtccagacgccatgggtcatttcacagaggaggacaaggctactatcacaagnnnnnnnnnnnnnnnnnnnnnnnnnnnnnnnnnnnnnnnnnnnnnnnnnnnnnnnnnnnnnnnnnnnnnnnnnnnnnnnnnnnnnnntgacagctttggcaacctgtcctctgcctctgccatcatgggcaaccccaaagtcaaggcacatggcaagaaggtgctgacttccttgggagatgccataaagcacctggatgatctcaagggcacctttgcccagctgagtgaactgcactgtgacaagctgcatgtggatcctgagaacttcaagctcctgggaaatgtgctggtgaccgttttggcaatccatttcggcaaaagaattcacccctgaggtgcaggcttcctggcagaagatggtgactgaagtggcagtgcctgtcctccagataccactgagctcactgcccatgatgcagacgctttcaaggataggctttattctgcaagcaatcaaataataaatctattctgctaagagatcaca

SEQ ID NO: 381311 - DNA, 1252 bp, Homo Sapiens
  misc_feature (725)..(764): n is a, c, g, or t
  misc_feature (1103)..(1103): n is a, c, g, or t
  misc_feature (1108)..(1109): n is a, c, g, or t
  misc_feature (1121)..(1121): n is a, c, g, or t
  misc_feature (1156)..(1156): n is a, c, g, or t
  misc_feature (1162)..(1162): n is a, c, g, or t
  misc_feature (1172)..(1172): n is a, c, g, or t
  misc_feature (1174)..(1174): n is a, c, g, or t
  misc_feature (1197)..(1197): n is a, c, g, or t
  misc_feature (1201)..(1201): n is a, c, g, or t
  misc_feature (1203)..(1204): n is a, c, g, or t
  misc_feature (1212)..(1212): n is a, c, g, or t
  misc_feature (1217)..(1219): n is a, c, g, or t
  misc_feature (1223)..(1223): n is a, c, g, or t
  misc_feature (1226)..(1226): n is a, c, g, or t
  misc_feature (1231)..(1231): n is a, c, g, or t
  misc_feature (1246)..(1246): n is a, c, g, or t
ggtccggaattcccgggatgtggcagtggacggggcggctgggcctggaacagtcggagcagccgctagcagaaggatgacccaagacgggaagcgggctgctgagcctcgccgattcccgtgcttgtaactgccccagccggacaccccccctcccttgacctacccggtctgtgtctcgttccggctcggcctgcgccccccctcgcttcccagccggtttcccctaaggatgggcctgacccgtatcccaagctcttagcgctcaggtcttttccttccgccgacccgaagtcatcgctgggagtactggttgccctttcctcagtccttcagtgaatctacagacctattttctcaggagctcagcctggccttacttcagtgataaaaggaggaaaggctggctacagcaaacatcattcaagatgtccagcaaagggagcagcacagatggcagaacagacttagctaatggaagcctgtctagcagtccagaggagatgtctggagctgaagaggggagggagacatcctcaggcattgaagtggaggcctcagacctgagtttgagcttgactggggatgatggtggccccaaccgcaccagcacagaaagtcgaggcacagacacagagagctcaggtgaagataaggactctgacagcatggaggacactggtcattactccattaatgatgaaaatcgagtccatgaccgctcnnnnnnnnnnnnnnnnnnnnnnnnnnnnnnnnnnnnnnnncagcctcggcgccgtgtacagcgcaagggagctaaccgtgaccaggactcatcagatgatgagcgggccctagaggactgggtgtcctcagaaacatcagctctaccccgacctcgctggcaagccctccctgcccttcgggagcgggagctggggttcaagtgcccgctttgtctatgaggcctgtgggggcaagagtctttgtgcagcgtttccgcctgcagcatgggcttgagggccatactggttgtgtcaataccctgcactttaaccagcgcggcacctggctggccagtggcagcgatgacctgaaggtggtggtgtgggattgggtacggngcacnngtactggacttnagagtggcacaaaataatgtgttcaggcaagtatntccaanagtggtgatntntctggcatgtgtgccgtgacggnggtngnnagagactnttgcnnnaatnttnaaaanaaaaagtgtggccanacaagg

SEQ ID NO: 381312 - DNA, 1328 bp, Homo Sapiens
  misc_feature (874)..(978): n is a, c, g, or t
  misc_feature (1053)..(1054): n is a, c, g, or t
ttggccgccgctgaggaaggctgtagtgtcggggccgaagcggacagggaattggaggagcttctggaaagtgctcttgatgatttcgataaagccaaaccctccccagcacccccttctaccaccacggcccctgatgcttcggggccccagaagagatcgccaggagacactgccaaagatgccctcttcgcttcccaagagaagtttttccaggaactattcgacagtgaactggcttcccaagccactgcggagttcgagaaggcaatgaaggagttggctgaggaagaaccccacctggtggagcagttccaaaagctctcagaggctgcagggagagtgggcagtgatatgacctcccaacaagaattcacttcttgcctaaaggaaacactaagtggattagccaaaaatgccactgaccttcagaactccagcatgtcggaagaagagctgaccaaggccatggaggggctaggcatggacgaaggggatggggaagggaacatcctccccatcatgcagagtattatgcagaacctactctccaaggatgtgctgtacccatcactgaaggagatcacagaaaagtatccagaatggttgcagagtcatcgggaatctctacctccagagcagtttgaaaaatatcaggagcagcacagcgtcatgtgcaaaatatgtgagcagtttgaggcagagacccccacagacagtgaaaccactcaaaacgctcgttttgagatggtgctggatcttatgcagcagctacaagatttaggccatcctccaaaagagctggctggagagatgctgacgtggctttttttctgtggctcccagtgggtctacggaccttggctgacatatnnnnnnnnnnnnnnnnnnnnnnnnnnnnnnnnnnnnnnnnnnnnnnnnnnnnnnnnnnnnnnnnnnnnnnnnnnnnnnnnnnnnnnnnnnnnnnnnnnnnnnnnnatgagccaccgcgcccggccagaccttacatttttaaaaagcactctggctgccttatgttttactgtaatggcnnatatggaagtagacaaacgaggaagcctgtctagcagtccagaagagatgtctggagctgaagaagggagggagacatcctcaagcattgaagtggaagcctcagacctgagtttgagcttgacttggggatgatggtgggcccaaccggcaccggcacagaaagtccaaggcccagacccccgagaagctcagggtgaagtataaggactcttgacagccttgaaggaaacctggggtcaattcctcccctttaagggatgaaaaaacccggg

SEQ ID NO: 381313 - DNA, 952 bp, Homo Sapiens
  misc_feature (811)..(847): n is a, c, g, or t
  misc_feature (856)..(856): n is a, c, g, or t
  misc_feature (920)..(920): n is a, c, g, or t
ggatcggggtgatctgctggatctccggcagcatcctgcagtccggcccaggagagaagtggggaggcggcggtgggggcggggcggcgtccggctctgagagagctgggggaggagcgcggcggcgacggcggcggtggctctagaaggggaggtggaggatctcctttcctcttctcagacccgggagcgtccgggacgcggagcccggagctggggcgacgaggcgattgcgggggcctgggctaactgctggctaccaatattctactttctgtctctatgaatgtgactaccctggttacctcatataatctccctggaaaaggagacatgaatgtctgcaatgatacttcctgacaagaagttgatacaagaaaaggaaaggagattaacagctagtgagcagaatttcgaacagcaggatttcgtattttttgcttccaactgcacacttccgttgcccacttttaaatcagagatacctacactcaaaacccagacaaggcaaaaggatacttttcttgtatattttttgagatcgaagaaacgacaatgtccaggaaacagaaccagaaggattcatcaggattcatttttgatttgcagtccaataccgtactggcccagggaggagcttttgagaacatgaaagagaagataaatgcggtacgtgcaatagttcctaataagagcaacaatgaaattatcctggttttgcagcactttgataactgtgtggacaaaacagtacaagcattcatggaagggtagtgccagtgaagtactcaaagaatggacagtaacaggnnnnnnnnnnnnnnnnnnnnnnnnnnnnnnnnnnnnncctgccgcngaaccaagtaacggcatcccagattccagtaaatcagtttccattcaagaggaacagtctgcgncttcctcagagaaaggtggtatgaatggctac

SEQ ID NO: 381314 - DNA, 1216 bp, Homo Sapiens
  misc_feature (89)..(89): n is a, c, g, or t
  misc_feature (91)..(91): n is a, c, g, or t
  misc_feature (172)..(172): n is a, c, g, or t
  misc_feature (1025)..(1061): n is a, c, g, or t
ctggtaggcttgcccattgaagtttgctatggctgcagaagtctctcccggtgcaaagtttttccttgttagcacttgtaaggtggagnanaggcacaggtgaaagaggaagcagcagaggcatcacttgggctactcaaggacacagatgtaactgagctacatcgggatntggtcgaatagctgttctttggatgagacacttgtccaaatgaatcaatgctcttctttagggtctctacatcacaggtgaaccgggctactcgtcccagatcctcatcatatttacgttcactaacaaagtgcttgatatcagctctgagctcaaccaattgctgctctgacatttgaacagccacatgagtcatcttctttagaagttcagccttcttttgtcggctgagcaaaatttccattgcttcagctttcactttgtccatttcagcaagcaacgccacttctcgatccattaaacagctctccaattcagcaaaggcttggtttcattgtcgtgaatggaggcatccatctcttcttgaactacaactcgataccgtgcaagagacactgtgcagcgctggaggtcttttacagatttttccatattggaacttagctttttactggtggcgaggggaacatcttccatccccatatttgaaaactgagtttctgtggtaggtcttgagagagatttggcagcattcctggcttgttgagaattgtgaatagagtgcatagtcaaagacttggtctcaaaatcagagacaccattctgcagcatggatcctgttctatccagcgtatctagcatggcagactcgggatcctccaattctctggcatctattgaaagtgtctccaaaccttcactgagtgagtccacagactcagtgtcattgatggcaccattgacatggtagccattcataccacctttctctgaggaaggcgcagactgttcctcttgaatggaaactgatttactggaatctgggatgccgttacttggttctgcggcaggnnnnnnnnnnnnnnnnnnnnnnnnnnnnnnnnnnnnncctgttactgtccattctttgagtacttcactggcactaccttccatgaatgcttgtactgttttgtccacacagttatcaaagtgctgcaaaaccaggataatttcattgttgctcttattaggaactattgcacgtaccgcatttatcttctc

SEQ ID NO: 381315 - DNA, 1087 bp, Homo Sapiens
  misc_feature (738)..(753): n is a, c, g, or t
cggtccggaattcccgggatcgccgctgcctgagtcgactctgcgccgcccgcctgcgatggaggccgccgcccagttcttcgtcgagagcccggacgtggtctacggccccgaggccatcgaggcgcaatacgagtaccggacgacgcgcgtcagccgcgagggtggcgttctcaatggaggccaactactacggctcgctgactcaggcgggcaccgtgagcctgggcctggacgccgagggccaggaggtgttcgtacccttcagctgcggtgctgcccatggtggcgcccaacgacctcgtgttcgatggctgggacatctcgtcgctgaacctggccgaggcgatgcggcgcgcgaaggtgctggactgggggctgcaggagcaactgtggccgcacatggaggccctgcggccccggccttctgtttacatccccgaattcatcgcggccaaccagagcgcgcgcgcggacaacctcatcccaggctcgcgtgcgcagcagctggagcagatccgcagggacatccgagacttccggtctagcgcggggctggacaaagtcatagtgctgtggaacgcgaacacggagcgcttctgtgaggtgatccaggcctcaacgacacagccgagaaacctgctgggcaccattgagctccgtctggaagtgtcgcccctccccgctcttcgccctgggccaacatcctggaagggctgtgcctttcctcattggggnnnnnnnnnnnnnnnntgtggcccgggactctttgaactccccgtggcaaacaccaagggtttttgtgggcccgcaattccctttccatcccggcccccacatgcgcgccaattattcagcccttggggtcttctctcccttgagaagacaccctatacggcctgcgtcctttgccttccccaacccagtcagcaccaccaccacattaaggggaaagcacatccaccgccctccccaccaccctccccactaccgcgtctggcctctctgccgcgagcccgtatacaaaaaattccgacgcagcctccgcggccctaccatgccgcgttccgacatcggaccccgccat

SEQ ID NO: 381316 - DNA, 927 bp, Homo Sapiens
  misc_feature (555)..(555): n is a, c, g, or t
ccgcgctgtccgccgccgctgcctgagtcgactctgcgccgcccgccgcgatggaggccgccgcccagttcttcgtcgagagcccggacgtggtctacggccccgaggccatcgaggcgcaatacgagtaccggacgacgcgcgtcagccgcgagggtggcgttctcaaggctgggacatctcgtcgctgaacctggccgaggcgatgcggcgcgcgaaggtgctggactgggggctgcaggagcaactgtggccgcacatggaggccctgcggccccggccttctgtttacatccccgaattcatcgcggccaaccagagcgcgcgcgcggacaacctcatcccaggctcgcgtgcgcagcagctggagcagatccgcagggacatccgagacttccggtctagcgcggggctggacaaagtcatagtgctgtggacggcgaacacggagcgcttctgtgaggtgattccaggcctcaacgacacagccgagaacctgctgcgcaccattgagctcggtctggaggtgtcgccctccacgctcttcgccgtggncagcatcctggagggctgtgccttcctcaatgggtctccgcagaacaccctggtgcccggagctcttgagctcgcgtgggagcacccgggttttgtggggcggagatgacttccagtcaagccagacccaaagtcaagtcccgtgccttggggacttccctcctttggcttccgggcctcacagaccaatgttcccatcgttggagtttacacaaccaccctgggggcaaccaacggattggggggaagaaaccttattcggcggggcaatttgggaagttccccgcctccttataagggagggtgtgtcccaaaaacacccaaggcgggcgtgggggaccgaacaactgggcggcgcaaaaccgcaacacc

SEQ ID NO: 381317 - DNA, 709 bp, Homo Sapiens
gagtttctgtccttatccccacttccagagtccatggtgctaggatgtgggccaggtaaggctgtggaagaacgcagaagtgaaccagcccctgggcctctgctttaggtgaagagtgcggagtggtgcttggggtggactgggctgatgcaggctgcctctcgtgtctttgtgttacctctccactctgtaactgtagtttgtggagtgcttcggccactcgaaggtacttggtctcctcggtggtgaggcccttgtggggtgtgtagccagcatctctcagccctgcctgtcgctcaaaatgctgaatgctttcctgggtctgttttgtgatcagagaattcatgatgacatgggtagcatttagccgttcaccactgggaccttgtccacactgtcaatggctgatgacagggtcatggcaggggagggtagactggccatctccttcctccacctgtgatcctgctgccagcagggactgcctgcggcccggagtccggcacataaaaaggttccgagggcaccacgtctcccgagaggctgtggcgcagtctggacccaagccattgtgagagcgacggcgatttcgaagcctcgtgccgaattcagccacccaggcctcagctaccttagtaacgttatagttactgccatcgtttacaaacacgtcgggttgcaacagtgctgggggggatggggtgtggtg

SEQ ID NO: 381318 - DNA, 791 bp, Homo Sapiens
agcggggtgctgctacctagtgggtcttggggaccttcgaaatcgccgccgctctcacaatggcttgggtccagactgcgccacagcctctcgggagacatgagccctcggaacctttttagtgccggactccgggccgcaggcagtcccgcggcagcaagatcacagaacctctggatggactcttcctgggaagctttgctactttgcagcagctggacaatgttcctcattaacatctgtctgtccgcttagtcatcacatcatttcactgtggtggcagggactcagctcggaattctgtatagaaaaagcacctggatcccagtctttcaatggcttcaagacaaccagaagtgcctgaaactgaagttacagagtggagaggtaacaaaagaagagaggcagcctgcatcagcccagtccaccccaagcaccactccgcactcttcacctaagcagaggcccagggctggttcacttctggttcttccacagccttacctggcccaaatcctagcaccatggactctggaagtggggataaggacagaaacttgtcagataagtggagcctctttggaccgagatcccttcagaagtacgattctggaagttttgccacccaggcctaccgaggagcccagaagccctctccattggaactgatacgtgcccaggccaaccgaatggctgaagatccagcagccttgaaggcccccccaagatggacatcccagtgatggaacggaaagaaaacaggcaccaagggccaataacctcaaacccgg

SEQ ID NO: 381319 - DNA, 1185 bp, Homo Sapiens
  misc_feature (254)..(304): n is a, c, g, or t
  misc_feature (400)..(623): n is a, c, g, or t
  misc_feature (719)..(785): n is a, c, g, or t
  misc_feature (923)..(1018): n is a, c, g, or t
gctggtaccggtccggaattctccggattccgcaccctacccggtccgaagccaccttcctcctctctctcaggcacgtcctcgacctcagttgccacgtgcacatgctggtgccttccaggtcggtctttctccaccagactccacctggaactttcttccttttcgtcctgtgctggcctaaaccctgctcggcctcggccctcagctgccggctctaacaaagcctctgtctttcccagacccctgtgtannnnnnnnnnnnnnnnnnnnnnnnnnnnnnnnnnnnnnnnnnnnnnnnnnntgggctcaagcgatcctcccacctcagcctccatatagctggtggggaccaagtttctaacacatgaatgttgggagacacattcagaccatcgcnnnnnnnnnnnnnnnnnnnnnnnnnnnnnnnnnnnnnnnnnnnnnnnnnnnnnnnnnnnnnnnnnnnnnnnnnnnnnnnnnnnnnnnnnnnnnnnnnnnnnnnnnnnnnnnnnnnnnnnnnnnnnnnnnnnnnnnnnnnnnnnnnnnnnnnnnnnnnnnnnnnnnnnnnnnnnnnnnnnnnnnnnnnnnnnnnnnnnnnnnnnnnnnnnnnnnnnnnnnnnnnncccaagatatttaaaaactcatcagcacctgctttctgcatctggaccctgatcttctggtgggtttaccagttacttgtagagtgtccctgtgannnnnnnnnnnnnnnnnnnnnnnnnnnnnnnnnnnnnnnnnnnnnnnnnnnnnnnnnnnnnnnnnnnaaggaccatgtttttggaggagactgttttatgagtgaatttcaggggacacattcagatcatggcagtggcattataaagagagacacaaaagctttctctctctgccatgtaagactaccacacaaagactgccannnnnnnnnnnnnnnnnnnnnnnnnnnnnnnnnnnnnnnnnnnnnnnnnnnnnnnnnnnnnnnnnnnnnnnnnnnnnnnnnnnnnnnnnnnnnnnnggtagatgggttgggctaagttggaaggcctgagaaacacgcacatgggggacctgcgttcaaggttaaagacttgagacacctgctcagtggtctgagtaggggcgacacccctcacgttgggcggactatctcatcccatgggggcgcgatggataaaaaggtgg

SEQ ID NO: 381320 - DNA, 1608 bp, Homo Sapiens
  misc_feature (286)..(352): n is a, c, g, or t
  misc_feature (448)..(671): n is a, c, g, or t
  misc_feature (767)..(817): n is a, c, g, or t
  misc_feature (1115)..(1191): n is a, c, g, or t
  misc_feature (1193)..(1206): n is a, c, g, or t
gcgtctggccttccaacttagccatccatgctaccatgtctttcttagagtttggaaggctggcaagtgccaaggatcaaggttgcaggcagaatcttggtgtctgagggaagcccacctgcttctgggtttgcagatggcagtctttgtgtggtagtcttacatggcagagagagagagcaagctttttgtgtctctcttgtataatgccactgccatgatcgtgaatgttgtcccctgagagttcacgtgcatttggcagtcttcctccggaacatggtccttnnnnnnnnnnnnnnnnnnnnnnnnnnnnnnnnnnnnnnnnnnnnnnnnnnnnnnnnnnnnnnnnnnntcacagggacactctacaagtaactggtaaacccaccagaagatcagggtccagatgcagaaagcaggtgctgatgagtttttaaatatcttgggnnnnnnnnnnnnnnnnnnnnnnnnnnnnnnnnnnnnnnnnnnnnnnnnnnnnnnnnnnnnnnnnnnnnnnnnnnnnnnnnnnnnnnnnnnnnnnnnnnnnnnnnnnnnnnnnnnnnnnnnnnnnnnnnnnnnnnnnnnnnnnnnnnnnnnnnnnnnnnnnnnnnnnnnnnnnnnnnnnnnnnnnnnnnnnnnnnnnnnnnnnnnnnnnnnnnnnnnnnnnnnnngcgatggtctgaatgtgtctcccaacattcatgtgttagaaacttggtccccaccagctatatggaggctgaggtgggaggatcgcttgagcccannnnnnnnnnnnnnnnnnnnnnnnnnnnnnnnnnnnnnnnnnnnnnnnnnnaaggcaccagcatgtgcacgtggcaactgaggtcgaggacgtgcctgagagagaggaggaaggtgccccgcggacccgggtagggtgcggaggtcgggaatggagaacggtcgttgggcaggtccgggtacccgtagccagaaccacccgggtgtgcgcagctcggccaggccccgcctcccggcgtccccgccccctgctgggcctctctccgcagccgcgagacccgcgcttggcgcataggccggttctaatttacaagaacaccgcggcctgaggccggagagtcccttcaacnnnnnnnnnnnnnnnnnnnnnnnnnnnnnnnnnnnnnnnnnnnnnnnnnnnnnnnnnnnnnnnnnnnnnnnnnnnnncnnnnnnnnnnnnnncatggccgaaaccaggaagctgcgcgatggcgccacggcccctcttctcccggcctgtgtccggaaggtttccctccgaggcgccccggctcccgcaagcggaggagagggcgggacgtgccggggccggagctcagaggccctggggccgctctgctctcccgccatcgcaagggcggcgctgacctgaggcctccccgcaaaggtccccgaggcggcggcggcggcgggctgtgagaaccgcagaagaacgctgggcgcgcagcgacccgtccacccccgcgaggagagacttccacagaggcagcgtttccacagcccaaagccacgtttctagggtgatgcagccccagtaagttcctggcggggaagctcacggctgtcaaaagaactcttcgccaa

SEQ ID NO: 381321 - DNA, 927 bp, Homo Sapiens
ggggccgagcccaggccggttccggcgaagttaaaccctcggagctggcctcggactgctggggcgttaccccttcggccacccccgctgaccatggcagtgtttcatgacgaggtggaaatcgaggacttccaatatgacgaggactcggagacgtatttctatccctgcccatgtggagataacttctccatcaccaaggatcagtttgtgtgtggagaaacagtcccagcccccttcagccaacaaagaattagttaaatgctgaagaagccttcaggaatccaaatcctgaacatttggaatgagcccagatagaaatatcgaatgcaaagctactggcttcacagagacaaccatttatgatttgctgttctgtaagagtgtggattctttctatcaacggctgatatcatcttcaggaagcaagtccataacatgacatatctggattttgcgcttacaaccttaaattggaagcattcttaattatgcgatccaaatttacaagaaagataattttccaaacaggtggctttcttttccccttggggttcatcattttgtcctagtcttgaaagccacgatttatctttcggggggatcctggaccgcaacagggcattccgtcctagcccttccaggtgcatttgaggggaatttcccccgagtcaacccaaaagaaggcattgtggcccctgagcgtcccgtagccgtggcgcccggggttaccgcgggagcggcggcctgcgcgacgcatcgacgggggtagcggggggctgggtagcgcggacgccccgccagccggtggggctctttgggtgccgggccgccgcccgcggcaccccttcgcggagagaagccttttctccccggaagccctttttctcgcctttcaggaacacgctctggcgccccccccgcgat

SEQ ID NO: 381322 - DNA, 944 bp, Homo Sapiens
agcggagggctgggccttagattaggtcagggagagggtggcggagagcctctgtctctctgcccgatccctgccttagagtcccaacctgggatatttctgtcgaggaggggactcgttttttgtttcccagggcttttggggcgaccgaagctcgcctgaccttcctaggtgtttcccctaagtgacgcttctaggggaaaatgatgtcggcatttctcgctgaaggccctggggttctcacccaccttggggggaaggaagatttggagaatggggaagacgtggcaacgtgtcctagctgctctctcattataaaagtcatttatgacaaagatcagtttgtgtgtggagaaacagtcccagccccttcagccaacaaagaattagttaaatgctgaagaagccttcaggaatccaaatcctgaacatttggaatgagcccagatagaaatatcgaatgcaaagctactggcttcacagagacaaccatttatgatttgctgttctgtaagagtgtggattctttctatcaactgctgatatcatcttcaggaagcaagtccataacatgacatatctggattttgtgcttagaaccttaaatcggaagcattcttaacttatgcatctaaatttaaagagaagataatttcaaaacgagtcgcctttcttatcccttggttttcatcattttgcatatcttaaagcaaattaacttcggtcatctggacaaccaggcgatccatcctaccctcagtcactctcacggatgttctttaataacaaaaaagcagaacttggaattcctggaccttggtactcctcacgacatcagtgcacgactagcgccagtccctttgacaaacgctgaccatcacggtttggcgcggcacatacacgatccaaagcatgttacaccgcgcttcctcccagatacacac

SEQ ID NO: 381323 - DNA, 533 bp, Homo Sapiens
tcgggcgggagcagcagcactgcctctccacgctccgggaaaccgcagctggcgtgtgccacatcggtcccacctcgctttacaaaacagtcctgaagcttaatcaaataaaactattgtacacaacatttacattagaaaaagagagctgggtgtaggaaagccgggcctggtgttccctttaagcgaaggtggctccacagttggggcatcgtcgcttcctcaaggcaaaacagcaaatgaacccaaaggggaagaggatgatggccaggaagatgcccaggaaggtgaagcagtcctccagcaccccaaccctgcagacaggacagcctcctacgaccacgatagagttggcaggatagcgggtgacggtccggctgtggatgttgtagaccctgggatggtgggtgggtatccctgtgacgaggtaggggtagggcggcggcgggggcgcggcggggatggcgccgtagccgtgcgggccgcacgcgtagtcgccctggccggcctccaggttgtaggcgggcggccgc

SEQ ID NO: 381324 - DNA, 1255 bp, Homo Sapiens
  misc_feature (185)..(194): n is a, c, g, or t
  misc_feature (251)..(251): n is a, c, g, or t
  misc_feature (265)..(265): n is a, c, g, or t
  misc_feature (267)..(267): n is a, c, g, or t
ttggtcatcatcctgttcccctttgggttcatctgccgttttgccttgaggaagcgaagatgccccaactgcggagagaccttcgcttaaagaggacaccacacccggctttcctacacccagttctctttttctaatgtaaatttcgtgtatagtagttttatataattaagcttcagaactgnnnnnnnnnngttgttgatgttgttgtttgagtcagagtttcattcttgtcatccaggctggagtgnaagacatgatcttngnttatcgcaacctctacctccaaatttcaagcgattctactggctcaccctccagagagagctgggactacaggaaggaaccatcacgggcgggaaagttttgttgttttagcaaagactggagctatacgacgatggcacgatggcttgggacttccgaaaccctgtgaacatagtgcgaaagacctctcaggtcctgctgtatgtctttgaaaaagtgccaactaggtacggggtcgttctgggagctgtgatcaggggtgtcctcagggtggtgctgttgctgctgctgcttttcaacggggttcggtactgctggctaacgcaggcaggcggccctgcagaggaggcttcagggctatggagaaggggaaattgcacaagccagggaaaggacgcgtcgaagcgcgggcggcagacgccagtgctgtatgcaatgctggaccacagcagaagcaccaaagctgtcagtgagaagaaggccaaggggctgggggagtctcgcaaggataagaaatagcggttagcgggccgggcgggggatcgggggttaggggtggagtccgccaaaggcccaaaggtgatggtcatcgagatggagctacgaaaggatgagcagagcccggagctccggcctgctgtcaagtcccccagcagaaccagcctcaaaaacgccctcaagaacatgatgggcctgaactcggacaagtgatcgccacccccccaccccaggccctgccagagcagggggacctaggctcctcttacccccgtctaggtgctttccctctttgctcccccgccctgccctgccctcacctcccttttgagatgtaagtttcattccagaaatcttttccccaagtaattgtattctcccccaccttcacccctgggctttccggggaacccaggaagctaattcctaccccctcacctgccccggggggcctgggtgttttggtggcccgttccccctgaagccctgg

SEQ ID NO: 381325 - DNA, 798 bp, Homo Sapiens
caggcctggcagcaggtacatgtcggcgacgctcagcacatcataggctgcctcgggggacagctcagtgtggtcgctgtacatgtagtagagcacgtgagtgaagacgtcgggtgagatgccatgcagggtgacggctggggggccccctgaggtcgctggctcctcgctctctcggaagtggtcatccagcagggctcggaagtagtcactgcgccaatgtccaggcggcctgtgtacaggtactgcagcagggccccaaaggccacggggttgatcagtgggtgcctgagaaccacgacactcttgcccttccatttggtgtccagcatgttggcaaagtaggcactacgtgcacccaggacgcagcgatgcacccggaatggcttcccgtgtactacaaagaccacgtcactgtggatgccctgctctagaagccgctgcaagaagtcgtcatagtaatccggcctcctgcaggaagccgtgacaaaaaaagtaatcgcgtagagcccggcggatggggtcactcagtgccccatagaggcagcgctcaccatcgaaggtgttggcctcgcagcgggctccattggccagaaggtagagtaccagctcctcgtgcccacacaagcaggcatagtacctccacgtctcgctgctccagcaggtaccgcactcggcccacatcccccttcctgcagatggcgaacaggtcgctggtgtccatggcgcggaggatggtcccgtattttagcaccctcgggcggcgaagccgcttctcgaaattccggaccggtccac

SEQ ID NO: 381326 - DNA, 1561 bp, Homo Sapiens
cggctcgggtaccatcctccgcgccatggacaccagcgacctgttcgccagctgcaggaagggggatgtgggccgagtgcgaccatgaacccgtcctgacccaggctctgacctccttcctgcccaggtacctgctggagcagcgagacgtggaggtactatgcctgcttgtgtgggcacgaggagctggtactctaccttctggccaatggagcccgctgcgaggccaacaccttcgatggtgagcgctgcctctatggggcactgagtgaccccatccgccgggctctaacgcgattacaagcaggtcaaggctttcctgcaggaggcgggattactatgacgacttcttgcagcgtacacgggaagccattccgggtgcatcgctgcgtcctgggtgcacgtagtgcctactttgccaacatgctggacaccaaatggaagggcaagagtgtcgtggttctcaggcacccactgatcaaccccgtggcctttggggccctgctgcagtacctgtacacaggccgcctggacattggcgtagagcatgtgagtgactgtgagcgcctggccaagcaatgccagctgtgggacctgctcagcgacctggaggccaagtgcgagaaggtgtctgagtttgtggcgtctaagccaggcacgtgtgtgaaggtgctgaccatcgagcccccacctgcagacccccgcctccgggaggacatggcgctgctggccgattgtgccctgccccccgagctccgaggtgatctttgggagctgcccttcccttgtcctgacggcttcaacagctgccctgacatctgcttccgagtggctggctgcagcttcctctgccacaaggcctttttctgtggccgcagtgactacttccgagccctgctggatgaccacttccgagagagcgaggagccagcgacctcagggggccccccagccgtcaccctgcatggcatctcacccgacgtcttcactcacgtgctctactacatgtacagcgaccacactgagctgtcccccgaggcagcctatgatgtgctgagcgtcgccgacatgtacctgctgccaggcctgaagaggctgtgcggccgcagcctggctcagatgctagacgaggacactgcggtgggtgtgtggcgcgtggccaagctcttccgcctggcgcggcttgaggaccagtgcactgagtacatggccaaggtcattgagaagctggtggagcgggaggacttcgtggaggcggtgaaggaggaggcagcggctgtggcagcccggcaggagacggactctatcccgctggtggacgacatccgcttccacgtggccagcacggtgcagacctacagcgccataaaggaggcgcagcagcgtctgcgggcactcaaggacctgctcgtgtccatcggtctggactgttgagcccctagctgggaagccccaggggccaggaactctcttggagacaagcatgtgtatgcgttttgtgtgcagctcttctttcctgctccccggcacaatgagggcttcatggggggtgcgaaggggg

SEQ ID NO: 381327 - DNA, 774 bp, Homo Sapiens
tgtatctgtaggtgggctctgtgtccccacagcctcttgagagggagggagctggtagatagtctcccacccctggcagagtccctgcataggtcttgactagctgcctctgtcccaccattctgacagcccccgcaggtaggcatggttatctatacctcatggactgggaactagaggcacagggaggtgcagtgacttgcccagggccccacagctagaagtgtcagacccaggtctgtataactcggagctcagacccctggcttcctgcgagggccctgcctcccgcctgccctgccagcctgctcagggcaatgggagaaccccccagtcttctgccccctagcggtcctgcagatccctgtgggaatctgggccagccccccgacccccaaccccatacatgcgcagggagctcctactcccactggaagccttcccgccagtgccccccaaccaccacaggccctagccttggctgttgtgccctgggagcccttggtgacctcggggggcaccttcatccctgtcttcactgcagctgtcccccgaggcagcctatgatgtgctgagcgtcgccgacatgtacctgctgccaggcctgaagaggctgtgcggccgcagcctggctcagatgctagaccaggacactgtggtgggtgtgtggcgcgtggccaagctcttccgcctggcgcggcttgaggaccagtgcactgagtacatggcccaggtcattgagaaactggtggagcggaaggacttcgtggaggc

SEQ ID NO: 381328 - DNA, 339 bp, Homo Sapiens
  misc_feature (26)..(26): n is a, c, g, or t
  misc_feature (171)..(268): n is a, c, g, or t
  misc_feature (300)..(300): n is a, c, g, or t
gtgaattaatttccttggagcaaagnctgctctcaagccttgaccaaagcagcctttccaggggctggtctatacccatgatctctcttctctggcacacagaaagtgaatggtcagactcatctcttgaatggcaagccacgtgtttattacatttcttgttcaccagannnnnnnnnnnnnnnnnnnnnnnnnnnnnnnnnnnnnnnnnnnnnnnnnnnnnnnnnnnnnnnnnnnnnnnnnnnnnnnnnnnnnnnnnnnnnnnnnntctgctaggtaggccagtcttctgtccaaggntgtcctaggaccaggtcatctcagccatgtggggttgcc

SEQ ID NO: 381329 - DNA, 217 bp, Homo Sapiens
  misc_feature (14)..(14): n is a, c, g, or t
  misc_feature (24)..(24): n is a, c, g, or t
  misc_feature (34)..(34): n is a, c, g, or t
cttggcctatctanctttatccanatgcagaaanatctggcaaccccacatggctgagatgacctggtcctaggaaacccttggacagaagactggcctacctagcagacctggatttttcttcttgatctgctgcttccaagttgtgtgaccttggctaagtcacttaacctttctgattgtcatttcgctttttaataaagtgggtctggtgaac

SEQ ID NO: 381330 - DNA, 667 bp, Homo Sapiens; identical to SEQ ID NO: 347672

SEQ ID NO: 381331 - DNA, 1250 bp, Homo Sapiens; identical to SEQ ID NO: 347673
  misc_feature (48)..(84): n is a, c, g, or t
  misc_feature (1121)..(1124): n is a, c, g, or t
  misc_feature (1126)..(1126): n is a, c, g, or t
  misc_feature (1128)..(1128): n is a, c, g, or t
  misc_feature (1226)..(1226): n is a, c, g, or t

SEQ ID NO: 381332 - DNA, 971 bp, Homo Sapiens; identical to SEQ ID NO: 347674

SEQ ID NO: 381333 - DNA, 752 bp, Homo Sapiens; identical to SEQ ID NO: 347675

SEQ ID NO: 381334 - DNA, 488 bp, Homo Sapiens; identical to SEQ ID NO: 347676
  misc_feature (21)..(21): n is a, c, g, or t
  misc_feature (33)..(33): n is a, c, g, or t
  misc_feature (73)..(73): n is a, c, g, or t
  misc_feature (146)..(146): n is a, c, g, or t

SEQ ID NO: 381335 - DNA, 1277 bp, Homo Sapiens; identical to SEQ ID NO: 347679
  misc_feature (1)..(1): n is a, c, g, or t

SEQ ID NO: 381336 - DNA, 499 bp, Homo Sapiens; identical to SEQ ID NO: 347680
  misc_feature (21)..(21): n is a, c, g, or t
  misc_feature (26)..(26): n is a, c, g, or t

SEQ ID NO: 381337 - DNA, 725 bp, Homo Sapiens; identical to SEQ ID NO: 347684
  misc_feature (126)..(126): n is a, c, g, or t

SEQ ID NO: 381338 - DNA, 471 bp, Homo Sapiens; identical to SEQ ID NO: 347685
  misc_feature (30)..(30): n is a, c, g, or t
  misc_feature (194)..(244): n is a, c, g, or t

SEQ ID NO: 381339 - DNA, 2005 bp, Homo Sapiens; identical to SEQ ID NO: 347686
  misc_feature (439)..(439): n is a, c, g, or t
  misc_feature (970)..(970): n is a, c, g, or t
  misc_feature (1349)..(1349): n is a, c, g, or t
  misc_feature (1726)..(1772): n is a, c, g, or t
  misc_feature (1775)..(1776): n is a, c, g, or t

SEQ ID NO: 381340 - DNA, 899 bp, Homo Sapiens; identical to SEQ ID NO: 347688

SEQ ID NO: 381341 - DNA, 693 bp, Homo Sapiens; identical to SEQ ID NO: 347689
  misc_feature (51)..(51): n is a, c, g, or t

SEQ ID NO: 381342 - DNA, 2455 bp, Homo Sapiens; identical to SEQ ID NO: 347693
  misc_feature (36)..(36): n is a, c, g, or t
  misc_feature (72)..(72): n is a, c, g, or t
  misc_feature (2354)..(2401): n is a, c, g, or t

SEQ ID NO: 381343 - DNA, 400 bp, Homo Sapiens; identical to SEQ ID NO: 347694
  misc_feature (61)..(173): n is a, c, g, or t

SEQ ID NO: 381344 - DNA, 787 bp, Homo Sapiens; identical to SEQ ID NO: 347695

SEQ ID NO: 381345 - DNA, 488 bp, Homo Sapiens; identical to SEQ ID NO: 347696
  misc_feature (396)..(396): n is a, c, g, or t
  misc_feature (422)..(422): n is a, c, g, or t
  misc_feature (475)..(475): n is a, c, g, or t

SEQ ID NO: 381346 - DNA, 487 bp, Homo Sapiens; identical to SEQ ID NO: 347697
  misc_feature (38)..(38): n is a, c, g, or t

SEQ ID NO: 381347 - DNA, 508 bp, Homo Sapiens; identical to SEQ ID NO: 347698
  misc_feature (24)..(24): n is a, c, g, or t
  misc_feature (36)..(36): n is a, c, g, or t
  misc_feature (53)..(53): n is a, c, g, or t
  misc_feature (492)..(492): n is a, c, g, or t

SEQ ID NO: 381348 - DNA, 2879 bp, Homo Sapiens; identical to SEQ ID NO: 347700

SEQ ID NO: 381349 - DNA, 653 bp, Homo Sapiens; identical to SEQ ID NO: 347701

SEQ ID NO: 381350 - DNA, 2662 bp, Homo Sapiens; identical to SEQ ID NO: 347707
  misc_feature (69)..(69): n is a, c, g, or t
  misc_feature (75)..(75): n is a, c, g, or t

SEQ ID NO: 381351 - DNA, 543 bp, Homo Sapiens; identical to SEQ ID NO: 347708
  misc_feature (32)..(32): n is a, c, g, or t
  misc_feature (60)..(60): n is a, c, g, or t
  misc_feature (69)..(69): n is a, c, g, or t

SEQ ID NO: 381352 - DNA, 890 bp, Homo Sapiens; identical to SEQ ID NO: 347709
  misc_feature (48)..(61): n is a, c, g, or t

SEQ ID NO: 381353 - DNA, 1313 bp, Homo Sapiens; identical to SEQ ID NO: 347710

SEQ ID NO: 381354 - DNA, 1518 bp, Homo Sapiens; identical to SEQ ID NO: 347711
  misc_feature (808)..(818): n is a, c, g, or t
  misc_feature (1077)..(1085): n is a, c, g, or t
  misc_feature (1223)..(1240): n is a, c, g, or t
  misc_feature (1298)..(1329): n is a, c, g, or t

SEQ ID NO: 381355 - DNA, 3065 bp, Homo Sapiens; identical to SEQ ID NO: 347712
  misc_feature (51)..(83): n is a, c, g, or t
  misc_feature (902)..(916): n is a, c, g, or t
  misc_feature (1100)..(1108): n is a, c, g, or t
  misc_feature (1335)..(1335): n is a, c, g, or t
  misc_feature (1375)..(1375): n is a, c, g, or t
  misc_feature (2971)..(2971): n is a, c, g, or t

SEQ ID NO: 381356 - DNA, 842 bp, Homo Sapiens; identical to SEQ ID NO: 347713

SEQ ID NO: 381357 - DNA, 871 bp, Homo Sapiens; identical to SEQ ID NO: 347720

SEQ ID NO: 381358 - DNA, 763 bp, Homo Sapiens; identical to SEQ ID NO: 347721

SEQ ID NO: 381359 - DNA, 887 bp, Homo Sapiens; identical to SEQ ID NO: 347723
  misc_feature (50)..(50): n is a, c, g, or t
  misc_feature (452)..(452): n is a, c, g, or t
  misc_feature (456)..(503): n is a, c, g, or t

SEQ ID NO: 381360 - DNA, 1458 bp, Homo Sapiens; identical to SEQ ID NO: 347724
  misc_feature (57)..(57): n is a, c, g, or t
  misc_feature (64)..(64): n is a, c, g, or t
  misc_feature (79)..(79): n is a, c, g, or t
  misc_feature (111)..(119): n is a, c, g, or t
  misc_feature (1097)..(1112): n is a, c, g, or t
  misc_feature (1115)..(1131): n is a, c, g, or t

SEQ ID NO: 381361 - DNA, 1083 bp, Homo Sapiens; identical to SEQ ID NO: 347725
  misc_feature (24)..(24): n is a, c, g, or t
  misc_feature (488)..(488): n is a, c, g, or t
  misc_feature (528)..(536): n is a, c, g, or t
  misc_feature (993)..(993): n is a, c, g, or t

SEQ ID NO: 381362 - DNA, 1887 bp, Homo Sapiens; identical to SEQ ID NO: 347726
  misc_feature (6)..(6): n is a, c, g, or t
  misc_feature (485)..(485): n is a, c, g, or t
  misc_feature (1801)..(1837): n is a, c, g, or t

SEQ ID NO: 381363 - DNA, 858 bp, Homo Sapiens; identical to SEQ ID NO: 347727
  misc_feature (672)..(729): n is a, c, g, or t

SEQ ID NO: 381364 - DNA, 674 bp, Homo Sapiens; identical to SEQ ID NO: 347728
  misc_feature (355)..(412): n is a, c, g, or t

SEQ ID NO: 381365 - DNA, 731 bp, Homo Sapiens; identical to SEQ ID NO: 347729
  misc_feature (39)..(39): n is a, c, g, or t
  misc_feature (52)..(52): n is a, c, g, or t
  misc_feature (113)..(113): n is a, c, g, or t
  misc_feature (137)..(138): n is a, c, g, or t
  misc_feature (147)..(147): n is a, c, g, or t
  misc_feature (161)..(161): n is a, c, g, or t
  misc_feature (290)..(298): n is a, c, g, or t
  misc_feature (301)..(347): n is a, c, g, or t

SEQ ID NO: 381366 - DNA, 318 bp, Homo Sapiens; identical to SEQ ID NO: 347730
  misc_feature (43)..(79): n is a, c, g, or t

SEQ ID NO: 381367 - DNA, 506 bp, Homo Sapiens; identical to SEQ ID NO: 347736
  misc_feature (53)..(53): n is a, c, g, or t

SEQ ID NO: 381368 - DNA, 1974 bp, Homo Sapiens; identical to SEQ ID NO: 347737
  misc_feature (8)..(8): n is a, c, g, or t
  misc_feature (25)..(25): n is a, c, g, or t
  misc_feature (29)..(29): n is a, c, g, or t
  misc_feature (137)..(139): n is a, c, g, or t
  misc_feature (141)..(141): n is a, c, g, or t
  misc_feature (223)..(223): n is a, c, g, or t
  misc_feature (255)..(255): n is a, c, g, or t
  misc_feature (319)..(320): n is a, c, g, or t
  misc_feature (329)..(329): n is a, c, g, or t
  misc_feature (335)..(336): n is a, c, g, or t
  misc_feature (354)..(354): n is a, c, g, or t
  misc_feature (356)..(356): n is a, c, g, or t
  misc_feature (359)..(359): n is a, c, g, or t
  misc_feature (361)..(361): n is a, c, g, or t
  misc_feature (370)..(370): n is a, c, g, or t
  misc_feature (392)..(393): n is a, c, g, or t
  misc_feature (398)..(398): n is a, c, g, or t
  misc_feature (400)..(400): n is a, c, g, or t
  misc_feature (407)..(407): n is a, c, g, or t
  misc_feature (416)..(416): n is a, c, g, or t
  misc_feature (420)..(420): n is a, c, g, or t
  misc_feature (423)..(423): n is a, c, g, or t

SEQ ID NO: 381369 - DNA, 456 bp, Homo Sapiens; identical to SEQ ID NO: 347738

SEQ ID NO: 381370 - DNA, 1928 bp, Homo Sapiens; identical to SEQ ID NO: 347739
  misc_feature (159)..(159): n is a, c, g, or t
  misc_feature (216)..(216): n is a, c, g, or t
  misc_feature (232)..(232): n is a, c, g, or t
  misc_feature (251)..(261): n is a, c, g, or t
  misc_feature (263)..(263): n is a, c, g, or t
  misc_feature (266)..(266): n is a, c, g, or t
  misc_feature (275)..(275): n is a, c, g, or t
  misc_feature (287)..(287): n is a, c, g, or t
  misc_feature (296)..(296): n is a, c, g, or t
  misc_feature (298)..(298): n is a, c, g, or t
  misc_feature (314)..(314): n is a, c, g, or t
  misc_feature (328)..(329): n is a, c, g, or t
  misc_feature (336)..(336): n is a, c, g, or t
  misc_feature (339)..(339): n is a, c, g, or t
  misc_feature (343)..(343): n is a, c, g, or t
  misc_feature (350)..(350): n is a, c, g, or t
  misc_feature (355)..(356): n is a, c, g, or t
  misc_feature (366)..(367): n is a, c, g, or t
  misc_feature (371)..(372): n is a, c, g, or t
  misc_feature (374)..(374): n is a, c, g, or t
  misc_feature (376)..(377): n is a, c, g, or t
  misc_feature (402)..(402): n is a, c, g, or t
  misc_feature (408)..(409): n is a, c, g, or t
  misc_feature (412)..(412): n is a, c, g, or t
  misc_feature (430)..(430): n is a, c, g, or t
  misc_feature (435)..(436): n is a, c, g, or t
  misc_feature (473)..(473): n is a, c, g, or t
  misc_feature (485)..(528): n is a, c, g, or t
  misc_feature (547)..(547): n is a, c, g, or t
  misc_feature (555)..(555): n is a, c, g, or t
  misc_feature (625)..(625): n is a, c, g, or t
  misc_feature (627)..(627): n is a, c, g, or t
  misc_feature (655)..(655): n is a, c, g, or t
  misc_feature (671)..(671): n is a, c, g, or t
  misc_feature (677)..(677): n is a, c, g, or t
  misc_feature (721)..(721): n is a, c, g, or t
  misc_feature (727)..(727): n is a, c, g, or t
  misc_feature (747)..(747): n is a, c, g, or t
  misc_feature (756)..(756): n is a, c, g, or t
  misc_feature (760)..(760): n is a, c, g, or t
  misc_feature (763)..(763): n is a, c, g, or t
  misc_feature (766)..(766): n is a, c, g, or t
  misc_feature (773)..(773): n is a, c, g, or t
  misc_feature (778)..(779): n is a, c, g, or t
  misc_feature (787)..(787): n is a, c, g, or t
  misc_feature (796)..(796): n is a, c, g, or t
  misc_feature (807)..(807): n is a, c, g, or t
  misc_feature (818)..(818): n is a, c, g, or t
  misc_feature (821)..(821): n is a, c, g, or t
  misc_feature (829)..(829): n is a, c, g, or t

SEQ ID NO: 381371 - DNA, 1674 bp, Homo Sapiens; identical to SEQ ID NO: 347740
  misc_feature (52)..(88): n is a, c, g, or t
  misc_feature (1163)..(1163): n is a, c, g, or t
  misc_feature (1376)..(1385): n is a, c, g, or t

SEQ ID NO: 381372 - DNA, 1005 bp, Homo Sapiens; identical to SEQ ID NO: 347741

SEQ ID NO: 381373 - DNA, 286 bp, Homo Sapiens; identical to SEQ ID NO: 347745
  misc_feature (67)..(67): n is a, c, g, or t
  misc_feature (242)..(242): n is a, c, g, or t

SEQ ID NO: 381374 - DNA, 462 bp, Homo Sapiens; identical to SEQ ID NO: 347746
  misc_feature (11)..(11): n is a, c, g, or t
  misc_feature (41)..(41): n is a, c, g, or t
  misc_feature (72)..(72): n is a, c, g, or t
  misc_feature (251)..(285): n is a, c, g, or t

SEQ ID NO: 381375 - DNA, 833 bp, Homo Sapiens; identical to SEQ ID NO: 347750
  misc_feature (706)..(706): n is a, c, g, or t
  misc_feature (780)..(780): n is a, c, g, or t
  misc_feature (797)..(797): n is a, c, g, or t

SEQ ID NO: 381376 - DNA, 1622 bp, Homo Sapiens; identical to SEQ ID NO: 347751
  misc_feature (1606)..(1606): n is a, c, g, or t

SEQ ID NO: 381377 - DNA, 1191 bp, Homo Sapiens; identical to SEQ ID NO: 347752

SEQ ID NO: 381378 - DNA, 472 bp, Homo Sapiens; identical to SEQ ID NO: 347753

SEQ ID NO: 381379 - DNA, 1408 bp, Homo Sapiens; identical to SEQ ID NO: 347754

SEQ ID NO: 381380 - DNA, 1358 bp, Homo Sapiens; identical to SEQ ID NO: 347755
  misc_feature (1147)..(1147): n is a, c, g, or t
  misc_feature (1300)..(1300): n is a, c, g, or t
  misc_feature (1309)..(1309): n is a, c, g, or t
  misc_feature (1347)..(1347): n is a, c, g, or t

SEQ ID NO: 381381 - DNA, 1334 bp, Homo Sapiens; identical to SEQ ID NO: 347756
  misc_feature (634)..(701): n is a, c, g, or t
  misc_feature (873)..(903): n is a, c, g, or t

SEQ ID NO: 381382 - DNA, 430 bp, Homo Sapiens; identical to SEQ ID NO: 347757
  misc_feature (36)..(36): n is a, c, g, or t

SEQ ID NO: 381383 - DNA, 518 bp, Homo Sapiens; identical to SEQ ID NO: 347761
  misc_feature (119)..(119): n is a, c, g, or t
  misc_feature (217)..(217): n is a, c, g, or t

SEQ ID NO: 381384 - DNA, 1145 bp, Homo Sapiens; identical to SEQ ID NO: 347762

SEQ ID NO: 381385 - DNA, 747 bp, Homo Sapiens; identical to SEQ ID NO: 347763

SEQ ID NO: 381386 - DNA, 1598 bp, Homo Sapiens; identical to SEQ ID NO: 97882
  misc_feature (293)..(293): n is a, c, g, or t
  misc_feature (1268)..(1346): n is a, c, g, or t
  misc_feature (1353)..(1412): n is a, c, g, or t
  misc_feature (1465)..(1484): n is a, c, g, or t

SEQ ID NO: 381387 - DNA, 838 bp, Homo Sapiens; identical to SEQ ID NO: 347765

SEQ ID NO: 381388 - DNA, 551 bp, Homo Sapiens; identical to SEQ ID NO: 347766

SEQ ID NO: 381389 - DNA, 1594 bp, Homo Sapiens; identical to SEQ ID NO: 347772

SEQ ID NO: 381390 - DNA, 454 bp, Homo Sapiens; identical to SEQ ID NO: 347773
  misc_feature (20)..(20): n is a, c, g, or t

SEQ ID NO: 381391 - DNA, 2019 bp, Homo Sapiens; identical to SEQ ID NO: 347775

SEQ ID NO: 381392 - DNA, 1842 bp, Homo Sapiens; identical to SEQ ID NO: 347776
  misc_feature (34)..(34): n is a, c, g, or t
  misc_feature (56)..(56): n is a, c, g, or t
  misc_feature (89)..(89): n is a, c, g, or t
  misc_feature (93)..(93): n is a, c, g, or t
  misc_feature (98)..(98): n is a, c, g, or t
  misc_feature (100)..(100): n is a, c, g, or t
  misc_feature (102)..(102): n is a, c, g, or t
  misc_feature (104)..(104): n is a, c, g, or t
  misc_feature (106)..(106): n is a, c, g, or t
  misc_feature (129)..(183): n is a, c, g, or t
  misc_feature (199)..(199): n is a, c, g, or t
  misc_feature (208)..(208): n is a, c, g, or t
  misc_feature (216)..(216): n is a, c, g, or t
  misc_feature (265)..(266): n is a, c, g, or t
  misc_feature (273)..(273): n is a, c, g, or t

SEQ ID NO: 381393 - DNA, 349 bp, Homo Sapiens; identical to SEQ ID NO: 347777

SEQ ID NO: 381394 - DNA, 2045 bp, Homo Sapiens; identical to SEQ ID NO: 347778
  misc_feature (881)..(894): n is a, c, g, or t
  misc_feature (1322)..(1322): n is a, c, g, or t
  misc_feature (1397)..(1397): n is a, c, g, or t
  misc_feature (1401)..(1401): n is a, c, g, or t
  misc_feature (1405)..(1405): n is a, c, g, or t
  misc_feature (1412)..(1412): n is a, c, g, or t
  misc_feature (1426)..(1427): n is a, c, g, or t
  misc_feature (1431)..(1431): n is a, c, g, or t
  misc_feature (1806)..(1809): n is a, c, g, or t
  misc_feature (1812)..(1963): n is a, c, g, or t
  misc_feature (1966)..(1968): n is a, c, g, or t
  misc_feature (1970)..(1976): n is a, c, g, or t
  misc_feature (1981)..(2000): n is a, c, g, or t

SEQ ID NO: 381395 - DNA, 486 bp, Homo Sapiens; identical to SEQ ID NO: 347779
  misc_feature (21)..(21): n is a, c, g, or t
  misc_feature (29)..(29): n is a, c, g, or t

SEQ ID NO: 381396 - DNA, 1174 bp, Homo Sapiens; identical to SEQ ID NO: 347782

SEQ ID NO: 381397 - DNA, 1415 bp, Homo Sapiens; identical to SEQ ID NO: 347783

SEQ ID NO: 381398 - DNA, 1557 bp, Homo Sapiens; identical to SEQ ID NO: 347788
  misc_feature (878)..(878): n is a, c, g, or t
  misc_feature (1259)..(1294): n is a, c, g, or t

SEQ ID NO: 381399 - DNA, 1557 bp, Homo Sapiens; identical to SEQ ID NO: 347789
  misc_feature (1458)..(1458): n is a, c, g, or t
  misc_feature (1498)..(1498): n is a, c, g, or t
  misc_feature (1528)..(1528): n is a, c, g, or t

SEQ ID NO: 381400 - DNA, 658 bp, Homo Sapiens; identical to SEQ ID NO: 347790

SEQ ID NO: 381401 - DNA, 1266 bp, Homo Sapiens; identical to SEQ ID NO: 347792
  misc_feature (1082)..(1082): n is a, c, g, or t
  misc_feature (1182)..(1182): n is a, c, g, or t
  misc_feature (1184)..(1184): n is a, c, g, or t
  misc_feature (1217)..(1217): n is a, c, g, or t

SEQ ID NO: 381402 - DNA, 1891 bp, Homo Sapiens; identical to SEQ ID NO: 347793

SEQ ID NO: 381403 - DNA, 1913 bp, Homo Sapiens; identical to SEQ ID NO: 347797
  misc_feature (239)..(239): n is a, c, g, or t
  misc_feature (1893)..(1893): n is a, c, g, or t

SEQ ID NO: 381404 - DNA, 318 bp, Homo Sapiens; identical to SEQ ID NO: 347798
  misc_feature (22)..(22): n is a, c, g, or t
  misc_feature (27)..(27): n is a, c, g, or t
  misc_feature (187)..(220): n is a, c, g, or t
  misc_feature (260)..(260): n is a, c, g, or t
  misc_feature (295)..(295): n is a, c, g, or t

SEQ ID NO: 381405 - DNA, 2680 bp, Homo Sapiens; identical to SEQ ID NO: 347799
  misc_feature (1982)..(2016): n is a, c, g, or t
  misc_feature (2128)..(2138): n is a, c, g, or t

SEQ ID NO: 381406 - DNA, 1116 bp, Homo Sapiens; identical to SEQ ID NO: 347800
  misc_feature (371)..(402): n is a, c, g, or t
  misc_feature (514)..(524): n is a, c, g, or t

SEQ ID NO: 381407 - DNA, 391 bp, Homo Sapiens; identical to SEQ ID NO: 347801
  misc_feature (14)..(14): n is a, c, g, or t

SEQ ID NO: 381408 - DNA, 2366 bp, Homo Sapiens; identical to SEQ ID NO: 347802
  misc_feature (34)..(34): n is a, c, g, or t
  misc_feature (62)..(62): n is a, c, g, or t
  misc_feature (1337)..(1352): n is a, c, g, or t

SEQ ID NO: 381409 - DNA, 442 bp, Homo Sapiens; identical to SEQ ID NO: 347803

SEQ ID NO: 381410 - DNA, 1471 bp, Homo Sapiens; identical to SEQ ID NO: 347805

SEQ ID NO: 381411 - DNA, 1074 bp, Homo Sapiens; identical to SEQ ID NO: 347806
  misc_feature (10)..(10): n is a, c, g, or t
  misc_feature (25)..(26): n is a, c, g, or t
  misc_feature (37)..(37): n is a, c, g, or t
  misc_feature (39)..(39): n is a, c, g, or t
  misc_feature (42)..(42): n is a, c, g, or t
  misc_feature (71)..(72): n is a, c, g, or t
  misc_feature (86)..(86): n is a, c, g, or t
  misc_feature (106)..(107): n is a, c, g, or t
  misc_feature (134)..(134): n is a, c, g, or t
  misc_feature (139)..(140): n is a, c, g, or t
  misc_feature (149)..(149): n is a, c, g, or t
  misc_feature (209)..(209): n is a, c, g, or t
  misc_feature (229)..(229): n is a, c, g, or t
  misc_feature (242)..(242): n is a, c, g, or t
  misc_feature (942)..(998): n is a, c, g, or t
  misc_feature (1018)..(1018): n is a, c, g, or t
  misc_feature (1022)..(1022): n is a, c, g, or t
  misc_feature (1042)..(1042): n is a, c, g, or t

SEQ ID NO: 381412 - DNA, 1997 bp, Homo Sapiens; identical to SEQ ID NO: 347807
  misc_feature (30)..(30): n is a, c, g, or t
  misc_feature (65)..(107): n is a, c, g, or t
  misc_feature (360)..(360): n is a, c, g, or t
  misc_feature (979)..(991): n is a, c, g, or t

SEQ ID NO: 381413 - DNA, 537 bp, Homo Sapiens; identical to SEQ ID NO: 347811
  misc_feature (58)..(58): n is a, c, g, or t
  misc_feature (126)..(126): n is a, c, g, or t

SEQ ID NO: 381414 - DNA, 814 bp, Homo Sapiens; identical to SEQ ID NO: 347812
  misc_feature (657)..(657): n is a, c, g, or t
  misc_feature (741)..(741): n is a, c, g, or t
  misc_feature (781)..(781): n is a, c, g, or t

SEQ ID NO: 381415 - DNA, 1153 bp, Homo Sapiens; identical to SEQ ID NO: 347815
  misc_feature (940)..(940): n is a, c, g, or t
  misc_feature (1077)..(1077): n is a, c, g, or t

SEQ ID NO: 381416 - DNA, 1088 bp, Homo Sapiens; identical to SEQ ID NO: 347816

SEQ ID NO: 381417 - DNA, 2415 bp, Homo Sapiens; identical to SEQ ID NO: 347817
  misc_feature (2398)..(2398): n is a, c, g, or t

SEQ ID NO: 381418 - DNA, 401 bp, Homo Sapiens; identical to SEQ ID NO: 347818
  misc_feature (25)..(25): n is a, c, g, or t
  misc_feature (367)..(367): n is a, c, g, or t

SEQ ID NO: 381419 - DNA, 2584 bp, Homo Sapiens; identical to SEQ ID NO: 347820
  misc_feature (331)..(357): n is a, c, g, or t
  misc_feature (1146)..(1194): n is a, c, g, or t
  misc_feature (2246)..(2271): n is a, c, g, or t
  misc_feature (2289)..(2399): n is a, c, g, or t
  misc_feature (2401)..(2401): n is a, c, g, or t
  misc_feature (2408)..(2409): n is a, c, g, or t
  misc_feature (2417)..(2420): n is a, c, g, or t
  misc_feature (2423)..(2449): n is a, c, g, or t
  misc_feature (2478)..(2493): n is a, c, g, or t

SEQ ID NO: 381420 - DNA, 903 bp, Homo Sapiens; identical to SEQ ID NO: 347821

SEQ ID NO: 381421 - DNA, 1177 bp, Homo Sapiens; identical to SEQ ID NO: 347822
  misc_feature (531)..(576): n is a, c, g, or t

SEQ ID NO: 381422 - DNA, 708 bp, Homo Sapiens; identical to SEQ ID NO: 347823
  misc_feature (434)..(490): n is a, c, g, or t

SEQ ID NO: 381423 - DNA, 514 bp, Homo Sapiens; identical to SEQ ID NO: 347825

SEQ ID NO: 381424 - DNA, 1260 bp, Homo Sapiens; identical to SEQ ID NO: 347826
  misc_feature (19)..(19): n is a, c, g, or t
  misc_feature (27)..(27): n is a, c, g, or t

SEQ ID NO: 381425 - DNA, 604 bp, Homo Sapiens; identical to SEQ ID NO: 347827
  misc_feature (27)..(27): n is a, c, g, or t
  misc_feature (425)..(425): n is a, c, g, or t
  misc_feature (454)..(454): n is a, c, g, or t
  misc_feature (504)..(504): n is a, c, g, or t
  misc_feature (523)..(523): n is a, c, g, or t
  misc_feature (539)..(539): n is a, c, g, or t
  misc_feature (545)..(545): n is a, c, g, or t
  misc_feature (594)..(594): n is a, c, g, or t

SEQ ID NO: 381426 - DNA, 3074 bp, Homo Sapiens; identical to SEQ ID NO: 347828
  misc_feature (167)..(167): n is a, c, g, or t
  misc_feature (219)..(219): n is a, c, g, or t
  misc_feature (410)..(428): n is a, c, g, or t
  misc_feature (3007)..(3007): n is a, c, g, or t

SEQ ID NO: 381427 - DNA, 323 bp, Homo Sapiens; identical to SEQ ID NO: 347829

SEQ ID NO: 381428 - DNA, 1501 bp, Homo Sapiens; identical to SEQ ID NO: 347830
  misc_feature (662)..(662): n is a, c, g, or t
  misc_feature (727)..(727): n is a, c, g, or t

SEQ ID NO: 381429 - DNA, 453 bp, Homo Sapiens; identical to SEQ ID NO: 347831
  misc_feature (11)..(11): n is a, c, g, or t
  misc_feature (39)..(39): n is a, c, g, or t

SEQ ID NO: 381430 - DNA, 1242 bp, Homo Sapiens; identical to SEQ ID NO: 347832
  misc_feature (36)..(36): n is a, c, g, or t
  misc_feature (425)..(441): n is a, c, g, or t

SEQ ID NO: 381431 - DNA, 1196 bp, Homo Sapiens; identical to SEQ ID NO: 347833

SEQ ID NO: 381432 - DNA, 375 bp, Homo Sapiens; identical to SEQ ID NO: 347834
  misc_feature (265)..(291): n is a, c, g, or t
  misc_feature (296)..(296): n is a, c, g, or t
  misc_feature (352)..(352): n is a, c, g, or t
  misc_feature (365)..(365): n is a, c, g, or t

SEQ ID NO: 381433 - DNA, 186 bp, Homo Sapiens; identical to SEQ ID NO: 347835
  misc_feature (25)..(25): n is a, c, g, or t

SEQ ID NO: 381434 - DNA, 384 bp, Homo Sapiens; identical to SEQ ID NO: 347839
  misc_feature (137)..(151): n is a, c, g, or t
  misc_feature (232)..(323): n is a, c, g, or t
  misc_feature (333)..(333): n is a, c, g, or t
  misc_feature (370)..(370): n is a, c, g, or t

SEQ ID NO: 381435 - DNA, 465 bp, Homo Sapiens; identical to SEQ ID NO: 347840
  misc_feature (396)..(410): n is a, c, g, or t

SEQ ID NO: 381436 - DNA, 727 bp, Homo Sapiens; identical to SEQ ID NO: 347842
  misc_feature (454)..(498): n is a, c, g, or t
  misc_feature (518)..(541): n is a, c, g, or t

SEQ ID NO: 381437 - DNA, 2740 bp, Homo Sapiens; identical to SEQ ID NO: 347843
  misc_feature (2458)..(2503): n is a, c, g, or t
  misc_feature (2523)..(2546): n is a, c, g, or t

SEQ ID NO: 381438 - DNA, 445 bp, Homo Sapiens; identical to SEQ ID NO: 347844
  misc_feature (172)..(218): n is a, c, g, or t
  misc_feature (236)..(259): n is a, c, g, or t

SEQ ID NO: 381439 - DNA, 483 bp, Homo Sapiens; identical to SEQ ID NO: 347845
  misc_feature (252)..(298): n is a, c, g, or t
  misc_feature (316)..(339): n is a, c, g, or t

SEQ ID NO: 381440 - DNA, 390 bp, Homo Sapiens; identical to SEQ ID NO: 347846
  misc_feature (46)..(46): n is a, c, g, or t
  misc_feature (69)..(69): n is a, c, g, or t
  misc_feature (117)..(163): n is a, c, g, or t
  misc_feature (181)..(204): n is a, c, g, or t

SEQ ID NO: 381441 - DNA, 1352 bp, Homo Sapiens; identical to SEQ ID NO: 347847
  misc_feature (387)..(387): n is a, c, g, or t
  misc_feature (529)..(529): n is a, c, g, or t
  misc_feature (799)..(812): n is a, c, g, or t
  misc_feature (918)..(959): n is a, c, g, or t
  misc_feature (1300)..(1300): n is a, c, g, or t

SEQ ID NO: 381442 - DNA, 1350 bp, Homo Sapiens; identical to SEQ ID NO: 347848
  misc_feature (271)..(304): n is a, c, g, or t
  misc_feature (1058)..(1058): n is a, c, g, or t
  misc_feature (1062)..(1062): n is a, c, g, or t
  misc_feature (1066)..(1067): n is a, c, g, or t
  misc_feature (1159)..(1179): n is a, c, g, or t
  misc_feature (1187)..(1187): n is a, c, g, or t
  misc_feature (1193)..(1193): n is a, c, g, or t
  misc_feature (1256)..(1256): n is a, c, g, or t
  misc_feature (1260)..(1260): n is a, c, g, or t
  misc_feature (1262)..(1262): n is a, c, g, or t
  misc_feature (1275)..(1275): n is a, c, g, or t
  misc_feature (1284)..(1284): n is a, c, g, or t
  misc_feature (1296)..(1296): n is a, c, g, or t
  misc_feature (1303)..(1305): n is a, c, g, or t
  misc_feature (1307)..(1308): n is a, c, g, or t
  misc_feature (1317)..(1317): n is a, c, g, or t

SEQ ID NO: 381443 - DNA, 4213 bp, Homo Sapiens; identical to SEQ ID NO: 347849
  misc_feature (3978)..(4003): n is a, c, g, or t

SEQ ID NO: 381444 - DNA, 527 bp, Homo Sapiens; identical to SEQ ID NO: 347850
  misc_feature (16)..(16): n is a, c, g, or t
  misc_feature (37)..(37): n is a, c, g, or t
  misc_feature (49)..(49): n is a, c, g, or t
  misc_feature (121)..(121): n is a, c, g, or t
  misc_feature (127)..(127): n is a, c, g, or t
  misc_feature (298)..(318): n is a, c, g, or t
  misc_feature (442)..(450): n is a, c, g, or t

SEQ ID NO: 381445 - DNA, 2315 bp, Homo Sapiens; identical to SEQ ID NO: 347852
  misc_feature (432)..(446): n is a, c, g, or t
  misc_feature (1515)..(1515): n is a, c, g, or t
  misc_feature (1553)..(1553): n is a, c, g, or t
  misc_feature (1557)..(1557): n is a, c, g, or t
  misc_feature (1562)..(1562): n is a, c, g, or t
  misc_feature (1582)..(1582): n is a, c, g, or t
  misc_feature (1585)..(1586): n is a, c, g, or t
  misc_feature (1591)..(1591): n is a, c, g, or t
  misc_feature (1593)..(1593): n is a, c, g, or t
  misc_feature (1595)..(1595): n is a, c, g, or t
  misc_feature (1602)..(1602): n is a, c, g, or t
  misc_feature (1604)..(1604): n is a, c, g, or t
  misc_feature (1606)..(1606): n is a, c, g, or t
  misc_feature (1623)..(1623): n is a, c, g, or t
  misc_feature (1629)..(1630): n is a, c, g, or t
  misc_feature (1638)..(1639): n is a, c, g, or t
  misc_feature (1650)..(1650): n is a, c, g, or t
  misc_feature (1652)..(1656): n is a, c, g, or t
  misc_feature (1658)..(1661): n is a, c, g, or t
  misc_feature (1663)..(1666): n is a, c, g, or t
  misc_feature (1668)..(1669): n is a, c, g, or t
  misc_feature (1671)..(1671): n is a, c, g, or t
  misc_feature (1676)..(1676): n is a, c, g, or t
  misc_feature (1678)..(1678): n is a, c, g, or t
  misc_feature (1685)..(1686): n is a, c, g, or t
  misc_feature (1688)..(1689): n is a, c, g, or t
  misc_feature (1702)..(1703): n is a, c, g, or t
  misc_feature (1710)..(1710): n is a, c, g, or t
  misc_feature (1715)..(1715): n is a, c, g, or t
  misc_feature (1717)..(1717): n is a, c, g, or t
  misc_feature (1720)..(1720): n is a, c, g, or t
  misc_feature (1722)..(1722): n is a, c, g, or t
  misc_feature (1725)..(1725): n is a, c, g, or t
  misc_feature (1735)..(1735): n is a, c, g, or t
  misc_feature (1737)..(1738): n is a, c, g, or t
  misc_feature (1741)..(1741): n is a, c, g, or t
  misc_feature (1756)..(1756): n is a, c, g, or t
  misc_feature (1758)..(1758): n is a, c, g, or t
  misc_feature (1761)..(1761): n is a, c, g, or t
  misc_feature (1782)..(1782): n is a, c, g, or t
  misc_feature (1806)..(1806): n is a, c, g, or t
  misc_feature (1860)..(1860): n is a, c, g, or t

SEQ ID NO: 381446 - DNA, 422 bp, Homo Sapiens; identical to SEQ ID NO: 347853
  misc_feature (11)..(11): n is a, c, g, or t
  misc_feature (77)..(77): n is a, c, g, or t
  misc_feature (99)..(99): n is a, c, g, or t
  misc_feature (109)..(109): n is a, c, g, or t
  misc_feature (118)..(118): n is a, c, g, or t

SEQ ID NO: 381447 - DNA, 2580 bp, Homo Sapiens; identical to SEQ ID NO: 347858

SEQ ID NO: 381448 - DNA, 1589 bp, Homo Sapiens; identical to SEQ ID NO: 347859
  misc_feature (1525)..(1525): n is a, c, g, or t

SEQ ID NO: 381449 - DNA, 823 bp, Homo Sapiens; identical to SEQ ID NO: 347860
  misc_feature (710)..(710): n is a, c, g, or t
  misc_feature (788)..(788): n is a, c, g, or t

SEQ ID NO: 381450 - DNA, 1094 bp, Homo Sapiens; identical to SEQ ID NO: 347861

SEQ ID NO: 381451 - DNA, 483 bp, Homo Sapiens; identical to SEQ ID NO: 347862
  misc_feature (37)..(37): n is a, c, g, or t
  misc_feature (50)..(50): n is a, c, g, or t
  misc_feature (58)..(58): n is a, c, g, or t
  misc_feature (65)..(65): n is a, c, g, or t
  misc_feature (131)..(131): n is a, c, g, or t

SEQ ID NO: 381452 - DNA, 491 bp, Homo Sapiens; identical to SEQ ID NO: 347863
  misc_feature (26)..(26): n is a, c, g, or t
  misc_feature (42)..(42): n is a, c, g, or t
  misc_feature (111)..(111): n is a, c, g, or t
  misc_feature (118)..(118): n is a, c, g, or t
  misc_feature (125)..(125): n is a, c, g, or t
  misc_feature (131)..(131): n is a, c, g, or t
  misc_feature (226)..(226): n is a, c, g, or t

SEQ ID NO: 381453 - DNA, 1842 bp, Homo Sapiens; identical to SEQ ID NO: 347869

SEQ ID NO: 381454 - DNA, 980 bp, Homo Sapiens; identical to SEQ ID NO: 347870
  misc_feature (81)..(81): n is a, c, g, or t
  misc_feature (113)..(113): n is a, c, g, or t
  misc_feature (129)..(182): n is a, c, g, or t
  misc_feature (337)..(394): n is a, c, g, or t
  misc_feature (476)..(484): n is a, c, g, or t

SEQ ID NO: 381455 - DNA, 900 bp, Homo Sapiens; identical to SEQ ID NO: 347871
  misc_feature (219)..(275): n is a, c, g, or t
  misc_feature (338)..(355): n is a, c, g, or t

SEQ ID NO: 381456 - DNA, 319 bp, Homo Sapiens; identical to SEQ ID NO: 347872
  misc_feature (15)..(15): n is a, c, g, or t
  misc_feature (50)..(50): n is a, c, g, or t

SEQ ID NO: 381457 - DNA, 1658 bp, Homo Sapiens; identical to SEQ ID NO: 347873
  misc_feature (5)..(5): n is a, c, g, or t
  misc_feature (12)..(12): n is a, c, g, or t
  misc_feature (47)..(47): n is a, c, g, or t
  misc_feature (49)..(49): n is a, c, g, or t
  misc_feature (55)..(55): n is a, c, g, or t
  misc_feature (73)..(73): n is a, c, g, or t
  misc_feature (99)..(99): n is a, c, g, or t
  misc_feature (121)..(121): n is a, c, g, or t
  misc_feature (488)..(488): n is a, c, g, or t
  misc_feature (735)..(826): n is a, c, g, or t
  misc_feature (1549)..(1549): n is a, c, g, or t

SEQ ID NO: 381458 - DNA, 1498 bp, Homo Sapiens; identical to SEQ ID NO: 347875
  misc_feature (3)..(3): n is a, c, g, or t
  misc_feature (11)..(11): n is a, c, g, or t
  misc_feature (16)..(16): n is a, c, g, or t
  misc_feature (652)..(726): n is a, c, g, or t

SEQ ID NO: 381459 - DNA, 2134 bp, Homo Sapiens; identical to SEQ ID NO: 347876
  misc_feature (21)..(21): n is a, c, g, or t
  misc_feature (49)..(49): n is a, c, g, or t
  misc_feature (61)..(61): n is a, c, g, or t
  misc_feature (73)..(73): n is a, c, g, or t
  misc_feature (176)..(255): n is a, c, g, or t
  misc_feature (1812)..(1878): n is a, c, g, or t
  misc_feature (2002)..(2002): n is a, c, g, or t
  misc_feature (2022)..(2022): n is a, c, g, or t
  misc_feature (2024)..(2024): n is a, c, g, or t
  misc_feature (2057)..(2057): n is a, c, g, or t
  misc_feature (2092)..(2092): n is a, c, g, or t

SEQ ID NO: 381460 - DNA, 937 bp, Homo Sapiens; identical to SEQ ID NO: 347877
  misc_feature (47)..(47): n is a, c, g, or t
  misc_feature (213)..(288): n is a, c, g, or t
  misc_feature (927)..(929): n is a, c, g, or t
  misc_feature (933)..(933): n is a, c, g, or t

SEQ ID NO: 381461 - DNA, 399 bp, Homo Sapiens; identical to SEQ ID NO: 347878
  misc_feature (48)..(48): n is a, c, g, or t
  misc_feature (59)..(59): n is a, c, g, or t

SEQ ID NO: 381462 - DNA, 1037 bp, Homo Sapiens; identical to SEQ ID NO: 347879
  misc_feature (226)..(289): n is a, c, g, or t

SEQ ID NO: 381463 - DNA, 1244 bp, Homo Sapiens; identical to SEQ ID NO: 347880
  misc_feature (1208)..(1208): n is a, c, g, or t

SEQ ID NO: 381464 - DNA, 1496 bp, Homo Sapiens; identical to SEQ ID NO: 347881
  misc_feature (3)..(3): n is a, c, g, or t
  misc_feature (6)..(6): n is a, c, g, or t
  misc_feature (31)..(31): n is a, c, g, or t
  misc_feature (57)..(57): n is a, c, g, or t
  misc_feature (78)..(78): n is a, c, g, or t
  misc_feature (82)..(82): n is a, c, g, or t
  misc_feature (94)..(95): n is a, c, g, or t
  misc_feature (97)..(97): n is a, c, g, or t
  misc_feature (113)..(113): n is a, c, g, or t
  misc_feature (116)..(116): n is a, c, g, or t
  misc_feature (156)..(156): n is a, c, g, or t
  misc_feature (162)..(162): n is a, c, g, or t
  misc_feature (173)..(173): n is a, c, g, or t
  misc_feature (190)..(190): n is a, c, g, or t
  misc_feature (197)..(197): n is a, c, g, or t
  misc_feature (206)..(206): n is a, c, g, or t
  misc_feature (233)..(233): n is a, c, g, or t
  misc_feature (271)..(271): n is a, c, g, or t
  misc_feature (297)..(297): n is a, c, g, or t
  misc_feature (306)..(306): n is a, c, g, or t
  misc_feature (313)..(313): n is a, c, g, or t
  misc_feature (317)..(317): n is a, c, g, or t
  misc_feature (322)..(322): n is a, c, g, or t
  misc_feature (324)..(324): n is a, c, g, or t
  misc_feature (326)..(326): n is a, c, g, or t
  misc_feature (328)..(328): n is a, c, g, or t
  misc_feature (331)..(332): n is a, c, g, or t
  misc_feature (338)..(338): n is a, c, g, or t
  misc_feature (341)..(341): n is a, c, g, or t
  misc_feature (346)..(346): n is a, c, g, or t
  misc_feature (380)..(380): n is a, c, g, or t
  misc_feature (389)..(389): n is a, c, g, or t
  misc_feature (401)..(401): n is a, c, g, or t
  misc_feature (403)..(405): n is a, c, g, or t
  misc_feature (466)..(466): n is a, c, g, or t
  misc_feature (512)..(512): n is a, c, g, or t
  misc_feature (518)..(518): n is a, c, g, or t
  misc_feature (546)..(546): n is a, c, g, or t
  misc_feature (549)..(550): n is a, c, g, or t
  misc_feature (553)..(553): n is a, c, g, or t
  misc_feature (560)..(561): n is a, c, g, or t
  misc_feature (563)..(564): n is a, c, g, or t
  misc_feature (566)..(613): n is a, c, g, or t
  misc_feature (617)..(625): n is a, c, g, or t
  misc_feature (630)..(631): n is a, c, g, or t
  misc_feature (945)..(945): n is a, c, g, or t
  misc_feature (1013)..(1013): n is a, c, g, or t

SEQ ID NO: 381465 - DNA, 758 bp, Homo Sapiens; identical to SEQ ID NO: 347882
  misc_feature (235)..(235): n is a, c, g, or t
  misc_feature (239)..(239): n is a, c, g, or t
  misc_feature (320)..(321): n is a, c, g, or t
  misc_feature (568)..(585): n is a, c, g, or t

SEQ ID NO: 381466 - DNA, 3021 bp, Homo Sapiens; identical to SEQ ID NO: 347883
  misc_feature (49)..(49): n is a, c, g, or t
  misc_feature (57)..(58): n is a, c, g, or t
  misc_feature (60)..(60): n is a, c, g, or t
  misc_feature (62)..(63): n is a, c, g, or t
  misc_feature (65)..(65): n is a, c, g, or t
  misc_feature (69)..(69): n is a, c, g, or t
  misc_feature (72)..(160): n is a, c, g, or t
  misc_feature (172)..(172): n is a, c, g, or t
  misc_feature (181)..(181): n is a, c, g, or t
  misc_feature (242)..(253): n is a, c, g, or t
  misc_feature (1146)..(1146): n is a, c, g, or t
  misc_feature (2205)..(2213): n is a, c, g, or t
  misc_feature (2792)..(2801): n is a, c, g, or t
  misc_feature (2964)..(2973): n is a, c, g, or t

SEQ ID NO: 381467 - DNA, 552 bp, Homo Sapiens; identical to SEQ ID NO: 347884
  misc_feature (14)..(14): n is a, c, g, or t
  misc_feature (24)..(24): n is a, c, g, or t
  misc_feature (54)..(54): n is a, c, g, or t
  misc_feature (181)..(181): n is a, c, g, or t

SEQ ID NO: 381468 - DNA, 824 bp, Homo Sapiens; identical to SEQ ID NO: 347885
  misc_feature (82)..(404): n is a, c, g, or t

SEQ ID NO: 381469 - DNA, 366 bp, Homo Sapiens; identical to SEQ ID NO: 347886
  misc_feature (189)..(189): n is a, c, g, or t
  misc_feature (192)..(192): n is a, c, g, or t

SEQ ID NO: 381470 - DNA, 1925 bp, Homo Sapiens; identical to SEQ ID NO: 347892
  misc_feature (361)..(376): n is a, c, g, or t
  misc_feature (601)..(781): n is a, c, g, or t
  misc_feature (1266)..(1274): n is a, c, g, or t
  misc_feature (1467)..(1475): n is a, c, g, or t

SEQ ID NO: 381471 - DNA, 454 bp, Homo Sapiens; identical to SEQ ID NO: 347893
  misc_feature (192)..(372): n is a, c, g, or t

SEQ ID NO: 381472 - DNA, 654 bp, Homo Sapiens; identical to SEQ ID NO: 347896
  misc_feature (544)..(544): n is a, c, g, or t
  misc_feature (591)..(591): n is a, c, g, or t
  misc_feature (600)..(600): n is a, c, g, or t
  misc_feature (607)..(607): n is a, c, g, or t
  misc_feature (635)..(635): n is a, c, g, or t

SEQ ID NO: 381473 - DNA, 436 bp, Homo Sapiens; identical to SEQ ID NO: 347897
  misc_feature (104)..(104): n is a, c, g, or t
  misc_feature (107)..(107): n is a, c, g, or t
  misc_feature (252)..(303): n is a, c, g, or t

SEQ ID NO: 381474 - DNA, 600 bp, Homo Sapiens; identical to SEQ ID NO: 347899
  misc_feature (567)..(567): n is a, c, g, or t

SEQ ID NO: 381475 - DNA, 1705 bp, Homo Sapiens; identical to SEQ ID NO: 347900
  misc_feature (1670)..(1670): n is a, c, g, or t
  misc_feature (1675)..(1675): n is a, c, g, or t

SEQ ID NO: 381476 - DNA, 625 bp, Homo Sapiens; identical to SEQ ID NO: 347901

SEQ ID NO: 381477 - DNA, 2695 bp, Homo Sapiens; identical to SEQ ID NO: 347913

SEQ ID NO: 381478 - DNA, 1022 bp, Homo Sapiens; identical to SEQ ID NO: 347914
  misc_feature (936)..(936): n is a, c, g, or t

SEQ ID NO: 381479 - DNA, 385 bp, Homo Sapiens; identical to SEQ ID NO: 347915
  misc_feature (29)..(29): n is a, c, g, or t
  misc_feature (37)..(37): n is a, c, g, or t
  misc_feature (59)..(59): n is a, c, g, or t

SEQ ID NO: 381480 - DNA, 938 bp, Homo Sapiens; identical to SEQ ID NO: 347917

SEQ ID NO: 381481 - DNA, 839 bp, Homo Sapiens; identical to SEQ ID NO: 347918

SEQ ID NO: 381482 - DNA, 1293 bp, Homo Sapiens; identical to SEQ ID NO: 347919
  misc_feature (1218)..(1233): n is a, c, g, or t
  misc_feature (1235)..(1235): n is a, c, g, or t
  misc_feature (1237)..(1240): n is a, c, g, or t
  misc_feature (1242)..(1248): n is a, c, g, or t

SEQ ID NO: 381483 - DNA, 1232 bp, Homo Sapiens; identical to SEQ ID NO: 347920

SEQ ID NO: 381484 - DNA, 955 bp, Homo Sapiens; identical to SEQ ID NO: 347921
  misc_feature (763)..(763): n is a, c, g, or t

SEQ ID NO: 381485 - DNA, 786 bp, Homo Sapiens; identical to SEQ ID NO: 347922

SEQ ID NO: 381486 - DNA, 1008 bp, Homo Sapiens; identical to SEQ ID NO: 347925

SEQ ID NO: 381487 - DNA, 366 bp, Homo Sapiens; identical to SEQ ID NO: 347926
  misc_feature (17)..(17): n is a, c, g, or t
  misc_feature (27)..(27): n is a, c, g, or t

SEQ ID NO: 381488 - DNA, 4116 bp, Homo Sapiens; identical to SEQ ID NO: 347927
  misc_feature (4057)..(4069): n is a, c, g, or t

SEQ ID NO: 381489 - DNA, 342 bp, Homo Sapiens; identical to SEQ ID NO: 347928

SEQ ID NO: 381490 - DNA, 499 bp, Homo Sapiens; identical to SEQ ID NO: 347929
  misc_feature (380)..(380): n is a, c, g, or t
  misc_feature (405)..(405): n is a, c, g, or t

SEQ ID NO: 381491 - DNA, 944 bp, Homo Sapiens; identical to SEQ ID NO: 347930
  misc_feature (218)..(227): n is a, c, g, or t
  misc_feature (847)..(876): n is a, c, g, or t

SEQ ID NO: 381492 - DNA, 1000 bp, Homo Sapiens; identical to SEQ ID NO: 347931

SEQ ID NO: 381493 - DNA, 977 bp, Homo Sapiens; identical to SEQ ID NO: 347932
  misc_feature (522)..(551): n is a, c, g, or t
  misc_feature (888)..(898): n is a, c, g, or t

SEQ ID NO: 381494 - DNA, 2748 bp, Homo Sapiens; identical to SEQ ID NO: 347933
  misc_feature (1785)..(1814): n is a, c, g, or t

SEQ ID NO: 381495 - DNA, 1182 bp, Homo Sapiens; identical to SEQ ID NO: 347934
  misc_feature (1023)..(1023): n is a, c, g, or t
  misc_feature (1164)..(1164): n is a, c, g, or t

SEQ ID NO: 381496 - DNA, 182 bp, Homo Sapiens; identical to SEQ ID NO: 347935

SEQ ID NO: 381497 - DNA, 1517 bp, Homo Sapiens; identical to SEQ ID NO: 347940

SEQ ID NO: 381498 - DNA, 941 bp, Homo Sapiens; identical to SEQ ID NO: 347941
  misc_feature (279)..(279): n is a, c, g, or t

SEQ ID NO: 381499 - DNA, 1269 bp, Homo Sapiens; identical to SEQ ID NO: 347942

SEQ ID NO: 381500 - DNA, 506 bp, Homo Sapiens; identical to SEQ ID NO: 347943
  misc_feature (60)..(60): n is a, c, g, or t
  misc_feature (72)..(72): n is a, c, g, or t
  misc_feature (76)..(77): n is a, c, g, or t

SEQ ID NO: 381501 - DNA, 2531 bp, Homo Sapiens; identical to SEQ ID NO: 347944
  misc_feature (50)..(86): n is a, c, g, or t
  misc_feature (2198)..(2259): n is a, c, g, or t
  misc_feature (2440)..(2440): n is a, c, g, or t

SEQ ID NO: 381502 - DNA, 1442 bp, Homo Sapiens; identical to SEQ ID NO: 347945
  misc_feature (27)..(27): n is a, c, g, or t
  misc_feature (779)..(819): n is a, c, g, or t
  misc_feature (1343)..(1377): n is a, c, g, or t

SEQ ID NO: 381503 - DNA, 1544 bp, Homo Sapiens; identical to SEQ ID NO: 347946
  misc_feature (450)..(484): n is a, c, g, or t

SEQ ID NO: 381504 - DNA, 2121 bp, Homo Sapiens; identical to SEQ ID NO: 347947

SEQ ID NO: 381505 - DNA, 1249 bp, Homo Sapiens; identical to SEQ ID NO: 347948
  misc_feature (108)..(109): n is a, c, g, or t

SEQ ID NO: 381506 - DNA, 767 bp, Homo Sapiens; identical to SEQ ID NO: 347949

SEQ ID NO: 381507 - DNA, 440 bp, Homo Sapiens; identical to SEQ ID NO: 347950
  misc_feature (11)..(11): n is a, c, g, or t
  misc_feature (430)..(430): n is a, c, g, or t

SEQ ID NO: 381508 - DNA, 414 bp, Homo Sapiens; identical to SEQ ID NO: 347951
  misc_feature (375)..(375): n is a, c, g, or t

SEQ ID NO: 381509 - DNA, 1395 bp, Homo Sapiens; identical to SEQ ID NO: 347955

SEQ ID NO: 381510 - DNA, 1669 bp, Homo Sapiens; identical to SEQ ID NO: 347956
  misc_feature (1608)..(1625): n is a, c, g, or t
  misc_feature (1639)..(1639): n is a, c, g, or t

SEQ ID NO: 381511 - DNA, 1582 bp, Homo Sapiens; identical to SEQ ID NO: 347957
  misc_feature (1350)..(1350): n is a, c, g, or t

SEQ ID NO: 381512 - DNA, 1561 bp, Homo Sapiens; identical to SEQ ID NO: 347962

SEQ ID NO: 381513 - DNA, 1497 bp, Homo Sapiens; identical to SEQ ID NO: 347963

SEQ ID NO: 381514 - DNA, 399 bp, Homo Sapiens; identical to SEQ ID NO: 347964
  misc_feature (356)..(356): n is a, c, g, or t

SEQ ID NO: 381515 - DNA, 925 bp, Homo Sapiens; identical to SEQ ID NO: 347969
  misc_feature (923)..(923): n is a, c, g, or t

SEQ ID NO: 381516 - DNA, 2731 bp, Homo Sapiens; identical to SEQ ID NO: 347970
  misc_feature (564)..(581): n is a, c, g, or t
  misc_feature (1589)..(1604): n is a, c, g, or t
  misc_feature (1664)..(1664): n is a, c, g, or t

SEQ ID NO: 381517 - DNA, 1491 bp, Homo Sapiens; identical to SEQ ID NO: 347971
  misc_feature (56)..(143): n is a, c, g, or t
  misc_feature (1475)..(1475): n is a, c, g, or t

SEQ ID NO: 381518 - DNA, 561 bp, Homo Sapiens; identical to SEQ ID NO: 347972
  misc_feature (24)..(24): n is a, c, g, or t
  misc_feature (34)..(34): n is a, c, g, or t
  misc_feature (46)..(46): n is a, c, g, or t
  misc_feature (104)..(104): n is a, c, g, or t

SEQ ID NO: 381519 - DNA, 1183 bp, Homo Sapiens; identical to SEQ ID NO: 347976
  misc_feature (65)..(94): n is a, c, g, or t
  misc_feature (147)..(177): n is a, c, g, or t

SEQ ID NO: 381520 - DNA, 2310 bp, Homo Sapiens; identical to SEQ ID NO: 347977
  misc_feature (31)..(31): n is a, c, g, or t
  misc_feature (123)..(170): n is a, c, g, or t
  misc_feature (431)..(431): n is a, c, g, or t
  misc_feature (435)..(435): n is a, c, g, or t
  misc_feature (437)..(437): n is a, c, g, or t
  misc_feature (440)..(440): n is a, c, g, or t
  misc_feature (442)..(448): n is a, c, g, or t
  misc_feature (450)..(450): n is a, c, g, or t
  misc_feature (452)..(452): n is a, c, g, or t
  misc_feature (468)..(468): n is a, c, g, or t
  misc_feature (471)..(471): n is a, c, g, or t

SEQ ID NO: 381521 - DNA, 2741 bp, Homo Sapiens; identical to SEQ ID NO: 347978
  misc_feature (1236)..(1236): n is a, c, g, or t
  misc_feature (1456)..(1464): n is a, c, g, or t
  misc_feature (1466)..(1467): n is a, c, g, or t
  misc_feature (1474)..(1474): n is a, c, g, or t
  misc_feature (1477)..(1477): n is a, c, g, or t
  misc_feature (1486)..(1511): n is a, c, g, or t
  misc_feature (1680)..(1741): n is a, c, g, or t
  misc_feature (1894)..(1930): n is a, c, g, or t
  misc_feature (2159)..(2159): n is a, c, g, or t
  misc_feature (2226)..(2226): n is a, c, g, or t
  misc_feature (2249)..(2249): n is a, c, g, or t
  misc_feature (2257)..(2257): n is a, c, g, or t
  misc_feature (2489)..(2501): n is a, c, g, or t
  misc_feature (2558)..(2567): n is a, c, g, or t
  misc_feature (2711)..(2711): n is a, c, g, or t

SEQ ID NO: 381522 - DNA, 480 bp, Homo Sapiens; identical to SEQ ID NO: 347979
  misc_feature (53)..(83): n is a, c, g, or t
  misc_feature (206)..(206): n is a, c, g, or t

SEQ ID NO: 381523 - DNA, 442 bp, Homo Sapiens; identical to SEQ ID NO: 347980
  misc_feature (29)..(29): n is a, c, g, or t

SEQ ID NO: 381524 - DNA, 498 bp, Homo Sapiens; identical to SEQ ID NO: 347981
  misc_feature (86)..(86): n is a, c, g, or t
  misc_feature (109)..(109): n is a, c, g, or t
  misc_feature (113)..(137): n is a, c, g, or t
  misc_feature (302)..(367): n is a, c, g, or t

SEQ ID NO: 381525 - DNA, 1268 bp, Homo Sapiens; identical to SEQ ID NO: 347982
  misc_feature (909)..(978): n is a, c, g, or t

SEQ ID NO: 381526 - DNA, 378 bp, Homo Sapiens; identical to SEQ ID NO: 347983

SEQ ID NO: 381527 - DNA, 2041 bp, Homo Sapiens; identical to SEQ ID NO: 347984

SEQ ID NO: 381528 - DNA, 1596 bp, Homo Sapiens; identical to SEQ ID NO: 347985
  misc_feature (39)..(39): n is a, c, g, or t
  misc_feature (108)..(127): n is a, c, g, or t
  misc_feature (202)..(244): n is a, c, g, or t
  misc_feature (357)..(365): n is a, c, g, or t
  misc_feature (479)..(569): n is a, c, g, or t
  misc_feature (739)..(791): n is a, c, g, or t

SEQ ID NO: 381529 - DNA, 1086 bp, Homo Sapiens; identical to SEQ ID NO: 347986
  misc_feature (160)..(160): n is a, c, g, or t
  misc_feature (290)..(290): n is a, c, g, or t
  misc_feature (562)..(792): n is a, c, g, or t
  misc_feature (811)..(829): n is a, c, g, or t

SEQ ID NO: 381530 - DNA, 498 bp, Homo Sapiens; identical to SEQ ID NO: 347987
  misc_feature (112)..(202): n is a, c, g, or t

SEQ ID NO: 381531 - DNA, 1800 bp, Homo Sapiens; identical to SEQ ID NO: 347989

SEQ ID NO: 381532 - DNA, 646 bp, Homo Sapiens; identical to SEQ ID NO: 347990

SEQ ID NO: 381533 - DNA, 1342 bp, Homo Sapiens; identical to SEQ ID NO: 347991
  misc_feature (1128)..(1182): n is a, c, g, or t

SEQ ID NO: 381534 - DNA, 300 bp, Homo Sapiens; identical to SEQ ID NO: 347992

SEQ ID NO: 381535 - DNA, 1514 bp, Homo Sapiens; identical to SEQ ID NO: 347995
  misc_feature (19)..(19): n is a, c, g, or t
  misc_feature (220)..(220): n is a, c, g, or t
  misc_feature (773)..(773): n is a, c, g, or t
  misc_feature (830)..(839): n is a, c, g, or t

SEQ ID NO: 381536 - DNA, 1335 bp, Homo Sapiens; identical to SEQ ID NO: 347996
  misc_feature (97)..(145): n is a, c, g, or t

SEQ ID NO: 381537 - DNA, 875 bp, Homo Sapiens; identical to SEQ ID NO: 347997
  misc_feature (106)..(158): n is a, c, g, or t
  misc_feature (734)..(734): n is a, c, g, or t
  misc_feature (792)..(792): n is a, c, g, or t
  misc_feature (840)..(840): n is a, c, g, or t
  misc_feature (845)..(845): n is a, c, g, or t
  misc_feature (860)..(860): n is a, c, g, or t

SEQ ID NO: 381538 - DNA, 1185 bp, Homo Sapiens; identical to SEQ ID NO: 347999

SEQ ID NO: 381539 - DNA, 448 bp, Homo Sapiens; identical to SEQ ID NO: 348000
  misc_feature (208)..(208): n is a, c, g, or t
  misc_feature (321)..(321): n is a, c, g, or t
  misc_feature (355)..(355): n is a, c, g, or t
  misc_feature (425)..(425): n is a, c, g, or t

SEQ ID NO: 381540 - DNA, 1510 bp, Homo Sapiens; identical to SEQ ID NO: 348004
  misc_feature (1360)..(1360): n is a, c, g, or t
  misc_feature (1363)..(1363): n is a, c, g, or t
  misc_feature (1465)..(1465): n is a, c, g, or t
  misc_feature (1474)..(1475): n is a, c, g, or t
  misc_feature (1486)..(1486): n is a, c, g, or t

SEQ ID NO: 381541 - DNA, 788 bp, Homo Sapiens; identical to SEQ ID NO: 348005

SEQ ID NO: 381542 - DNA, 893 bp, Homo Sapiens; identical to SEQ ID NO: 348006
  misc_feature (48)..(80): n is a, c, g, or t

SEQ ID NO: 381543 - DNA, 477 bp, Homo Sapiens; identical to SEQ ID NO: 348007

SEQ ID NO: 381544 - DNA, 1730 bp, Homo Sapiens; identical to SEQ ID NO: 348008

SEQ ID NO: 381545 - DNA, 467 bp, Homo Sapiens; identical to SEQ ID NO: 348009
  misc_feature (382)..(382): n is a, c, g, or t

SEQ ID NO: 381546 - DNA, 873 bp, Homo Sapiens; identical to SEQ ID NO: 348015
  misc_feature (66)..(66): n is a, c, g, or t

SEQ ID NO: 381547 - DNA, 1915 bp, Homo Sapiens; identical to SEQ ID NO: 348016
  misc_feature (1238)..(1238): n is a, c, g, or t
  misc_feature (1302)..(1302): n is a, c, g, or t
  misc_feature (1319)..(1319): n is a, c, g, or t
  misc_feature (1321)..(1321): n is a, c, g, or t
  misc_feature (1377)..(1377): n is a, c, g, or t
  misc_feature (1461)..(1461): n is a, c, g, or t
  misc_feature (1467)..(1467): n is a, c, g, or t
  misc_feature (1471)..(1471): n is a, c, g, or t
  misc_feature (1476)..(1476): n is a, c, g, or t
  misc_feature (1492)..(1492): n is a, c, g, or t
  misc_feature (1516)..(1516): n is a, c, g, or t
  misc_feature (1595)..(1595): n is a, c, g, or t
  misc_feature (1651)..(1651): n is a, c, g, or t
  misc_feature (1744)..(1744): n is a, c, g, or t
  misc_feature (1793)..(1793): n is a, c, g, or t
  misc_feature (1795)..(1795): n is a, c, g, or t
  misc_feature (1875)..(1876): n is a, c, g, or t
  misc_feature (1902)..(1903): n is a, c, g, or t
  misc_feature (1911)..(1911): n is a, c, g, or t

SEQ ID NO: 381548 - DNA, 1679 bp, Homo Sapiens; identical to SEQ ID NO: 348020

SEQ ID NO: 381549 - DNA, 1170 bp, Homo Sapiens; identical to SEQ ID NO: 348021
  misc_feature (96)..(134): n is a, c, g, or t
  misc_feature (857)..(906): n is a, c, g, or t
  misc_feature (982)..(982): n is a, c, g, or t

SEQ ID NO: 381550 - DNA, 649 bp, Homo Sapiens; identical to SEQ ID NO: 348022
  misc_feature (127)..(138): n is a, c, g, or t
  misc_feature (180)..(193): n is a, c, g, or t

SEQ ID NO: 381551 - DNA, 441 bp, Homo Sapiens; identical to SEQ ID NO: 348023
  misc_feature (373)..(373): n is a, c, g, or t

SEQ ID NO: 381552 - DNA, 1018 bp, Homo Sapiens; identical to SEQ ID NO: 348025
  misc_feature (66)..(89): n is a, c, g, or t
  misc_feature (809)..(846): n is a, c, g, or t
  misc_feature (923)..(963): n is a, c, g, or t

SEQ ID NO: 381553 - DNA, 1161 bp, Homo Sapiens; identical to SEQ ID NO: 348026
  misc_feature (61)..(85): n is a, c, g, or t
  misc_feature (264)..(274): n is a, c, g, or t
  misc_feature (1086)..(1103): n is a, c, g, or t

SEQ ID NO: 381554 - DNA, 1274 bp, Homo Sapiens; identical to SEQ ID NO: 348034
  misc_feature (518)..(518): n is a, c, g, or t

SEQ ID NO: 381555 - DNA, 841 bp, Homo Sapiens; identical to SEQ ID NO: 348035
  misc_feature (385)..(385): n is a, c, g, or t

SEQ ID NO: 381556 - DNA, 2939 bp, Homo Sapiens; identical to SEQ ID NO: 348039
  misc_feature (110)..(110): n is a, c, g, or t
  misc_feature (525)..(583): n is a, c, g, or t

SEQ ID NO: 381557 - DNA, 2337 bp, Homo Sapiens; identical to SEQ ID NO: 348040
  misc_feature (42)..(78): n is a, c, g, or t
  misc_feature (2029)..(2029): n is a, c, g, or t

SEQ ID NO: 381558 - DNA, 1976 bp, Homo Sapiens; identical to SEQ ID NO: 348044
  misc_feature (1699)..(1717): n is a, c, g, or t
  misc_feature (1719)..(1791): n is a, c, g, or t

SEQ ID NO: 381559 - DNA, 1506 bp, Homo Sapiens; identical to SEQ ID NO: 348045

SEQ ID NO: 381560 - DNA, 880 bp, Homo Sapiens; identical to SEQ ID NO: 348046

SEQ ID NO: 381561 - DNA, 1281 bp, Homo Sapiens; identical to SEQ ID NO: 348047
  misc_feature (44)..(76): n is a, c, g, or t
  misc_feature (122)..(142): n is a, c, g, or t

SEQ ID NO: 381562 - DNA, 2174 bp, Homo Sapiens; identical to SEQ ID NO: 348048
  misc_feature (944)..(1001): n is a, c, g, or t

SEQ ID NO: 381563 - DNA, 858 bp, Homo Sapiens; identical to SEQ ID NO: 348049
  misc_feature (618)..(618): n is a, c, g, or t
  misc_feature (718)..(756): n is a, c, g, or t

SEQ ID NO: 381564 - DNA, 743 bp, Homo Sapiens; identical to SEQ ID NO: 348050
  misc_feature (38)..(38): n is a, c, g, or t
  misc_feature (56)..(56): n is a, c, g, or t
  misc_feature (540)..(579): n is a, c, g, or t

SEQ ID NO: 381565 - DNA, 762 bp, Homo Sapiens; identical to SEQ ID NO: 348051
  misc_feature (32)..(32): n is a, c, g, or t
  misc_feature (37)..(37): n is a, c, g, or t
  misc_feature (46)..(46): n is a, c, g, or t

SEQ ID NO: 381566 - DNA, 455 bp, Homo Sapiens; identical to SEQ ID NO: 348052
  misc_feature (246)..(246): n is a, c, g, or t
  misc_feature (253)..(253): n is a, c, g, or t

SEQ ID NO: 381567 - DNA, 618 bp, Homo Sapiens; identical to SEQ ID NO: 348053

SEQ ID NO: 381568 - DNA, 1662 bp, Homo Sapiens; identical to SEQ ID NO: 348054

SEQ ID NO: 381569 - DNA, 978 bp, Homo Sapiens; identical to SEQ ID NO: 348055
  misc_feature (913)..(913): n is a, c, g, or t
  misc_feature (944)..(944): n is a, c, g, or t

SEQ ID NO: 381570 - DNA, 2035 bp, Homo Sapiens; identical to SEQ ID NO: 348056
  misc_feature (1055)..(1071): n is a, c, g, or t
  misc_feature (1137)..(1157): n is a, c, g, or t
  misc_feature (1159)..(1159): n is a, c, g, or t
  misc_feature (1271)..(1271): n is a, c, g, or t
  misc_feature (1283)..(1283): n is a, c, g, or t
  misc_feature (1329)..(1329): n is a, c, g, or t
  misc_feature (1332)..(1605): n is a, c, g, or t
  misc_feature (1643)..(1643): n is a, c, g, or t
  misc_feature (1654)..(1654): n is a, c, g, or t
  misc_feature (1748)..(1748): n is a, c, g, or t
  misc_feature (1855)..(1863): n is a, c, g, or t
  misc_feature (1900)..(1900): n is a, c, g, or t
  misc_feature (1951)..(1951): n is a, c, g, or t
  misc_feature (1985)..(1986): n is a, c, g, or t
  misc_feature (1994)..(1994): n is a, c, g, or t
  misc_feature (2020)..(2020): n is a, c, g, or t
  misc_feature (2022)..(2022): n is a, c, g, or t
  misc_feature (2025)..(2025): n is a, c, g, or t

SEQ ID NO: 381571 - DNA, 1347 bp, Homo Sapiens; identical to SEQ ID NO: 348057
  misc_feature (451)..(451): n is a, c, g, or t
  misc_feature (465)..(730): n is a, c, g, or t
  misc_feature (897)..(932): n is a, c, g, or t
  misc_feature (1335)..(1335): n is a, c, g, or t

SEQ ID NO: 381572 - DNA, 1202 bp, Homo Sapiens; identical to SEQ ID NO: 348058

SEQ ID NO: 381573 - DNA, 882 bp, Homo Sapiens; identical to SEQ ID NO: 348059

SEQ ID NO: 381574 - DNA, 692 bp, Homo Sapiens; identical to SEQ ID NO: 348060
  misc_feature (369)..(499): n is a, c, g, or t

SEQ ID NO: 381575 - DNA, 1054 bp, Homo Sapiens; identical to SEQ ID NO: 348062
  misc_feature (115)..(115): n is a, c, g, or t
  misc_feature (732)..(785): n is a, c, g, or t
  misc_feature (863)..(863): n is a, c, g, or t

SEQ ID NO: 381576 - DNA, 644 bp, Homo Sapiens; identical to SEQ ID NO: 348063

SEQ ID NO: 381577 - DNA, 1722 bp, Homo Sapiens; identical to SEQ ID NO: 348065
  misc_feature (1678)..(1678): n is a, c, g, or t
  misc_feature (1693)..(1693): n is a, c, g, or t

SEQ ID NO: 381578 - DNA, 1389 bp, Homo Sapiens; identical to SEQ ID NO: 348066

SEQ ID NO: 381579 - DNA, 1709 bp, Homo Sapiens; identical to SEQ ID NO: 348067
  misc_feature (1548)..(1570): n is a, c, g, or t
  misc_feature (1572)..(1576): n is a, c, g, or t

SEQ ID NO: 381580 - DNA, 1856 bp, Homo Sapiens; identical to SEQ ID NO: 348068

SEQ ID NO: 381581 - DNA, 454 bp, Homo Sapiens; identical to SEQ ID NO: 348069
  misc_feature (14)..(14): n is a, c, g, or t

SEQ ID NO: 381582 - DNA, 591 bp, Homo Sapiens; identical to SEQ ID NO: 348076

SEQ ID NO: 381583 - DNA, 908 bp, Homo Sapiens; identical to SEQ ID NO: 348077
  misc_feature (38)..(38): n is a, c, g, or t

SEQ ID NO: 381584 - DNA, 402 bp, Homo Sapiens; identical to SEQ ID NO: 348078

SEQ ID NO: 381585 - DNA, 2228 bp, Homo Sapiens; identical to SEQ ID NO: 348079
  misc_feature (2148)..(2148): n is a, c, g, or t
  misc_feature (2158)..(2158): n is a, c, g, or t
  misc_feature (2169)..(2169): n is a, c, g, or t

SEQ ID NO: 381586 - DNA, 1345 bp, Homo Sapiens; identical to SEQ ID NO: 348080
  misc_feature (1285)..(1293): n is a, c, g, or t

SEQ ID NO: 381587 - DNA, 664 bp, Homo Sapiens; identical to SEQ ID NO: 348081
  misc_feature (585)..(593): n is a, c, g, or t

SEQ ID NO: 381588 - DNA, 911 bp, Homo Sapiens; identical to SEQ ID NO: 348082

SEQ ID NO: 381589 - DNA, 447 bp, Homo Sapiens; identical to SEQ ID NO: 348088
  misc_feature (238)..(357): n is a, c, g, or t
  misc_feature (386)..(386): n is a, c, g, or t
  misc_feature (396)..(396): n is a, c, g, or t

SEQ ID NO: 381590 - DNA, 1598 bp, Homo Sapiens; identical to SEQ ID NO: 348089

SEQ ID NO: 381591 - DNA, 396 bp, Homo Sapiens; identical to SEQ ID NO: 348090
  misc_feature (26)..(26): n is a, c, g, or t

SEQ ID NO: 381592 - DNA, 540 bp, Homo Sapiens; identical to SEQ ID NO: 348091
  misc_feature (11)..(11): n is a, c, g, or t
  misc_feature (447)..(447): n is a, c, g, or t
  misc_feature (452)..(452): n is a, c, g, or t
  misc_feature (505)..(505): n is a, c, g, or t
  misc_feature (524)..(524): n is a, c, g, or t

SEQ ID NO: 381593 - DNA, 3288 bp, Homo Sapiens; identical to SEQ ID NO: 348096
  misc_feature (1448)..(1448): n is a, c, g, or t
  misc_feature (1450)..(1450): n is a, c, g, or t

SEQ ID NO: 381594 - DNA, 1315 bp, Homo Sapiens; identical to SEQ ID NO: 348097
  misc_feature (1229)..(1273): n is a, c, g, or t

SEQ ID NO: 381595 - DNA, 415 bp, Homo Sapiens; identical to SEQ ID NO: 348098
  misc_feature (403)..(403): n is a, c, g, or t

SEQ ID NO: 381596 - DNA, 433 bp, Homo Sapiens; identical to SEQ ID NO: 348099
  misc_feature (24)..(24): n is a, c, g, or t
  misc_feature (47)..(47): n is a, c, g, or t
  misc_feature (77)..(77): n is a, c, g, or t
  misc_feature (90)..(90): n is a, c, g, or t
  misc_feature (120)..(120): n is a, c, g, or t
  misc_feature (183)..(183): n is a, c, g, or t

SEQ ID NO: 381597 - DNA, 1584 bp, Homo Sapiens; identical to SEQ ID NO: 348101
  misc_feature (570)..(590): n is a, c, g, or t

SEQ ID NO: 381598 - DNA, 1154 bp, Homo Sapiens; identical to SEQ ID NO: 348102
  misc_feature (4)..(4): n is a, c, g, or t
  misc_feature (11)..(11): n is a, c, g, or t
  misc_feature (24)..(24): n is a, c, g, or t
  misc_feature (29)..(29): n is a, c, g, or t
  misc_feature (32)..(32): n is a, c, g, or t
  misc_feature (35)..(35): n is a, c, g, or t
  misc_feature (38)..(38): n is a, c, g, or t
  misc_feature (40)..(40): n is a, c, g, or t
  misc_feature (46)..(46): n is a, c, g, or t
  misc_feature (69)..(69): n is a, c, g, or t
  misc_feature (80)..(81): n is a, c, g, or t
  misc_feature (95)..(95): n is a, c, g, or t
  misc_feature (102)..(102): n is a, c, g, or t
  misc_feature (115)..(115): n is a, c, g, or t
  misc_feature (121)..(121): n is a, c, g, or t
  misc_feature (127)..(127): n is a, c, g, or t
  misc_feature (129)..(129): n is a, c, g, or t
  misc_feature (163)..(163): n is a, c, g, or t
  misc_feature (168)..(168): n is a, c, g, or t
  misc_feature (173)..(173): n is a, c, g, or t
  misc_feature (175)..(175): n is a, c, g, or t
  misc_feature (195)..(195): n is a, c, g, or t
  misc_feature (199)..(199): n is a, c, g, or t
  misc_feature (206)..(206): n is a, c, g, or t
  misc_feature (221)..(222): n is a, c, g, or t
  misc_feature (231)..(231): n is a, c, g, or t
  misc_feature (246)..(246): n is a, c, g, or t
  misc_feature (248)..(248): n is a, c, g, or t
  misc_feature (300)..(300): n is a, c, g, or t
  misc_feature (303)..(303): n is a, c, g, or t
  misc_feature (311)..(311): n is a, c, g, or t
  misc_feature (317)..(317): n is a, c, g, or t
  misc_feature (351)..(353): n is a, c, g, or t
  misc_feature (389)..(389): n is a, c, g, or t
  misc_feature (393)..(393): n is a, c, g, or t
  misc_feature (408)..(408): n is a, c, g, or t
  misc_feature (415)..(415): n is a, c, g, or t
  misc_feature (429)..(429): n is a, c, g, or t
  misc_feature (442)..(442): n is a, c, g, or t
  misc_feature (447)..(447): n is a, c, g, or t
  misc_feature (449)..(449): n is a, c, g, or t
  misc_feature (494)..(494): n is a, c, g, or t
  misc_feature (498)..(498): n is a, c, g, or t
  misc_feature (500)..(500): n is a, c, g, or t
  misc_feature (504)..(504): n is a, c, g, or t
  misc_feature (579)..(579): n is a, c, g, or t
  misc_feature (583)..(583): n is a, c, g, or t
  misc_feature (622)..(622): n is a, c, g, or t
  misc_feature (627)..(627): n is a, c, g, or t
  misc_feature (634)..(634): n is a, c, g, or t
  misc_feature (640)..(640): n is a, c, g, or t
  misc_feature (647)..(647): n is a, c, g, or t
  misc_feature (663)..(663): n is a, c, g, or t
  misc_feature (687)..(687): n is a, c, g, or t
  misc_feature (699)..(699): n is a, c, g, or t
  misc_feature (710)..(710): n is a, c, g, or t
  misc_feature (725)..(725): n is a, c, g, or t
  misc_feature (739)..(739): n is a, c, g, or t
  misc_feature (775)..(776): n is a, c, g, or t
  misc_feature (786)..(786): n is a, c, g, or t
  misc_feature (802)..(803): n is a, c, g, or t
  misc_feature (815)..(815): n is a, c, g, or t
  misc_feature (829)..(829): n is a, c, g, or t
  misc_feature (833)..(833): n is a, c, g, or t
  misc_feature (838)..(838): n is a, c, g, or t
  misc_feature (847)..(847): n is a, c, g, or t
  misc_feature (855)..(855): n is a, c, g, or t
  misc_feature (858)..(859): n is a, c, g, or t

SEQ ID NO: 381599 - DNA, 825 bp, Homo Sapiens; identical to SEQ ID NO: 348103
  misc_feature (89)..(89): n is a, c, g, or t
  misc_feature (214)..(214): n is a, c, g, or t
  misc_feature (221)..(221): n is a, c, g, or t
  misc_feature (258)..(258): n is a, c, g, or t
  misc_feature (299)..(299): n is a, c, g, or t
  misc_feature (304)..(305): n is a, c, g, or t
  misc_feature (310)..(311): n is a, c, g, or t
  misc_feature (320)..(320): n is a, c, g, or t
  misc_feature (335)..(336): n is a, c, g, or t
  misc_feature (342)..(342): n is a, c, g, or t
  misc_feature (352)..(352): n is a, c, g, or t
  misc_feature (392)..(394): n is a, c, g, or t
  misc_feature (403)..(403): n is a, c, g, or t
  misc_feature (428)..(428): n is a, c, g, or t
  misc_feature (436)..(436): n is a, c, g, or t
  misc_feature (441)..(441): n is a, c, g, or t
  misc_feature (443)..(443): n is a, c, g, or t
  misc_feature (453)..(453): n is a, c, g, or t
  misc_feature (471)..(476): n is a, c, g, or t
  misc_feature (487)..(487): n is a, c, g, or t
  misc_feature (493)..(493): n is a, c, g, or t
  misc_feature (505)..(505): n is a, c, g, or t
  misc_feature (509)..(509): n is a, c, g, or t
  misc_feature (520)..(521): n is a, c, g, or t
  misc_feature (524)..(524): n is a, c, g, or t
  misc_feature (538)..(538): n is a, c, g, or t
  misc_feature (568)..(568): n is a, c, g, or t
  misc_feature (576)..(576): n is a, c, g, or t
  misc_feature (579)..(580): n is a, c, g, or t
  misc_feature (586)..(586): n is a, c, g, or t
  misc_feature (591)..(591): n is a, c, g, or t
  misc_feature (596)..(596): n is a, c, g, or t
  misc_feature (599)..(599): n is a, c, g, or t
  misc_feature (640)..(640): n is a, c, g, or t
  misc_feature (666)..(666): n is a, c, g, or t
  misc_feature (672)..(672): n is a, c, g, or t
  misc_feature (674)..(674): n is a, c, g, or t
  misc_feature (676)..(676): n is a, c, g, or t
  misc_feature (712)..(712): n is a, c, g, or t
  misc_feature (720)..(720): n is a, c, g, or t
  misc_feature (723)..(723): n is a, c, g, or t
  misc_feature (725)..(725): n is a, c, g, or t
  misc_feature (727)..(727): n is a, c, g, or t
  misc_feature (736)..(736): n is a, c, g, or t
  misc_feature (746)..(747): n is a, c, g, or t
  misc_feature (756)..(757): n is a, c, g, or t
  misc_feature (766)..(766): n is a, c, g, or t
  misc_feature (768)..(768): n is a, c, g, or t
  misc_feature (772)..(772): n is a, c, g, or t
  misc_feature (795)..(796): n is a, c, g, or t
  misc_feature (802)..(802): n is a, c, g, or t
  misc_feature (806)..(806): n is a, c, g, or t

SEQ ID NO: 381600 - DNA, 2054 bp, Homo Sapiens; identical to SEQ ID NO: 348104
  misc_feature (89)..(133): n is a, c, g, or t
  misc_feature (465)..(475): n is a, c, g, or t
  misc_feature (1843)..(1843): n is a, c, g, or t

SEQ ID NO: 381601 - DNA, 969 bp, Homo Sapiens; identical to SEQ ID NO: 348105
  misc_feature (386)..(448): n is a, c, g, or t
  misc_feature (644)..(702): n is a, c, g, or t

SEQ ID NO: 381602 - DNA, 1358 bp, Homo Sapiens; identical to SEQ ID NO: 348106
  misc_feature (1129)..(1159): n is a, c, g, or t

SEQ ID NO: 381603 - DNA, 447 bp, Homo Sapiens; identical to SEQ ID NO: 348107
  misc_feature (85)..(105): n is a, c, g, or t

SEQ ID NO: 381604 - DNA, 1095 bp, Homo Sapiens; identical to SEQ ID NO: 348108

SEQ ID NO: 381605 - DNA, 918 bp, Homo Sapiens; identical to SEQ ID NO: 348109

SEQ ID NO: 381606 - DNA, 1366 bp, Homo Sapiens; identical to SEQ ID NO: 348110
  misc_feature (1117)..(1117): n is a, c, g, or t
  misc_feature (1140)..(1185): n is a, c, g, or t
  misc_feature (1205)..(1262): n is a, c, g, or t
  misc_feature (1284)..(1322): n is a, c, g, or t

SEQ ID NO: 381607 - DNA, 886 bp, Homo Sapiens; identical to SEQ ID NO: 15378

SEQ ID NO: 381608 - DNA, 967 bp, Homo Sapiens; identical to SEQ ID NO: 348112

SEQ ID NO: 381609 - DNA, 1373 bp, Homo Sapiens; identical to SEQ ID NO: 348113

SEQ ID NO: 381610 - DNA, 419 bp, Homo Sapiens; identical to SEQ ID NO: 348114
  misc_feature (115)..(115): n is a, c, g, or t

SEQ ID NO: 381611 - DNA, 1208 bp, Homo Sapiens; identical to SEQ ID NO: 348118
  misc_feature (113)..(113): n is a, c, g, or t
  misc_feature (303)..(328): n is a, c, g, or t
  misc_feature (345)..(470): n is a, c, g, or t
  misc_feature (475)..(505): n is a, c, g, or t
  misc_feature (544)..(601): n is a, c, g, or t
  misc_feature (1030)..(1048): n is a, c, g, or t

SEQ ID NO: 381612 - DNA, 1284 bp, Homo Sapiens; identical to SEQ ID NO: 348119
  misc_feature (995)..(1039): n is a, c, g, or t
  misc_feature (1176)..(1176): n is a, c, g, or t
  misc_feature (1207)..(1215): n is a, c, g, or t

SEQ ID NO: 381613 - DNA, 1880 bp, Homo Sapiens; identical to SEQ ID NO: 348120
  misc_feature (137)..(187): n is a, c, g, or t
  misc_feature (1622)..(1622): n is a, c, g, or t
  misc_feature (1657)..(1711): n is a, c, g, or t
  misc_feature (1773)..(1773): n is a, c, g, or t

SEQ ID NO: 381614 - DNA, 1710 bp, Homo Sapiens; identical to SEQ ID NO: 348121
  misc_feature (408)..(408): n is a, c, g, or t
  misc_feature (733)..(733): n is a, c, g, or t
  misc_feature (1356)..(1397): n is a, c, g, or t
  misc_feature (1561)..(1561): n is a, c, g, or t
  misc_feature (1646)..(1646): n is a, c, g, or t

SEQ ID NO: 381615 - DNA, 1797 bp, Homo Sapiens; identical to SEQ ID NO: 348122
  misc_feature (99)..(141): n is a, c, g, or t

SEQ ID NO: 381616 - DNA, 357 bp, Homo Sapiens; identical to SEQ ID NO: 348123
  misc_feature (76)..(118): n is a, c, g, or t

SEQ ID NO: 381617 - DNA, 747 bp, Homo Sapiens; identical to SEQ ID NO: 348126
  misc_feature (440)..(489): n is a, c, g, or t

SEQ ID NO: 381618 - DNA, 1040 bp, Homo Sapiens; identical to SEQ ID NO: 348127
  misc_feature (961)..(961): n is a, c, g, or t
  misc_feature (976)..(976): n is a, c, g, or t
  misc_feature (983)..(983): n is a, c, g, or t
  misc_feature (1006)..(1006): n is a, c, g, or t
  misc_feature (1012)..(1012): n is a, c, g, or t

SEQ ID NO: 381619 - DNA, 1395 bp, Homo Sapiens; identical to SEQ ID NO: 348128
  misc_feature (678)..(690): n is a, c, g, or t

SEQ ID NO: 381620 - DNA, 1218 bp, Homo Sapiens; identical to SEQ ID NO: 348129
  misc_feature (822)..(822): n is a, c, g, or t
  misc_feature (1098)..(1098): n is a, c, g, or t

SEQ ID NO: 381621 - DNA, 562 bp, Homo Sapiens; identical to SEQ ID NO: 348130

SEQ ID NO: 381622 - DNA, 2227 bp, Homo Sapiens; identical to SEQ ID NO: 348131
  misc_feature (1285)..(1333): n is a, c, g, or t

SEQ ID NO: 381623 - DNA, 926 bp, Homo Sapiens; identical to SEQ ID NO: 348132

SEQ ID NO: 381624 - DNA, 1922 bp, Homo Sapiens; identical to SEQ ID NO: 348133

SEQ ID NO: 381625 - DNA, 1016 bp, Homo Sapiens; identical to SEQ ID NO: 348134
  misc_feature (69)..(69): n is a, c, g, or t

SEQ ID NO: 381626 - DNA, 743 bp, Homo Sapiens; identical to SEQ ID NO: 348135
  misc_feature (16)..(16): n is a, c, g, or t

SEQ ID NO: 381627 - DNA, 1297 bp, Homo Sapiens; identical to SEQ ID NO: 348136

SEQ ID NO: 381628 - DNA, 1147 bp, Homo Sapiens; identical to SEQ ID NO: 348137
  misc_feature (730)..(730): n is a, c, g, or t
  misc_feature (858)..(858): n is a, c, g, or t

SEQ ID NO: 381629 - DNA, 810 bp, Homo Sapiens; identical to SEQ ID NO: 348139

SEQ ID NO: 381630 - DNA, 569 bp, Homo Sapiens; identical to SEQ ID NO: 348140
  misc_feature (447)..(447): n is a, c, g, or t
  misc_feature (474)..(474): n is a, c, g, or t
  misc_feature (541)..(541): n is a, c, g, or t

SEQ ID NO: 381631 - DNA, 1230 bp, Homo Sapiens; identical to SEQ ID NO: 348141
  misc_feature (1139)..(1139): n is a, c, g, or t

SEQ ID NO: 381632 - DNA, 1520 bp, Homo Sapiens; identical to SEQ ID NO: 348142

SEQ ID NO: 381633 - DNA, 528 bp, Homo Sapiens; identical to SEQ ID NO: 348143

SEQ ID NO: 381634 - DNA, 1698 bp, Homo Sapiens; identical to SEQ ID NO: 348146

SEQ ID NO: 381635 - DNA, 978 bp, Homo Sapiens; identical to SEQ ID NO: 348147
  misc_feature (84)..(84): n is a, c, g, or t
  misc_feature (913)..(913): n is a, c, g, or t

SEQ ID NO: 381636 - DNA, 565 bp, Homo Sapiens; identical to SEQ ID NO: 348149
  misc_feature (77)..(77): n is a, c, g, or t

SEQ ID NO: 381637 - DNA, 1305 bp, Homo Sapiens; identical to SEQ ID NO: 348150
  misc_feature (47)..(47): n is a, c, g, or t
  misc_feature (792)..(801): n is a, c, g, or t

SEQ ID NO: 381638 - DNA, 1527 bp, Homo Sapiens; identical to SEQ ID NO: 348151

SEQ ID NO: 381639 - DNA, 305 bp, Homo Sapiens; identical to SEQ ID NO: 348152
  misc_feature (117)..(117): n is a, c, g, or t
  misc_feature (202)..(202): n is a, c, g, or t
  misc_feature (208)..(208): n is a, c, g, or t

SEQ ID NO: 381640 - DNA, 996 bp, Homo Sapiens; identical to SEQ ID NO: 348153
  misc_feature (68)..(68): n is a, c, g, or t
  misc_feature (89)..(89): n is a, c, g, or t
  misc_feature (94)..(94): n is a, c, g, or t
  misc_feature (129)..(129): n is a, c, g, or t
  misc_feature (134)..(134): n is a, c, g, or t
  misc_feature (140)..(140): n is a, c, g, or t
  misc_feature (153)..(153): n is a, c, g, or t
  misc_feature (190)..(206): n is a, c, g, or t
  misc_feature (478)..(478): n is a, c, g, or t

SEQ ID NO: 381641 - DNA, 712 bp, Homo Sapiens; identical to SEQ ID NO: 348162

SEQ ID NO: 381642 - DNA, 2902 bp, Homo Sapiens; identical to SEQ ID NO: 348163
  misc_feature (1834)..(1847): n is a, c, g, or t

SEQ ID NO: 381643 - DNA, 2107 bp, Homo Sapiens; identical to SEQ ID NO: 348164
  misc_feature (453)..(453): n is a, c, g, or t
  misc_feature (1764)..(1813): n is a, c, g, or t
  misc_feature (1884)..(1979): n is a, c, g, or t

SEQ ID NO: 381644 - DNA, 959 bp, Homo Sapiens; identical to SEQ ID NO: 348165

SEQ ID NO: 381645 - DNA, 885 bp, Homo Sapiens; identical to SEQ ID NO: 348166

SEQ ID NO: 381646 - DNA, 952 bp, Homo Sapiens; identical to SEQ ID NO: 348167
  misc_feature (759)..(759): n is a, c, g, or t
  misc_feature (773)..(773): n is a, c, g, or t
  misc_feature (786)..(787): n is a, c, g, or t
  misc_feature (807)..(807): n is a, c, g, or t
  misc_feature (818)..(818): n is a, c, g, or t
  misc_feature (834)..(834): n is a, c, g, or t
  misc_feature (842)..(842): n is a, c, g, or t
  misc_feature (851)..(851): n is a, c, g, or t
  misc_feature (856)..(856): n is a, c, g, or t
  misc_feature (864)..(864): n is a, c, g, or t
  misc_feature (868)..(869): n is a, c, g, or t
  misc_feature (875)..(876): n is a, c, g, or t
  misc_feature (879)..(879): n is a, c, g, or t
  misc_feature (900)..(900): n is a, c, g, or t
  misc_feature (935)..(935): n is a, c, g, or t
  misc_feature (939)..(939): n is a, c, g, or t
  misc_feature (941)..(941): n is a, c, g, or t
  misc_feature (949)..(949): n is a, c, g, or t

SEQ ID NO: 381647 - DNA, 1658 bp, Homo Sapiens; identical to SEQ ID NO: 348168
  misc_feature (3)..(3): n is a, c, g, or t
  misc_feature (16)..(16): n is a, c, g, or t
  misc_feature (20)..(20): n is a, c, g, or t
  misc_feature (23)..(23): n is a, c, g, or t
  misc_feature (29)..(29): n is a, c, g, or t
  misc_feature (31)..(31): n is a, c, g, or t
  misc_feature (44)..(44): n is a, c, g, or t
  misc_feature (48)..(48): n is a, c, g, or t
  misc_feature (55)..(55): n is a, c, g, or t
  misc_feature (71)..(71): n is a, c, g, or t
  misc_feature (95)..(95): n is a, c, g, or t

SEQ ID NO: 381648 - DNA, 731 bp, Homo Sapiens; identical to SEQ ID NO: 348169
  misc_feature (90)..(90): n is a, c, g, or t

SEQ ID NO: 381649 - DNA, 1335 bp, Homo Sapiens; identical to SEQ ID NO: 348170
  misc_feature (45)..(45): n is a, c, g, or t
  misc_feature (54)..(54): n is a, c, g, or t
  misc_feature (122)..(122): n is a, c, g, or t
  misc_feature (450)..(504): n is a, c, g, or t
  misc_feature (591)..(642): n is a, c, g, or t
  misc_feature (691)..(691): n is a, c, g, or t
  misc_feature (794)..(832): n is a, c, g, or t
  misc_feature (1320)..(1320): n is a, c, g, or t

SEQ ID NO: 381650 - DNA, 497 bp, Homo Sapiens; identical to SEQ ID NO: 348171
  misc_feature (130)..(184): n is a, c, g, or t
  misc_feature (279)..(322): n is a, c, g, or t

SEQ ID NO: 381651 - DNA, 950 bp, Homo Sapiens; identical to SEQ ID NO: 348172
  misc_feature (680)..(680): n is a, c, g, or t
  misc_feature (690)..(822): n is a, c, g, or t
  misc_feature (850)..(850): n is a, c, g, or t
  misc_feature (866)..(866): n is a, c, g, or t
  misc_feature (883)..(883): n is a, c, g, or t
  misc_feature (896)..(896): n is a, c, g, or t
  misc_feature (925)..(925): n is a, c, g, or t

SEQ ID NO: 381652 - DNA, 1133 bp, Homo Sapiens; identical to SEQ ID NO: 348174

SEQ ID NO: 381653 - DNA, 1583 bp, Homo Sapiens; identical to SEQ ID NO: 348175

SEQ ID NO: 381654 - DNA, 373 bp, Homo Sapiens; identical to SEQ ID NO: 348176

SEQ ID NO: 381655 - DNA, 819 bp, Homo Sapiens; identical to SEQ ID NO: 348181
  misc_feature (42)..(55): n is a, c, g, or t
  misc_feature (391)..(422): n is a, c, g, or t
  misc_feature (449)..(449): n is a, c, g, or t
  misc_feature (559)..(559): n is a, c, g, or t
  misc_feature (576)..(576): n is a, c, g, or t
  misc_feature (641)..(641): n is a, c, g, or t
  misc_feature (667)..(667): n is a, c, g, or t

SEQ ID NO: 381656 - DNA, 1229 bp, Homo Sapiens; identical to SEQ ID NO: 348182
  misc_feature (173)..(173): n is a, c, g, or t
  misc_feature (260)..(291): n is a, c, g, or t
  misc_feature (605)..(605): n is a, c, g, or t

SEQ ID NO: 381657 - DNA, 1462 bp, Homo Sapiens; identical to SEQ ID NO: 348186
  misc_feature (1318)..(1318): n is a, c, g, or t

SEQ ID NO: 381658 - DNA, 1012 bp, Homo Sapiens; identical to SEQ ID NO: 348187
  misc_feature (32)..(32): n is a, c, g, or t
  misc_feature (73)..(73): n is a, c, g, or t
  misc_feature (920)..(928): n is a, c, g, or t
  misc_feature (977)..(977): n is a, c, g, or t

SEQ ID NO: 381659 - DNA, 1004 bp, Homo Sapiens; identical to SEQ ID NO: 348188

SEQ ID NO: 381660 - DNA, 494 bp, Homo Sapiens; identical to SEQ ID NO: 348189

SEQ ID NO: 381661 - DNA, 735 bp, Homo Sapiens; identical to SEQ ID NO: 348190

SEQ ID NO: 381662 - DNA, 1226 bp, Homo Sapiens; identical to SEQ ID NO: 348191
  misc_feature (1155)..(1172): n is a, c, g, or t

SEQ ID NO: 381663 - DNA, 897 bp, Homo Sapiens; identical to SEQ ID NO: 348192
  misc_feature (170)..(178): n is a, c, g, or t

SEQ ID NO: 381664 - DNA, 826 bp, Homo Sapiens; identical to SEQ ID NO: 348193

SEQ ID NO: 381665 - DNA, 1839 bp, Homo Sapiens; identical to SEQ ID NO: 348195
  misc_feature (53)..(53): n is a, c, g, or t
  misc_feature (1829)..(1829): n is a, c, g, or t

SEQ ID NO: 381666 - DNA, 423 bp, Homo Sapiens; identical to SEQ ID NO: 348196
  misc_feature (8)..(8): n is a, c, g, or t
  misc_feature (19)..(19): n is a, c, g, or t
  misc_feature (25)..(25): n is a, c, g, or t
  misc_feature (41)..(41): n is a, c, g, or t
  misc_feature (46)..(46): n is a, c, g, or t
  misc_feature (56)..(56): n is a, c, g, or t
  misc_feature (61)..(61): n is a, c, g, or t
  misc_feature (78)..(78): n is a, c, g, or t
  misc_feature (80)..(80): n is a, c, g, or t
  misc_feature (87)..(87): n is a, c, g, or t
  misc_feature (90)..(90): n is a, c, g, or t
  misc_feature (105)..(105): n is a, c, g, or t
  misc_feature (109)..(109): n is a, c, g, or t
  misc_feature (111)..(111): n is a, c, g, or t
  misc_feature (127)..(127): n is a, c, g, or t
  misc_feature (143)..(143): n is a, c, g, or t
  misc_feature (151)..(151): n is a, c, g, or t
  misc_feature (159)..(159): n is a, c, g, or t
  misc_feature (167)..(167): n is a, c, g, or t
  misc_feature (175)..(175): n is a, c, g, or t
  misc_feature (190)..(190): n is a, c, g, or t
  misc_feature (204)..(204): n is a, c, g, or t
  misc_feature (217)..(217): n is a, c, g, or t
  misc_feature (237)..(237): n is a, c, g, or t
  misc_feature (343)..(343): n is a, c, g, or t

SEQ ID NO: 381667 - DNA, 672 bp, Homo Sapiens; identical to SEQ ID NO: 348198

SEQ ID NO: 381668 - DNA, 486 bp, Homo Sapiens; identical to SEQ ID NO: 348199
  misc_feature (26)..(26): n is a, c, g, or t

SEQ ID NO: 381669 - DNA, 672 bp, Homo Sapiens; identical to SEQ ID NO: 348202

SEQ ID NO: 381670 - DNA, 775 bp, Homo Sapiens; identical to SEQ ID NO: 348203
  misc_feature (273)..(273): n is a, c, g, or t

SEQ ID NO: 381671 - DNA, 979 bp, Homo Sapiens; identical to SEQ ID NO: 348204

SEQ ID NO: 381672 - DNA, 481 bp, Homo Sapiens; identical to SEQ ID NO: 348205
  misc_feature (394)..(394): n is a, c, g, or t
  misc_feature (402)..(402): n is a, c, g, or t
  misc_feature (450)..(450): n is a, c, g, or t
  misc_feature (465)..(465): n is a, c, g, or t

SEQ ID NO: 381673 - DNA, 428 bp, Homo Sapiens; identical to SEQ ID NO: 348206

SEQ ID NO: 381674 - DNA, 839 bp, Homo Sapiens; identical to SEQ ID NO: 348209

SEQ ID NO: 381675 - DNA, 765 bp, Homo Sapiens; identical to SEQ ID NO: 348210

SEQ ID NO: 381676 - DNA, 1083 bp, Homo Sapiens; identical to SEQ ID NO: 348211
  misc_feature (1043)..(1043): n is a, c, g, or t
  misc_feature (1050)..(1050): n is a, c, g, or t
  misc_feature (1054)..(1054): n is a, c, g, or t
  misc_feature (1061)..(1061): n is a, c, g, or t
  misc_feature (1067)..(1069): n is a, c, g, or t

SEQ ID NO: 381677 - DNA, 1112 bp, Homo Sapiens; identical to SEQ ID NO: 348212
  misc_feature (201)..(201): n is a, c, g, or t
  misc_feature (715)..(715): n is a, c, g, or t

SEQ ID NO: 381678 - DNA, 1250 bp, Homo Sapiens; identical to SEQ ID NO: 348219
  misc_feature (986)..(986): n is a, c, g, or t
  misc_feature (1009)..(1009): n is a, c, g, or t
  misc_feature (1013)..(1013): n is a, c, g, or t
  misc_feature (1033)..(1033): n is a, c, g, or t
  misc_feature (1095)..(1095): n is a, c, g, or t
  misc_feature (1113)..(1113): n is a, c, g, or t
  misc_feature (1185)..(1185): n is a, c, g, or t

SEQ ID NO: 381679 - DNA, 2571 bp, Homo Sapiens; identical to SEQ ID NO: 348220

SEQ ID NO: 381680 - DNA, 839 bp, Homo Sapiens; identical to SEQ ID NO: 348221

SEQ ID NO: 381681 - DNA, 1070 bp, Homo Sapiens; identical to SEQ ID NO: 348222

SEQ ID NO: 381682 - DNA, 986 bp, Homo Sapiens; identical to SEQ ID NO: 348223
  misc_feature (918)..(918): n is a, c, g, or t
  misc_feature (930)..(930): n is a, c, g, or t

SEQ ID NO: 381683 - DNA, 1503 bp, Homo Sapiens; identical to SEQ ID NO: 348224

SEQ ID NO: 381684 - DNA, 444 bp, Homo Sapiens; identical to SEQ ID NO: 348225
  misc_feature (311)..(311): n is a, c, g, or t

SEQ ID NO: 381685 - DNA, 844 bp, Homo Sapiens; identical to SEQ ID NO: 348226

SEQ ID NO: 381686 - DNA, 1827 bp, Homo Sapiens; identical to SEQ ID NO: 348227

SEQ ID NO: 381687 - DNA, 699 bp, Homo Sapiens; identical to SEQ ID NO: 348228
  misc_feature (119)..(119): n is a, c, g, or t
  misc_feature (251)..(251): n is a, c, g, or t

SEQ ID NO: 381688 - DNA, 915 bp, Homo Sapiens; identical to SEQ ID NO: 348229

SEQ ID NO: 381689 - DNA, 1476 bp, Homo Sapiens; identical to SEQ ID NO: 348234
  misc_feature (1245)..(1245): n is a, c, g, or t

SEQ ID NO: 381690 - DNA, 2016 bp, Homo Sapiens; identical to SEQ ID NO: 348235
  misc_feature (154)..(154): n is a, c, g, or t
  misc_feature (259)..(259): n is a, c, g, or t
  misc_feature (314)..(314): n is a, c, g, or t

SEQ ID NO: 381691 - DNA, 569 bp, Homo Sapiens; identical to SEQ ID NO: 348236
  misc_feature (21)..(21): n is a, c, g, or t

SEQ ID NO: 381692 - DNA, 1447 bp, Homo Sapiens; identical to SEQ ID NO: 348237
  misc_feature (902)..(902): n is a, c, g, or t
  misc_feature (1090)..(1171): n is a, c, g, or t

SEQ ID NO: 381693 - DNA, 1280 bp, Homo Sapiens; identical to SEQ ID NO: 348238

SEQ ID NO: 381694 - DNA, 858 bp, Homo Sapiens; identical to SEQ ID NO: 348242

SEQ ID NO: 381695 - DNA, 2484 bp, Homo Sapiens; identical to SEQ ID NO: 348243
  misc_feature (655)..(655): n is a, c, g, or t
  misc_feature (664)..(664): n is a, c, g, or t
  misc_feature (672)..(672): n is a, c, g, or t
  misc_feature (682)..(682): n is a, c, g, or t
  misc_feature (686)..(686): n is a, c, g, or t
  misc_feature (699)..(699): n is a, c, g, or t
  misc_feature (717)..(718): n is a, c, g, or t
  misc_feature (724)..(724): n is a, c, g, or t
  misc_feature (731)..(731): n is a, c, g, or t
  misc_feature (737)..(737): n is a, c, g, or t
  misc_feature (747)..(748): n is a, c, g, or t
  misc_feature (754)..(754): n is a, c, g, or t
  misc_feature (764)..(764): n is a, c, g, or t
  misc_feature (783)..(783): n is a, c, g, or t
  misc_feature (789)..(789): n is a, c, g, or t
  misc_feature (807)..(807): n is a, c, g, or t
  misc_feature (811)..(811): n is a, c, g, or t
  misc_feature (815)..(815): n is a, c, g, or t
  misc_feature (818)..(819): n is a, c, g, or t
  misc_feature (822)..(822): n is a, c, g, or t
  misc_feature (825)..(825): n is a, c, g, or t
  misc_feature (827)..(827): n is a, c, g, or t
  misc_feature (833)..(834): n is a, c, g, or t
  misc_feature (844)..(844): n is a, c, g, or t
  misc_feature (847)..(848): n is a, c, g, or t
  misc_feature (860)..(860): n is a, c, g, or t
  misc_feature (879)..(879): n is a, c, g, or t
  misc_feature (882)..(883): n is a, c, g, or t
  misc_feature (890)..(890): n is a, c, g, or t
  misc_feature (896)..(896): n is a, c, g, or t

SEQ ID NO: 381696 - DNA, 827 bp, Homo Sapiens; identical to SEQ ID NO: 348244
  misc_feature (12)..(12): n is a, c, g, or t
  misc_feature (115)..(115): n is a, c, g, or t

SEQ ID NO: 381697 - DNA, 1753 bp, Homo Sapiens; identical to SEQ ID NO: 348245
  misc_feature (141)..(141): n is a, c, g, or t

SEQ ID NO: 381698 - DNA, 960 bp, Homo Sapiens; identical to SEQ ID NO: 348246
  misc_feature (83)..(84): n is a, c, g, or t
  misc_feature (97)..(97): n is a, c, g, or t
  misc_feature (280)..(280): n is a, c, g, or t
  misc_feature (283)..(283): n is a, c, g, or t
  misc_feature (296)..(296): n is a, c, g, or t
  misc_feature (317)..(317): n is a, c, g, or t
  misc_feature (320)..(320): n is a, c, g, or t
  misc_feature (335)..(335): n is a, c, g, or t
  misc_feature (375)..(375): n is a, c, g, or t
  misc_feature (377)..(377): n is a, c, g, or t
  misc_feature (379)..(379): n is a, c, g, or t
  misc_feature (420)..(421): n is a, c, g, or t
  misc_feature (446)..(446): n is a, c, g, or t
  misc_feature (449)..(450): n is a, c, g, or t
  misc_feature (461)..(461): n is a, c, g, or t
  misc_feature (464)..(464): n is a, c, g, or t
  misc_feature (466)..(467): n is a, c, g, or t
  misc_feature (486)..(487): n is a, c, g, or t
  misc_feature (493)..(493): n is a, c, g, or t
  misc_feature (497)..(498): n is a, c, g, or t
  misc_feature (501)..(502): n is a, c, g, or t
  misc_feature (504)..(504): n is a, c, g, or t
  misc_feature (506)..(506): n is a, c, g, or t
  misc_feature (515)..(516): n is a, c, g, or t
  misc_feature (520)..(520): n is a, c, g, or t

SEQ ID NO: 381699 - DNA, 972 bp, Homo Sapiens; identical to SEQ ID NO: 348247
  misc_feature (745)..(783): n is a, c, g, or t
  misc_feature (812)..(812): n is a, c, g, or t
  misc_feature (820)..(821): n is a, c, g, or t
  misc_feature (892)..(892): n is a, c, g, or t

SEQ ID NO: 381700 - DNA, 1007 bp, Homo Sapiens; identical to SEQ ID NO: 348248

SEQ ID NO: 381701 - DNA, 294 bp, Homo Sapiens; identical to SEQ ID NO: 348249
  misc_feature (11)..(11): n is a, c, g, or t
  misc_feature (24)..(24): n is a, c, g, or t
  misc_feature (34)..(34): n is a, c, g, or t
  misc_feature (81)..(81): n is a, c, g, or t

SEQ ID NO: 381702 - DNA, 439 bp, Homo Sapiens; identical to SEQ ID NO: 348250
  misc_feature (389)..(389): n is a, c, g, or t
  misc_feature (401)..(401): n is a, c, g, or t

SEQ ID NO: 381703 - DNA, 1111 bp, Homo Sapiens; identical to SEQ ID NO: 348253
  misc_feature (963)..(963): n is a, c, g, or t

SEQ ID NO: 381704 - DNA, 2207 bp, Homo Sapiens; identical to SEQ ID NO: 348254
  misc_feature (1691)..(1691): n is a, c, g, or t
  misc_feature (1768)..(1768): n is a, c, g, or t
  misc_feature (2023)..(2023): n is a, c, g, or t
  misc_feature (2059)..(2059): n is a, c, g, or t
  misc_feature (2131)..(2131): n is a, c, g, or t
  misc_feature (2133)..(2133): n is a, c, g, or t

SEQ ID NO: 381705 - DNA, 480 bp, Homo Sapiens; identical to SEQ ID NO: 348255

SEQ ID NO: 381706 - DNA, 1699 bp, Homo Sapiens; identical to SEQ ID NO: 348256

SEQ ID NO: 381707 - DNA, 1020 bp, Homo Sapiens; identical to SEQ ID NO: 348258
  misc_feature (30)..(31): n is a, c, g, or t
  misc_feature (454)..(454): n is a, c, g, or t
  misc_feature (472)..(491): n is a, c, g, or t
  misc_feature (494)..(494): n is a, c, g, or t
  misc_feature (502)..(503): n is a, c, g, or t
  misc_feature (506)..(506): n is a, c, g, or t
  misc_feature (518)..(518): n is a, c, g, or t
  misc_feature (523)..(523): n is a, c, g, or t
  misc_feature (533)..(533): n is a, c, g, or t
  misc_feature (573)..(573): n is a, c, g, or t
  misc_feature (659)..(659): n is a, c, g, or t
  misc_feature (670)..(670): n is a, c, g, or t
  misc_feature (678)..(679): n is a, c, g, or t
  misc_feature (736)..(736): n is a, c, g, or t
  misc_feature (746)..(760): n is a, c, g, or t
  misc_feature (777)..(778): n is a, c, g, or t
  misc_feature (801)..(802): n is a, c, g, or t
  misc_feature (814)..(814): n is a, c, g, or t
  misc_feature (816)..(816): n is a, c, g, or t
  misc_feature (819)..(819): n is a, c, g, or t
  misc_feature (868)..(868): n is a, c, g, or t
  misc_feature (875)..(875): n is a, c, g, or t
  misc_feature (877)..(878): n is a, c, g, or t
  misc_feature (921)..(921): n is a, c, g, or t
  misc_feature (924)..(924): n is a, c, g, or t
  misc_feature (927)..(927): n is a, c, g, or t
  misc_feature (939)..(939): n is a, c, g, or t
  misc_feature (966)..(966): n is a, c, g, or t
  misc_feature (985)..(987): n is a, c, g, or t
  misc_feature (999)..(999): n is a, c, g, or t
  misc_feature (1012)..(1012): n is a, c, g, or t

SEQ ID NO: 381708 - DNA, 1786 bp, Homo Sapiens; identical to SEQ ID NO: 348259
  misc_feature (1286)..(1286): n is a, c, g, or t
  misc_feature (1288)..(1288): n is a, c, g, or t

SEQ ID NO: 381709 - DNA, 1186 bp, Homo Sapiens; identical to SEQ ID NO: 348260
  misc_feature (1084)..(1084): n is a, c, g, or t
  misc_feature (1098)..(1098): n is a, c, g, or t
  misc_feature (1100)..(1100): n is a, c, g, or t
  misc_feature (1115)..(1115): n is a, c, g, or t
  misc_feature (1120)..(1122): n is a, c, g, or t
  misc_feature (1125)..(1125): n is a, c, g, or t
  misc_feature (1165)..(1166): n is a, c, g, or t
  misc_feature (1171)..(1171): n is a, c, g, or t
  misc_feature (1175)..(1176): n is a, c, g, or t
  misc_feature (1184)..(1184): n is a, c, g, or t
  misc_feature (1186)..(1186): n is a, c, g, or t

SEQ ID NO: 381710 - DNA, 591 bp, Homo Sapiens; identical to SEQ ID NO: 348261
  misc_feature (55)..(74): n is a, c, g, or t

SEQ ID NO: 381711 - DNA, 894 bp, Homo Sapiens; identical to SEQ ID NO: 348262

SEQ ID NO: 381712 - DNA, 457 bp, Homo Sapiens; identical to SEQ ID NO: 348263
  misc_feature (16)..(16): n is a, c, g, or t
  misc_feature (57)..(57): n is a, c, g, or t

SEQ ID NO: 381713 - DNA, 2263 bp, Homo Sapiens; identical to SEQ ID NO: 348266
  misc_feature (22)..(22): n is a, c, g, or t
  misc_feature (80)..(80): n is a, c, g, or t

SEQ ID NO: 381714 - DNA, 482 bp, Homo Sapiens; identical to SEQ ID NO: 348267

SEQ ID NO: 381715 - DNA, 2255 bp, Homo Sapiens; identical to SEQ ID NO: 348269
  misc_feature (780)..(815): n is a, c, g, or t
  misc_feature (2165)..(2165): n is a, c, g, or t
  misc_feature (2171)..(2171): n is a, c, g, or t
  misc_feature (2204)..(2204): n is a, c, g, or t
  misc_feature (2213)..(2213): n is a, c, g, or t
  misc_feature (2241)..(2241): n is a, c, g, or t

SEQ ID NO: 381716 - DNA, 1643 bp, Homo Sapiens; identical to SEQ ID NO: 348270
  misc_feature (995)..(995): n is a, c, g, or t

SEQ ID NO: 381717 - DNA, 1276 bp, Homo Sapiens; identical to SEQ ID NO: 348273
  misc_feature (39)..(39): n is a, c, g, or t
  misc_feature (41)..(41): n is a, c, g, or t
  misc_feature (46)..(46): n is a, c, g, or t
  misc_feature (48)..(50): n is a, c, g, or t
  misc_feature (143)..(143): n is a, c, g, or t
  misc_feature (146)..(187): n is a, c, g, or t
  misc_feature (1232)..(1232): n is a, c, g, or t
  misc_feature (1244)..(1244): n is a, c, g, or t
  misc_feature (1250)..(1250): n is a, c, g, or t
  misc_feature (1258)..(1258): n is a, c, g, or t

SEQ ID NO: 381718 - DNA, 578 bp, Homo Sapiens; identical to SEQ ID NO: 348274
  misc_feature (516)..(516): n is a, c, g, or t
  misc_feature (534)..(534): n is a, c, g, or t
  misc_feature (547)..(547): n is a, c, g, or t
  misc_feature (555)..(555): n is a, c, g, or t
  misc_feature (560)..(560): n is a, c, g, or t

SEQ ID NO: 381719 - DNA, 1826 bp, Homo Sapiens; identical to SEQ ID NO: 348281
  misc_feature (88)..(106): n is a, c, g, or t
  misc_feature (305)..(316): n is a, c, g, or t
  misc_feature (1568)..(1568): n is a, c, g, or t
  misc_feature (1570)..(1570): n is a, c, g, or t
  misc_feature (1630)..(1630): n is a, c, g, or t
  misc_feature (1649)..(1663): n is a, c, g, or t
  misc_feature (1687)..(1696): n is a, c, g, or t

SEQ ID NO: 381720 - DNA, 2357 bp, Homo Sapiens; identical to SEQ ID NO: 348282
  misc_feature (743)..(743): n is a, c, g, or t
  misc_feature (2141)..(2159): n is a, c, g, or t

SEQ ID NO: 381721 - DNA, 1362 bp, Homo Sapiens; identical to SEQ ID NO: 348285
  misc_feature (97)..(256): n is a, c, g, or t
  misc_feature (319)..(373): n is a, c, g, or t
  misc_feature (534)..(534): n is a, c, g, or t
  misc_feature (981)..(1003): n is a, c, g, or t

SEQ ID NO: 381722 - DNA, 1025 bp, Homo Sapiens; identical to SEQ ID NO: 348286

SEQ ID NO: 381723 - DNA, 795 bp, Homo Sapiens; identical to SEQ ID NO: 348287
  misc_feature (216)..(283): n is a, c, g, or t

SEQ ID NO: 381724 - DNA, 1191 bp, Homo Sapiens; identical to SEQ ID NO: 348289
  misc_feature (681)..(682): n is a, c, g, or t
  misc_feature (749)..(749): n is a, c, g, or t
  misc_feature (778)..(790): n is a, c, g, or t
  misc_feature (800)..(800): n is a, c, g, or t
  misc_feature (808)..(1053): n is a, c, g, or t
  misc_feature (1093)..(1093): n is a, c, g, or t
  misc_feature (1112)..(1112): n is a, c, g, or t
  misc_feature (1133)..(1133): n is a, c, g, or t
  misc_feature (1146)..(1146): n is a, c, g, or t
  misc_feature (1163)..(1163): n is a, c, g, or t

SEQ ID NO: 381725 - DNA, 1163 bp, Homo Sapiens; identical to SEQ ID NO: 348290
  misc_feature (910)..(923): n is a, c, g, or t
  misc_feature (1114)..(1114): n is a, c, g, or t

SEQ ID NO: 381726 - DNA, 445 bp, Homo Sapiens; identical to SEQ ID NO: 348291

SEQ ID NO: 381727 - DNA, 2137 bp, Homo Sapiens; identical to SEQ ID NO: 348293
  misc_feature (1473)..(1515): n is a, c, g, or t
  misc_feature (1699)..(1699): n is a, c, g, or t
  misc_feature (1701)..(1736): n is a, c, g, or t
  misc_feature (1751)..(1797): n is a, c, g, or t
  misc_feature (1927)..(1993): n is a, c, g, or t

SEQ ID NO: 381728 - DNA, 603 bp, Homo Sapiens; identical to SEQ ID NO: 348294
  misc_feature (35)..(35): n is a, c, g, or t
  misc_feature (44)..(44): n is a, c, g, or t
  misc_feature (49)..(49): n is a, c, g, or t
  misc_feature (53)..(53): n is a, c, g, or t
  misc_feature (62)..(62): n is a, c, g, or t
  misc_feature (141)..(141): n is a, c, g, or t

SEQ ID NO: 381729 - DNA, 1176 bp, Homo Sapiens; identical to SEQ ID NO: 348296

SEQ ID NO: 381730 - DNA, 1110 bp, Homo Sapiens; identical to SEQ ID NO: 348297
  misc_feature (66)..(66): n is a, c, g, or t

SEQ ID NO: 381731 - DNA, 2044 bp, Homo Sapiens; identical to SEQ ID NO: 348299
  misc_feature (1772)..(1772): n is a, c, g, or t

SEQ ID NO: 381732 - DNA, 1271 bp, Homo Sapiens; identical to SEQ ID NO: 348300
  misc_feature (221)..(259): n is a, c, g, or t
  misc_feature (473)..(499): n is a, c, g, or t

SEQ ID NO: 381733 - DNA, 533 bp, Homo Sapiens; identical to SEQ ID NO: 348301
  misc_feature (34)..(34): n is a, c, g, or t
  misc_feature (266)..(308): n is a, c, g, or t

SEQ ID NO: 381734 - DNA, 2129 bp, Homo Sapiens; identical to SEQ ID NO: 348304

SEQ ID NO: 381735 - DNA, 1146 bp, Homo Sapiens; identical to SEQ ID NO: 348305

SEQ ID NO: 381736 - DNA, 1878 bp, Homo Sapiens; identical to SEQ ID NO: 348310

SEQ ID NO: 381737 - DNA, 942 bp, Homo Sapiens; identical to SEQ ID NO: 348311
  misc_feature (23)..(23): n is a, c, g, or t

SEQ ID NO: 381738 - DNA, 805 bp, Homo Sapiens; identical to SEQ ID NO: 348312
  misc_feature (287)..(287): n is a, c, g, or t
  misc_feature (417)..(417): n is a, c, g, or t
  misc_feature (548)..(548): n is a, c, g, or t
  misc_feature (550)..(642): n is a, c, g, or t
  misc_feature (748)..(749): n is a, c, g, or t
  misc_feature (760)..(760): n is a, c, g, or t
  misc_feature (764)..(764): n is a, c, g, or t
  misc_feature (766)..(766): n is a, c, g, or t
  misc_feature (792)..(792): n is a, c, g, or t

SEQ ID NO: 381739 - DNA, 1081 bp, Homo Sapiens; identical to SEQ ID NO: 348313
  misc_feature (105)..(167): n is a, c, g, or t
  misc_feature (608)..(608): n is a, c, g, or t
  misc_feature (826)..(826): n is a, c, g, or t
  misc_feature (867)..(867): n is a, c, g, or t
  misc_feature (907)..(907): n is a, c, g, or t
  misc_feature (919)..(919): n is a, c, g, or t
  misc_feature (975)..(975): n is a, c, g, or t
  misc_feature (986)..(986): n is a, c, g, or t
  misc_feature (995)..(995): n is a, c, g, or t
  misc_feature (1007)..(1007): n is a, c, g, or t
  misc_feature (1018)..(1018): n is a, c, g, or t
  misc_feature (1020)..(1021): n is a, c, g, or t
  misc_feature (1027)..(1027): n is a, c, g, or t
  misc_feature (1029)..(1029): n is a, c, g, or t
  misc_feature (1035)..(1035): n is a, c, g, or t
  misc_feature (1048)..(1048): n is a, c, g, or t
  misc_feature (1053)..(1053): n is a, c, g, or t
  misc_feature (1055)..(1055): n is a, c, g, or t
  misc_feature (1061)..(1061): n is a, c, g, or t
  misc_feature (1077)..(1077): n is a, c, g, or t

SEQ ID NO: 381740 - DNA, 919 bp, Homo Sapiens; identical to SEQ ID NO: 348314
  misc_feature (5)..(6): n is a, c, g, or t
  misc_feature (12)..(13): n is a, c, g, or t
  misc_feature (41)..(41): n is a, c, g, or t
  misc_feature (169)..(169): n is a, c, g, or t
  misc_feature (171)..(171): n is a, c, g, or t
  misc_feature (178)..(257): n is a, c, g, or t
  misc_feature (894)..(894): n is a, c, g, or t
  misc_feature (905)..(905): n is a, c, g, or t

SEQ ID NO: 381741 - DNA, 393 bp, Homo Sapiens; identical to SEQ ID NO: 348320

SEQ ID NO: 381742 - DNA, 1405 bp, Homo Sapiens; identical to SEQ ID NO: 348321
  misc_feature (1284)..(1344): n is a, c, g, or t

SEQ ID NO: 381743 - DNA, 1800 bp, Homo Sapiens; identical to SEQ ID NO: 348324
  misc_feature (956)..(990): n is a, c, g, or t
  misc_feature (1191)..(1191): n is a, c, g, or t
  misc_feature (1263)..(1263): n is a, c, g, or t
  misc_feature (1546)..(1594): n is a, c, g, or t

SEQ ID NO: 381744 - DNA, 2238 bp, Homo Sapiens; identical to SEQ ID NO: 348325
  misc_feature (83)..(131): n is a, c, g, or t
  misc_feature (891)..(907): n is a, c, g, or t
  misc_feature (1409)..(1409): n is a, c, g, or t
  misc_feature (1501)..(1544): n is a, c, g, or t
  misc_feature (1682)..(1682): n is a, c, g, or t

SEQ ID NO: 381745 - DNA, 493 bp, Homo Sapiens; identical to SEQ ID NO: 348326
  misc_feature (62)..(62): n is a, c, g, or t
  misc_feature (110)..(110): n is a, c, g, or t

SEQ ID NO: 381746 - DNA, 1663 bp, Homo Sapiens; identical to SEQ ID NO: 348329
  misc_feature (78)..(114): n is a, c, g, or t

SEQ ID NO: 381747 - DNA, 418 bp, Homo Sapiens; identical to SEQ ID NO: 348330
  misc_feature (108)..(108): n is a, c, g, or t

SEQ ID NO: 381748 - DNA, 1715 bp, Homo Sapiens; identical to SEQ ID NO: 348333
  misc_feature (124)..(200): n is a, c, g, or t
  misc_feature (1650)..(1651): n is a, c, g, or t
  misc_feature (1653)..(1653): n is a, c, g, or t
  misc_feature (1662)..(1662): n is a, c, g, or t
  misc_feature (1671)..(1675): n is a, c, g, or t

SEQ ID NO: 381749 - DNA, 956 bp, Homo Sapiens; identical to SEQ ID NO: 348334
  misc_feature (408)..(408): n is a, c, g, or t

SEQ ID NO: 381750 - DNA, 3735 bp, Homo Sapiens; identical to SEQ ID NO: 348340
  misc_feature (64)..(100): n is a, c, g, or t
  misc_feature (569)..(586): n is a, c, g, or t

SEQ ID NO: 381751 - DNA, 539 bp, Homo Sapiens; identical to SEQ ID NO: 348341

SEQ ID NO: 381752 - DNA, 991 bp, Homo Sapiens; identical to SEQ ID NO: 348346

SEQ ID NO: 381753 - DNA, 903 bp, Homo Sapiens; identical to SEQ ID NO: 348347

SEQ ID NO: 381754 - DNA, 2472 bp, Homo Sapiens; identical to SEQ ID NO: 348348
  misc_feature (1754)..(1764): n is a, c, g, or t

SEQ ID NO: 381755 - DNA, 1251 bp, Homo Sapiens; identical to SEQ ID NO: 348352

SEQ ID NO: 381756 - DNA, 998 bp, Homo Sapiens; identical to SEQ ID NO: 348353

SEQ ID NO: 381757 - DNA, 1424 bp, Homo Sapiens; identical to SEQ ID NO: 348354
  misc_feature (1087)..(1087): n is a, c, g, or t
  misc_feature (1162)..(1162): n is a, c, g, or t
  misc_feature (1385)..(1385): n is a, c, g, or t
  misc_feature (1417)..(1417): n is a, c, g, or t
  misc_feature (1421)..(1421): n is a, c, g, or t

SEQ ID NO: 381758 - DNA, 1572 bp, Homo Sapiens; identical to SEQ ID NO: 348355
  misc_feature (1380)..(1380): n is a, c, g, or t
  misc_feature (1382)..(1382): n is a, c, g, or t

SEQ ID NO: 381759 - DNA, 1886 bp, Homo Sapiens; identical to SEQ ID NO: 348356

SEQ ID NO: 381760 - DNA, 1145 bp, Homo Sapiens; identical to SEQ ID NO: 348357

SEQ ID NO: 381761 - DNA, 1103 bp, Homo Sapiens; identical to SEQ ID NO: 348360
  misc_feature (325)..(567): n is a, c, g, or t
  misc_feature (588)..(607): n is a, c, g, or t

SEQ ID NO: 381762 - DNA, 925 bp, Homo Sapiens; identical to SEQ ID NO: 348361
  misc_feature (55)..(74): n is a, c, g, or t
  misc_feature (95)..(337): n is a, c, g, or t

SEQ ID NO: 381763 - DNA, 1943 bp, Homo Sapiens; identical to SEQ ID NO: 348362

SEQ ID NO: 381764 - DNA, 969 bp, Homo Sapiens; identical to SEQ ID NO: 348363

SEQ ID NO: 381765 - DNA, 2190 bp, Homo Sapiens; identical to SEQ ID NO: 348364
  misc_feature (975)..(975): n is a, c, g, or t
  misc_feature (1542)..(1542): n is a, c, g, or t
  misc_feature (1590)..(1590): n is a, c, g, or t
  misc_feature (1602)..(1602): n is a, c, g, or t
  misc_feature (1609)..(1609): n is a, c, g, or t
  misc_feature (1625)..(1625): n is a, c, g, or t
  misc_feature (1632)..(1632): n is a, c, g, or t
  misc_feature (1656)..(1657): n is a, c, g, or t
  misc_feature (1661)..(1663): n is a, c, g, or t
  misc_feature (1665)..(1665): n is a, c, g, or t
  misc_feature (1671)..(1673): n is a, c, g, or t
  misc_feature (1677)..(1678): n is a, c, g, or t
  misc_feature (1681)..(1682): n is a, c, g, or t
  misc_feature (1689)..(1689): n is a, c, g, or t
  misc_feature (1692)..(1692): n is a, c, g, or t
  misc_feature (1694)..(1695): n is a, c, g, or t
  misc_feature (1697)..(1699): n is a, c, g, or t
  misc_feature (1706)..(1706): n is a, c, g, or t
  misc_feature (1708)..(1708): n is a, c, g, or t
  misc_feature (1710)..(1710): n is a, c, g, or t
  misc_feature (1712)..(1712): n is a, c, g, or t
  misc_feature (1720)..(1720): n is a, c, g, or t
  misc_feature (1723)..(1723): n is a, c, g, or t
  misc_feature (1731)..(1731): n is a, c, g, or t
  misc_feature (1736)..(1737): n is a, c, g, or t
  misc_feature (1742)..(1743): n is a, c, g, or t
  misc_feature (1745)..(1745): n is a, c, g, or t
  misc_feature (1748)..(1748): n is a, c, g, or t
  misc_feature (1757)..(1757): n is a, c, g, or t
  misc_feature (1759)..(1759): n is a, c, g, or t
  misc_feature (1763)..(1763): n is a, c, g, or t
  misc_feature (1767)..(1767): n is a, c, g, or t
  misc_feature (1769)..(1769): n is a, c, g, or t
  misc_feature (1779)..(1779): n is a, c, g, or t
  misc_feature (1781)..(1781): n is a, c, g, or t
  misc_feature (1783)..(1783): n is a, c, g, or t
  misc_feature (1787)..(1788): n is a, c, g, or t
  misc_feature (1790)..(1790): n is a, c, g, or t
  misc_feature (1794)..(1794): n is a, c, g, or t
  misc_feature (1823)..(1823): n is a, c, g, or t
  misc_feature (1841)..(1841): n is a, c, g, or t
  misc_feature (1858)..(1858): n is a, c, g, or t
  misc_feature (1898)..(1898): n is a, c, g, or t
  misc_feature (1905)..(1905): n is a, c, g, or t
  misc_feature (1917)..(1917): n is a, c, g, or t
  misc_feature (1923)..(1923): n is a, c, g, or t
  misc_feature (1925)..(1925): n is a, c, g, or t
  misc_feature (1942)..(1943): n is a, c, g, or t
  misc_feature (1949)..(1951): n is a, c, g, or t
  misc_feature (1963)..(1963): n is a, c, g, or t
  misc_feature (1987)..(1987): n is a, c, g, or t
  misc_feature (1991)..(1991): n is a, c, g, or t
  misc_feature (1999)..(1999): n is a, c, g, or t
  misc_feature (2008)..(2008): n is a, c, g, or t
  misc_feature (2013)..(2013): n is a, c, g, or t
  misc_feature (2015)..(2015): n is a, c, g, or t

SEQ ID NO: 381766 - DNA, 620 bp, Homo Sapiens; identical to SEQ ID NO: 348365

SEQ ID NO: 381767 - DNA, 402 bp, Homo Sapiens; identical to SEQ ID NO: 348366

SEQ ID NO: 381768 - DNA, 1013 bp, Homo Sapiens; identical to SEQ ID NO: 348369
  misc_feature (614)..(622): n is a, c, g, or t
  misc_feature (651)..(663): n is a, c, g, or t

SEQ ID NO: 381769 - DNA, 479 bp, Homo Sapiens; identical to SEQ ID NO: 348370

SEQ ID NO: 381770 - DNA, 1597 bp, Homo Sapiens; identical to SEQ ID NO: 348373
  misc_feature (1482)..(1482): n is a, c, g, or t
  misc_feature (1500)..(1501): n is a, c, g, or t
  misc_feature (1518)..(1521): n is a, c, g, or t
  misc_feature (1545)..(1545): n is a, c, g, or t

SEQ ID NO: 381771 - DNA, 1772 bp, Homo Sapiens; identical to SEQ ID NO: 348374
  misc_feature (1035)..(1035): n is a, c, g, or t

SEQ ID NO: 381772 - DNA, 729 bp, Homo Sapiens; identical to SEQ ID NO: 348375

SEQ ID NO: 381773 - DNA, 1297 bp, Homo Sapiens; identical to SEQ ID NO: 348376
  misc_feature (144)..(188): n is a, c, g, or t
  misc_feature (334)..(466): n is a, c, g, or t
  misc_feature (1123)..(1226): n is a, c, g, or t
  misc_feature (1245)..(1257): n is a, c, g, or t

SEQ ID NO: 381774 - DNA, 562 bp, Homo Sapiens; identical to SEQ ID NO: 348382

SEQ ID NO: 381775 - DNA, 364 bp, Homo Sapiens; identical to SEQ ID NO: 348383
  misc_feature (89)..(89): n is a, c, g, or t

SEQ ID NO: 381776 - DNA, 1532 bp, Homo Sapiens; identical to SEQ ID NO: 348386

SEQ ID NO: 381777 - DNA, 1135 bp, Homo Sapiens; identical to SEQ ID NO: 348387

SEQ ID NO: 381778 - DNA, 764 bp, Homo Sapiens; identical to SEQ ID NO: 348390
  misc_feature (579)..(691): n is a, c, g, or t

SEQ ID NO: 381779 - DNA, 2609 bp, Homo Sapiens; identical to SEQ ID NO: 348391
  misc_feature (160)..(160): n is a, c, g, or t
  misc_feature (2130)..(2137): n is a, c, g, or t
  misc_feature (2139)..(2141): n is a, c, g, or t
  misc_feature (2143)..(2146): n is a, c, g, or t
  misc_feature (2149)..(2149): n is a, c, g, or t
  misc_feature (2151)..(2151): n is a, c, g, or t
  misc_feature (2156)..(2156): n is a, c, g, or t
  misc_feature (2159)..(2228): n is a, c, g, or t
  misc_feature (2232)..(2232): n is a, c, g, or t
  misc_feature (2311)..(2381): n is a, c, g, or t

SEQ ID NO: 381780 - DNA, 937 bp, Homo Sapiens; identical to SEQ ID NO: 348392

SEQ ID NO: 381781 - DNA, 1475 bp, Homo Sapiens; identical to SEQ ID NO: 348393

SEQ ID NO: 381782 - DNA, 1130 bp, Homo Sapiens; identical to SEQ ID NO: 348398
  misc_feature (968)..(993): n is a, c, g, or t
  misc_feature (1053)..(1053): n is a, c, g, or t

SEQ ID NO: 381783 - DNA, 390 bp, Homo Sapiens; identical to SEQ ID NO: 348399
  misc_feature (70)..(70): n is a, c, g, or t
  misc_feature (152)..(152): n is a, c, g, or t
  misc_feature (185)..(185): n is a, c, g, or t
  misc_feature (225)..(250): n is a, c, g, or t

SEQ ID NO: 381784 - DNA, 2319 bp, Homo Sapiens; identical to SEQ ID NO: 348400
  misc_feature (15)..(15): n is a, c, g, or t
  misc_feature (2220)..(2272): n is a, c, g, or t

SEQ ID NO: 381785 - DNA, 1172 bp, Homo Sapiens; identical to SEQ ID NO: 348401

SEQ ID NO: 381786 - DNA, 699 bp, Homo Sapiens; identical to SEQ ID NO: 348403
  misc_feature (679)..(679): n is a, c, g, or t

SEQ ID NO: 381787 - DNA, 757 bp, Homo Sapiens; identical to SEQ ID NO: 348404
  misc_feature (512)..(512): n is a, c, g, or t
  misc_feature (579)..(579): n is a, c, g, or t
  misc_feature (660)..(660): n is a, c, g, or t
  misc_feature (710)..(711): n is a, c, g, or t
  misc_feature (718)..(718): n is a, c, g, or t
  misc_feature (744)..(744): n is a, c, g, or t

SEQ ID NO: 381788 - DNA, 2289 bp, Homo Sapiens; identical to SEQ ID NO: 348405

SEQ ID NO: 381789 - DNA, 1107 bp, Homo Sapiens; identical to SEQ ID NO: 348406
  misc_feature (118)..(118): n is a, c, g, or t

SEQ ID NO: 381790 - DNA, 449 bp, Homo Sapiens; identical to SEQ ID NO: 348407
  misc_feature (419)..(419): n is a, c, g, or t

SEQ ID NO: 381791 - DNA, 339 bp, Homo Sapiens; identical to SEQ ID NO: 348408
  misc_feature (41)..(41): n is a, c, g, or t
  misc_feature (54)..(54): n is a, c, g, or t
  misc_feature (58)..(58): n is a, c, g, or t
  misc_feature (82)..(82): n is a, c, g, or t
  misc_feature (86)..(86): n is a, c, g, or t
  misc_feature (115)..(115): n is a, c, g, or t

SEQ ID NO: 381792 - DNA, 2624 bp, Homo Sapiens; identical to SEQ ID NO: 348409
  misc_feature (26)..(26): n is a, c, g, or t
  misc_feature (2619)..(2619): n is a, c, g, or t

SEQ ID NO: 381793 - DNA, 484 bp, Homo Sapiens; identical to SEQ ID NO: 348410

SEQ ID NO: 381794 - DNA, 1775 bp, Homo Sapiens; identical to SEQ ID NO: 348411
  misc_feature (27)..(27): n is a, c, g, or t
  misc_feature (54)..(54): n is a, c, g, or t
  misc_feature (56)..(56): n is a, c, g, or t
  misc_feature (88)..(88): n is a, c, g, or t
  misc_feature (104)..(104): n is a, c, g, or t
  misc_feature (116)..(116): n is a, c, g, or t
  misc_feature (127)..(127): n is a, c, g, or t

SEQ ID NO: 381795 - DNA, 1604 bp, Homo Sapiens; identical to SEQ ID NO: 348412
  misc_feature (66)..(86): n is a, c, g, or t

SEQ ID NO: 381796 - DNA, 1393 bp, Homo Sapiens; identical to SEQ ID NO: 348414
  misc_feature (12)..(12): n is a, c, g, or t
  misc_feature (52)..(52): n is a, c, g, or t
  misc_feature (1331)..(1331): n is a, c, g, or t

SEQ ID NO: 381797 - DNA, 841 bp, Homo Sapiens; identical to SEQ ID NO: 348415
  misc_feature (400)..(400): n is a, c, g, or t

SEQ ID NO: 381798 - DNA, 840 bp, Homo Sapiens; identical to SEQ ID NO: 348416

SEQ ID NO: 381799 - DNA, 1278 bp, Homo Sapiens; identical to SEQ ID NO: 348420
  misc_feature (134)..(142): n is a, c, g, or t

SEQ ID NO: 381800 - DNA, 763 bp, Homo Sapiens; identical to SEQ ID NO: 348421
  misc_feature (144)..(146): n is a, c, g, or t
  misc_feature (148)..(148): n is a, c, g, or t

SEQ ID NO: 381801 - DNA, 1959 bp, Homo Sapiens; identical to SEQ ID NO: 348422
  misc_feature (319)..(632): n is a, c, g, or t
  misc_feature (1871)..(1907): n is a, c, g, or t

SEQ ID NO: 381802 - DNA, 585 bp, Homo Sapiens; identical to SEQ ID NO: 348423
  misc_feature (561)..(561): n is a, c, g, or t

SEQ ID NO: 381803 - DNA, 1232 bp, Homo Sapiens; identical to SEQ ID NO: 348424

SEQ ID NO: 381804 - DNA, 455 bp, Homo Sapiens; identical to SEQ ID NO: 348425

SEQ ID NO: 381805 - DNA, 696 bp, Homo Sapiens; identical to SEQ ID NO: 348426
  misc_feature (301)..(352): n is a, c, g, or t

SEQ ID NO: 381806 - DNA, 1816 bp, Homo Sapiens; identical to SEQ ID NO: 348427
  misc_feature (1575)..(1579): n is a, c, g, or t
  misc_feature (1581)..(1586): n is a, c, g, or t
  misc_feature (1588)..(1588): n is a, c, g, or t
  misc_feature (1591)..(1592): n is a, c, g, or t
  misc_feature (1594)..(1647): n is a, c, g, or t
  misc_feature (1683)..(1683): n is a, c, g, or t

SEQ ID NO: 381807 - DNA, 1113 bp, Homo Sapiens; identical to SEQ ID NO: 348428

SEQ ID NO: 381808 - DNA, 1554 bp, Homo Sapiens; identical to SEQ ID NO: 348429
  misc_feature (1299)..(1299): n is a, c, g, or t

SEQ ID NO: 381809 - DNA, 1685 bp, Homo Sapiens; identical to SEQ ID NO: 348430
  misc_feature (1045)..(1045): n is a, c, g, or t
  misc_feature (1173)..(1174): n is a, c, g, or t
  misc_feature (1178)..(1179): n is a, c, g, or t

SEQ ID NO: 381810 - DNA, 1349 bp, Homo Sapiens; identical to SEQ ID NO: 348431

SEQ ID NO: 381811 - DNA, 952 bp, Homo Sapiens; identical to SEQ ID NO: 348432

SEQ ID NO: 381812 - DNA, 2660 bp, Homo Sapiens; identical to SEQ ID NO: 348433
  misc_feature (47)..(81): n is a, c, g, or t
  misc_feature (1782)..(1782): n is a, c, g, or t
  misc_feature (1784)..(1795): n is a, c, g, or t
  misc_feature (1889)..(1945): n is a, c, g, or t
  misc_feature (2559)..(2559): n is a, c, g, or t
  misc_feature (2600)..(2600): n is a, c, g, or t
  misc_feature (2634)..(2634): n is a, c, g, or t

SEQ ID NO: 381813 - DNA, 1112 bp, Homo Sapiens; identical to SEQ ID NO: 348434
  misc_feature (924)..(924): n is a, c, g, or t
  misc_feature (1007)..(1007): n is a, c, g, or t
  misc_feature (1026)..(1026): n is a, c, g, or t
  misc_feature (1035)..(1036): n is a, c, g, or t
  misc_feature (1042)..(1042): n is a, c, g, or t
  misc_feature (1055)..(1055): n is a, c, g, or t
  misc_feature (1059)..(1059): n is a, c, g, or t
  misc_feature (1064)..(1064): n is a, c, g, or t
  misc_feature (1072)..(1072): n is a, c, g, or t
  misc_feature (1074)..(1074): n is a, c, g, or t
  misc_feature (1079)..(1079): n is a, c, g, or t
  misc_feature (1082)..(1082): n is a, c, g, or t
  misc_feature (1106)..(1106): n is a, c, g, or t

SEQ ID NO: 381814 - DNA, 1624 bp, Homo Sapiens; identical to SEQ ID NO: 348435
  misc_feature (1078)..(1078): n is a, c, g, or t
  misc_feature (1088)..(1088): n is a, c, g, or t
  misc_feature (1092)..(1092): n is a, c, g, or t

SEQ ID NO: 381815 - DNA, 1504 bp, Homo Sapiens; identical to SEQ ID NO: 348444

SEQ ID NO: 381816 - DNA, 938 bp, Homo Sapiens; identical to SEQ ID NO: 348445

SEQ ID NO: 381817 - DNA, 1697 bp, Homo Sapiens; identical to SEQ ID NO: 348446
  misc_feature (129)..(177): n is a, c, g, or t

SEQ ID NO: 381818 - DNA, 914 bp, Homo Sapiens; identical to SEQ ID NO: 348447
  misc_feature (286)..(286): n is a, c, g, or t
  misc_feature (377)..(377): n is a, c, g, or t

SEQ ID NO: 381819 - DNA, 1983 bp, Homo Sapiens; identical to SEQ ID NO: 348448
  misc_feature (36)..(36): n is a, c, g, or t
  misc_feature (55)..(55): n is a, c, g, or t
  misc_feature (188)..(257): n is a, c, g, or t
  misc_feature (709)..(720): n is a, c, g, or t

SEQ ID NO: 381820 - DNA, 538 bp, Homo Sapiens; identical to SEQ ID NO: 348449
  misc_feature (130)..(143): n is a, c, g, or t
  misc_feature (362)..(372): n is a, c, g, or t
  misc_feature (489)..(489): n is a, c, g, or t

SEQ ID NO: 381821 - DNA, 3487 bp, Homo Sapiens; identical to SEQ ID NO: 348450
  misc_feature (83)..(83): n is a, c, g, or t
  misc_feature (88)..(88): n is a, c, g, or t
  misc_feature (147)..(147): n is a, c, g, or t
  misc_feature (166)..(166): n is a, c, g, or t

SEQ ID NO: 381822 - DNA, 1252 bp, Homo Sapiens; identical to SEQ ID NO: 348451
  misc_feature (795)..(804): n is a, c, g, or t

SEQ ID NO: 381823 - DNA, 558 bp, Homo Sapiens; identical to SEQ ID NO: 348452

SEQ ID NO: 381824 - DNA, 1268 bp, Homo Sapiens; identical to SEQ ID NO: 348453

SEQ ID NO: 381825 - DNA, 588 bp, Homo Sapiens; identical to SEQ ID NO: 264736

SEQ ID NO: 381826 - DNA, 592 bp, Homo Sapiens; identical to SEQ ID NO: 264737

SEQ ID NO: 381827 - DNA, 384 bp, Homo Sapiens; identical to SEQ ID NO: 264738

SEQ ID NO: 381828 - DNA, 897 bp, Homo Sapiens; identical to SEQ ID NO: 348457

SEQ ID NO: 381829 - DNA, 1135 bp, Homo Sapiens; identical to SEQ ID NO: 348458

SEQ ID NO: 381830 - DNA, 658 bp, Homo Sapiens; identical to SEQ ID NO: 348459

SEQ ID NO: 381831 - DNA, 538 bp, Homo Sapiens; identical to SEQ ID NO: 348460

SEQ ID NO: 381832 - DNA, 440 bp, Homo Sapiens; identical to SEQ ID NO: 348461
  misc_feature (14)..(14): n is a, c, g, or t

SEQ ID NO: 381833 - DNA, 476 bp, Homo Sapiens; identical to SEQ ID NO: 348462
  misc_feature (344)..(344): n is a, c, g, or t
  misc_feature (347)..(347): n is a, c, g, or t
  misc_feature (408)..(408): n is a, c, g, or t
  misc_feature (413)..(413): n is a, c, g, or t
  misc_feature (437)..(437): n is a, c, g, or t
  misc_feature (458)..(458): n is a, c, g, or t

SEQ ID NO: 381834 - DNA, 651 bp, Homo Sapiens; identical to SEQ ID NO: 348463

SEQ ID NO: 381835 - DNA, 2020 bp, Homo Sapiens; identical to SEQ ID NO: 348471

SEQ ID NO: 381836 - DNA, 1064 bp, Homo Sapiens; identical to SEQ ID NO: 348472

SEQ ID NO: 381837 - DNA, 1001 bp, Homo Sapiens; identical to SEQ ID NO: 348474
  misc_feature (39)..(39): n is a, c, g, or t
  misc_feature (94)..(151): n is a, c, g, or t
  misc_feature (631)..(631): n is a, c, g, or t

SEQ ID NO: 381838 - DNA, 327 bp, Homo Sapiens; identical to SEQ ID NO: 348475

SEQ ID NO: 381839 - DNA, 1786 bp, Homo Sapiens; identical to SEQ ID NO: 348476
  misc_feature (9)..(9): n is a, c, g, or t
  misc_feature (16)..(17): n is a, c, g, or t
  misc_feature (21)..(21): n is a, c, g, or t
  misc_feature (32)..(32): n is a, c, g, or t
  misc_feature (37)..(37): n is a, c, g, or t
  misc_feature (41)..(41): n is a, c, g, or t
  misc_feature (995)..(995): n is a, c, g, or t
  misc_feature (1113)..(1122): n is a, c, g, or t
  misc_feature (1126)..(1165): n is a, c, g, or t
  misc_feature (1170)..(1170): n is a, c, g, or t
  misc_feature (1180)..(1181): n is a, c, g, or t
  misc_feature (1186)..(1186): n is a, c, g, or t

SEQ ID NO: 381840 - DNA, 1987 bp, Homo Sapiens; identical to SEQ ID NO: 348477
  misc_feature (8)..(8): n is a, c, g, or t
  misc_feature (92)..(107): n is a, c, g, or t
  misc_feature (130)..(130): n is a, c, g, or t
  misc_feature (151)..(151): n is a, c, g, or t
  misc_feature (153)..(153): n is a, c, g, or t
  misc_feature (171)..(171): n is a, c, g, or t
  misc_feature (173)..(173): n is a, c, g, or t
  misc_feature (175)..(175): n is a, c, g, or t
  misc_feature (230)..(230): n is a, c, g, or t
  misc_feature (251)..(251): n is a, c, g, or t
  misc_feature (254)..(254): n is a, c, g, or t
  misc_feature (256)..(256): n is a, c, g, or t
  misc_feature (303)..(303): n is a, c, g, or t
  misc_feature (312)..(312): n is a, c, g, or t
  misc_feature (316)..(316): n is a, c, g, or t
  misc_feature (324)..(324): n is a, c, g, or t
  misc_feature (327)..(327): n is a, c, g, or t
  misc_feature (333)..(333): n is a, c, g, or t
  misc_feature (354)..(354): n is a, c, g, or t
  misc_feature (357)..(357): n is a, c, g, or t
  misc_feature (364)..(364): n is a, c, g, or t
  misc_feature (388)..(388): n is a, c, g, or t
  misc_feature (406)..(406): n is a, c, g, or t
  misc_feature (420)..(420): n is a, c, g, or t
  misc_feature (427)..(427): n is a, c, g, or t
  misc_feature (434)..(435): n is a, c, g, or t
  misc_feature (447)..(447): n is a, c, g, or t
  misc_feature (453)..(453): n is a, c, g, or t
  misc_feature (457)..(459): n is a, c, g, or t
  misc_feature (461)..(461): n is a, c, g, or t
  misc_feature (519)..(519): n is a, c, g, or t
  misc_feature (1082)..(1095): n is a, c, g, or t

SEQ ID NO: 381841 - DNA, 1996 bp, Homo Sapiens; identical to SEQ ID NO: 348478
  misc_feature (1805)..(1805): n is a, c, g, or t
  misc_feature (1858)..(1858): n is a, c, g, or t

SEQ ID NO: 381842 - DNA, 691 bp, Homo Sapiens; identical to SEQ ID NO: 348479

SEQ ID NO: 381843 - DNA, 778 bp, Homo Sapiens; identical to SEQ ID NO: 348480
  misc_feature (650)..(666): n is a, c, g, or t

SEQ ID NO: 381844 - DNA, 920 bp, Homo Sapiens; identical to SEQ ID NO: 348481

SEQ ID NO: 381845 - DNA, 442 bp, Homo Sapiens; identical to SEQ ID NO: 348484

SEQ ID NO: 381846 - DNA, 1415 bp, Homo Sapiens; identical to SEQ ID NO: 348485

SEQ ID NO: 381847 - DNA, 554 bp, Homo Sapiens; identical to SEQ ID NO: 348486
  misc_feature (67)..(67): n is a, c, g, or t
  misc_feature (70)..(70): n is a, c, g, or t
  misc_feature (72)..(72): n is a, c, g, or t
  misc_feature (142)..(142): n is a, c, g, or t
  misc_feature (500)..(500): n is a, c, g, or t
  misc_feature (508)..(508): n is a, c, g, or t
  misc_feature (523)..(523): n is a, c, g, or t
  misc_feature (541)..(541): n is a, c, g, or t

SEQ ID NO: 381848 - DNA, 896 bp, Homo Sapiens; identical to SEQ ID NO: 348487

SEQ ID NO: 381849 - DNA, 801 bp, Homo Sapiens; identical to SEQ ID NO: 348488

SEQ ID NO: 381850 - DNA, 1146 bp, Homo Sapiens; identical to SEQ ID NO: 348489
  misc_feature (1003)..(1003): n is a, c, g, or t
  misc_feature (1045)..(1045): n is a, c, g, or t
  misc_feature (1113)..(1113): n is a, c, g, or t

SEQ ID NO: 381851 - DNA, 3152 bp, Homo Sapiens; identical to SEQ ID NO: 348490
  misc_feature (148)..(148): n is a, c, g, or t
  misc_feature (152)..(152): n is a, c, g, or t
  misc_feature (256)..(327): n is a, c, g, or t
  misc_feature (3062)..(3099): n is a, c, g, or t

SEQ ID NO: 381852 - DNA, 397 bp, Homo Sapiens; identical to SEQ ID NO: 348491
  misc_feature (76)..(106): n is a, c, g, or t

SEQ ID NO: 381853 - DNA, 1187 bp, Homo Sapiens; identical to SEQ ID NO: 348492

SEQ ID NO: 381854 - DNA, 1239 bp, Homo Sapiens; identical to SEQ ID NO: 348493

SEQ ID NO: 381855 - DNA, 763 bp, Homo Sapiens; identical to SEQ ID NO: 348495

SEQ ID NO: 381856 - DNA, 1202 bp, Homo Sapiens; identical to SEQ ID NO: 348496
  misc_feature (592)..(594): n is a, c, g, or t
  misc_feature (596)..(596): n is a, c, g, or t
  misc_feature (630)..(641): n is a, c, g, or t
  misc_feature (817)..(825): n is a, c, g, or t
  misc_feature (1054)..(1054): n is a, c, g, or t

SEQ ID NO: 381857 - DNA, 1989 bp, Homo Sapiens; identical to SEQ ID NO: 348497

SEQ ID NO: 381858 - DNA, 849 bp, Homo Sapiens; identical to SEQ ID NO: 348498

SEQ ID NO: 381859 - DNA, 436 bp, Homo Sapiens; identical to SEQ ID NO: 348499
  misc_feature (17)..(17): n is a, c, g, or t

SEQ ID NO: 381860 - DNA, 2363 bp, Homo Sapiens; identical to SEQ ID NO: 348500
  misc_feature (96)..(109): n is a, c, g, or t
  misc_feature (207)..(207): n is a, c, g, or t

SEQ ID NO: 381861 - DNA, 1697 bp, Homo Sapiens; identical to SEQ ID NO: 348501
  misc_feature (1142)..(1142): n is a, c, g, or t
  misc_feature (1288)..(1288): n is a, c, g, or t
  misc_feature (1402)..(1402): n is a, c, g, or t

SEQ ID NO: 381862 - DNA, 1940 bp, Homo Sapiens; identical to SEQ ID NO: 348502
  misc_feature (1325)..(1355): n is a, c, g, or t

SEQ ID NO: 381863 - DNA, 1185 bp, Homo Sapiens; identical to SEQ ID NO: 348503

SEQ ID NO: 381864 - DNA, 805 bp, Homo Sapiens; identical to SEQ ID NO: 348504

SEQ ID NO: 381865 - DNA, 852 bp, Homo Sapiens; identical to SEQ ID NO: 348505

SEQ ID NO: 381866 - DNA, 1203 bp, Homo Sapiens; identical to SEQ ID NO: 348506
  misc_feature (362)..(371): n is a, c, g, or t

SEQ ID NO: 381867 - DNA, 947 bp, Homo Sapiens; identical to SEQ ID NO: 348507

SEQ ID NO: 381868 - DNA, 425 bp, Homo Sapiens; identical to SEQ ID NO: 348508
  misc_feature (161)..(291): n is a, c, g, or t

SEQ ID NO: 381869 - DNA, 2027 bp, Homo Sapiens; identical to SEQ ID NO: 348509
  misc_feature (1605)..(1619): n is a, c, g, or t
  misc_feature (1767)..(1777): n is a, c, g, or t
  misc_feature (1791)..(1843): n is a, c, g, or t
  misc_feature (1898)..(1898): n is a, c, g, or t
  misc_feature (1982)..(1982): n is a, c, g, or t
  misc_feature (2009)..(2009): n is a, c, g, or t

SEQ ID NO: 381870 - DNA, 855 bp, Homo Sapiens; identical to SEQ ID NO: 348512
  misc_feature (784)..(784): n is a, c, g, or t
  misc_feature (842)..(842): n is a, c, g, or t
  misc_feature (845)..(845): n is a, c, g, or t
  misc_feature (851)..(851): n is a, c, g, or t

SEQ ID NO: 381871 - DNA, 955 bp, Homo Sapiens; identical to SEQ ID NO: 348513
  misc_feature (473)..(473): n is a, c, g, or t
  misc_feature (877)..(913): n is a, c, g, or t

SEQ ID NO: 381872 - DNA, 1728 bp, Homo Sapiens; identical to SEQ ID NO: 348516
  misc_feature (1080)..(1080): n is a, c, g, or t
  misc_feature (1212)..(1212): n is a, c, g, or t

SEQ ID NO: 381873 - DNA, 910 bp, Homo Sapiens; identical to SEQ ID NO: 348517
  misc_feature (723)..(723): n is a, c, g, or t
  misc_feature (785)..(786): n is a, c, g, or t

SEQ ID NO: 381874 - DNA, 939 bp, Homo Sapiens; identical to SEQ ID NO: 348521
  misc_feature (425)..(425): n is a, c, g, or t

SEQ ID NO: 381875 - DNA, 2592 bp, Homo Sapiens; identical to SEQ ID NO: 348522
  misc_feature (64)..(75): n is a, c, g, or t
  misc_feature (132)..(140): n is a, c, g, or t
  misc_feature (161)..(208): n is a, c, g, or t
  misc_feature (224)..(235): n is a, c, g, or t
  misc_feature (275)..(286): n is a, c, g, or t
  misc_feature (288)..(288): n is a, c, g, or t
  misc_feature (291)..(292): n is a, c, g, or t
  misc_feature (295)..(392): n is a, c, g, or t

SEQ ID NO: 381876 - DNA, 889 bp, Homo Sapiens; identical to SEQ ID NO: 348523
  misc_feature (21)..(21): n is a, c, g, or t
  misc_feature (45)..(45): n is a, c, g, or t
  misc_feature (47)..(47): n is a, c, g, or t
  misc_feature (781)..(781): n is a, c, g, or t

SEQ ID NO: 381877 - DNA, 439 bp, Homo Sapiens; identical to SEQ ID NO: 348524

SEQ ID NO: 381878 - DNA, 1707 bp, Homo Sapiens; identical to SEQ ID NO: 348526

SEQ ID NO: 381879 - DNA, 1090 bp, Homo Sapiens; identical to SEQ ID NO: 348527
  misc_feature (4)..(4): n is a, c, g, or t

SEQ ID NO: 381880 - DNA, 1984 bp, Homo Sapiens; identical to SEQ ID NO: 348535
  misc_feature (739)..(739): n is a, c, g, or t

SEQ ID NO: 381881 - DNA, 717 bp, Homo Sapiens; identical to SEQ ID NO: 348536

SEQ ID NO: 381882 - DNA, 1296 bp, Homo Sapiens; identical to SEQ ID NO: 348537

SEQ ID NO: 381883 - DNA, 498 bp, Homo Sapiens; identical to SEQ ID NO: 348538
  misc_feature (386)..(386): n is a, c, g, or t
  misc_feature (417)..(417): n is a, c, g, or t
  misc_feature (443)..(443): n is a, c, g, or t
  misc_feature (471)..(471): n is a, c, g, or t

SEQ ID NO: 381884 - DNA, 600 bp, Homo Sapiens; identical to SEQ ID NO: 348539

SEQ ID NO: 381885 - DNA, 1210 bp, Homo Sapiens; identical to SEQ ID NO: 348543
  misc_feature (128)..(128): n is a, c, g, or t
  misc_feature (307)..(307): n is a, c, g, or t

SEQ ID NO: 381886 - DNA, 1952 bp, Homo Sapiens; identical to SEQ ID NO: 348544

SEQ ID NO: 381887 - DNA, 623 bp, Homo Sapiens; identical to SEQ ID NO: 348550
  misc_feature (52)..(63): n is a, c, g, or t
  misc_feature (409)..(418): n is a, c, g, or t

SEQ ID NO: 381888 - DNA, 1148 bp, Homo Sapiens; identical to SEQ ID NO: 348551
  misc_feature (294)..(314): n is a, c, g, or t
  misc_feature (508)..(564): n is a, c, g, or t
  misc_feature (793)..(802): n is a, c, g, or t

SEQ ID NO: 381889 - DNA, 1144 bp, Homo Sapiens; identical to SEQ ID NO: 348554
  misc_feature (1067)..(1102): n is a, c, g, or t

SEQ ID NO: 381890 - DNA, 1442 bp, Homo Sapiens; identical to SEQ ID NO: 348555
  misc_feature (1205)..(1205): n is a, c, g, or t
  misc_feature (1329)..(1330): n is a, c, g, or t
  misc_feature (1409)..(1409): n is a, c, g, or t

SEQ ID NO: 381891 - DNA, 889 bp, Homo Sapiens; identical to SEQ ID NO: 348556

SEQ ID NO: 381892 - DNA, 1097 bp, Homo Sapiens; identical to SEQ ID NO: 348558
  misc_feature (126)..(126): n is a, c, g, or t

SEQ ID NO: 381893 - DNA, 812 bp, Homo Sapiens; identical to SEQ ID NO: 348559

SEQ ID NO: 381894 - DNA, 2921 bp, Homo Sapiens; identical to SEQ ID NO: 348560
  misc_feature (1030)..(1030): n is a, c, g, or t

SEQ ID NO: 381895 - DNA, 828 bp, Homo Sapiens; identical to SEQ ID NO: 348562
  misc_feature (32)..(32): n is a, c, g, or t
  misc_feature (231)..(284): n is a, c, g, or t

SEQ ID NO: 381896 - DNA, 925 bp, Homo Sapiens; identical to SEQ ID NO: 348563
  misc_feature (85)..(93): n is a, c, g, or t
  misc_feature (95)..(95): n is a, c, g, or t
  misc_feature (98)..(98): n is a, c, g, or t
  misc_feature (100)..(101): n is a, c, g, or t
  misc_feature (103)..(112): n is a, c, g, or t
  misc_feature (479)..(495): n is a, c, g, or t

SEQ ID NO: 381897 - DNA, 1634 bp, Homo Sapiens; identical to SEQ ID NO: 348564
  misc_feature (194)..(194): n is a, c, g, or t
  misc_feature (198)..(199): n is a, c, g, or t
  misc_feature (1070)..(1086): n is a, c, g, or t

SEQ ID NO: 381898 - DNA, 575 bp, Homo Sapiens; identical to SEQ ID NO: 348565

SEQ ID NO: 381899 - DNA, 1735 bp, Homo Sapiens; identical to SEQ ID NO: 348566
  misc_feature (1697)..(1697): n is a, c, g, or t
  misc_feature (1717)..(1717): n is a, c, g, or t

SEQ ID NO: 381900 - DNA, 832 bp, Homo Sapiens; identical to SEQ ID NO: 348577

SEQ ID NO: 381901 - DNA, 1637 bp, Homo Sapiens; identical to SEQ ID NO: 348578
  misc_feature (1132)..(1132): n is a, c, g, or t
  misc_feature (1511)..(1511): n is a, c, g, or t
  misc_feature (1577)..(1577): n is a, c, g, or t

SEQ ID NO: 381902 - DNA, 1196 bp, Homo Sapiens; identical to SEQ ID NO: 348587
  misc_feature (775)..(823): n is a, c, g, or t

SEQ ID NO: 381903 - DNA, 670 bp, Homo Sapiens; identical to SEQ ID NO: 348588

SEQ ID NO: 381904 - DNA, 678 bp, Homo Sapiens; identical to SEQ ID NO: 348589
  misc_feature (21)..(21): n is a, c, g, or t
  misc_feature (531)..(579): n is a, c, g, or t

SEQ ID NO: 381905 - DNA, 536 bp, Homo Sapiens; identical to SEQ ID NO: 348590
  misc_feature (54)..(321): n is a, c, g, or t

SEQ ID NO: 381906 - DNA, 390 bp, Homo Sapiens; identical to SEQ ID NO: 348591
  misc_feature (38)..(38): n is a, c, g, or t
  misc_feature (85)..(85): n is a, c, g, or t

SEQ ID NO: 381907 - DNA, 423 bp, Homo Sapiens; identical to SEQ ID NO: 348592
  misc_feature (63)..(63): n is a, c, g, or t

SEQ ID NO: 381908 - DNA, 2001 bp, Homo Sapiens; identical to SEQ ID NO: 348593
  misc_feature (85)..(94): n is a, c, g, or t
  misc_feature (1585)..(1598): n is a, c, g, or t

SEQ ID NO: 381909 - DNA, 1148 bp, Homo Sapiens; identical to SEQ ID NO: 348595

SEQ ID NO: 381910 - DNA, 435 bp, Homo Sapiens; identical to SEQ ID NO: 348596

SEQ ID NO: 381911 - DNA, 1728 bp, Homo Sapiens; identical to SEQ ID NO: 348597
  misc_feature (1012)..(1021): n is a, c, g, or t

SEQ ID NO: 381912 - DNA, 473 bp, Homo Sapiens; identical to SEQ ID NO: 348598
  misc_feature (13)..(13): n is a, c, g, or t
  misc_feature (22)..(22): n is a, c, g, or t

SEQ ID NO: 381913 - DNA, 1341 bp, Homo Sapiens; identical to SEQ ID NO: 348599
  misc_feature (852)..(852): n is a, c, g, or t

SEQ ID NO: 381914 - DNA, 1073 bp, Homo Sapiens; identical to SEQ ID NO: 348600
  misc_feature (957)..(957): n is a, c, g, or t

SEQ ID NO: 381915 - DNA, 702 bp, Homo Sapiens; identical to SEQ ID NO: 348601

SEQ ID NO: 381916 - DNA, 1612 bp, Homo Sapiens; identical to SEQ ID NO: 348602
  misc_feature (1416)..(1416): n is a, c, g, or t
  misc_feature (1528)..(1528): n is a, c, g, or t
  misc_feature (1542)..(1542): n is a, c, g, or t
  misc_feature (1562)..(1562): n is a, c, g, or t

SEQ ID NO: 381917 - DNA, 915 bp, Homo Sapiens; identical to SEQ ID NO: 348604
  misc_feature (810)..(810): n is a, c, g, or t
  misc_feature (847)..(847): n is a, c, g, or t
  misc_feature (884)..(884): n is a, c, g, or t

SEQ ID NO: 381918 - DNA, 1506 bp, Homo Sapiens; identical to SEQ ID NO: 348605

SEQ ID NO: 381919 - DNA, 1237 bp, Homo Sapiens; identical to SEQ ID NO: 348607
  misc_feature (63)..(78): n is a, c, g, or t
  misc_feature (224)..(256): n is a, c, g, or t
  misc_feature (932)..(932): n is a, c, g, or t

SEQ ID NO: 381920 - DNA, 1596 bp, Homo Sapiens; identical to SEQ ID NO: 348608

SEQ ID NO: 381921 - DNA, 1536 bp, Homo Sapiens; identical to SEQ ID NO: 348615

SEQ ID NO: 381922 - DNA, 2713 bp, Homo Sapiens; identical to SEQ ID NO: 348616
  misc_feature (31)..(31): n is a, c, g, or t
  misc_feature (162)..(172): n is a, c, g, or t

SEQ ID NO: 381923 - DNA, 1168 bp, Homo Sapiens; identical to SEQ ID NO: 348617

SEQ ID NO: 381924 - DNA, 1419 bp, Homo Sapiens; identical to SEQ ID NO: 348623

SEQ ID NO: 381925 - DNA, 746 bp, Homo Sapiens; identical to SEQ ID NO: 348624
  misc_feature (194)..(194): n is a, c, g, or t

SEQ ID NO: 381926 - DNA, 629 bp, Homo Sapiens; identical to SEQ ID NO: 348628

SEQ ID NO: 381927 - DNA, 756 bp, Homo Sapiens; identical to SEQ ID NO: 348629
  misc_feature (81)..(81): n is a, c, g, or t
  misc_feature (85)..(86): n is a, c, g, or t
  misc_feature (88)..(89): n is a, c, g, or t
  misc_feature (109)..(110): n is a, c, g, or t
  misc_feature (113)..(113): n is a, c, g, or t

SEQ ID NO: 381928 - DNA, 760 bp, Homo Sapiens; identical to SEQ ID NO: 10654

SEQ ID NO: 381929 - DNA, 1111 bp, Homo Sapiens; identical to SEQ ID NO: 348633
  misc_feature (28)..(28): n is a, c, g, or t
  misc_feature (767)..(789): n is a, c, g, or t

SEQ ID NO: 381930 - DNA, 677 bp, Homo Sapiens; identical to SEQ ID NO: 348634
  misc_feature (219)..(294): n is a, c, g, or t
  misc_feature (517)..(543): n is a, c, g, or t

SEQ ID NO: 381931 - DNA, 1039 bp, Homo Sapiens; identical to SEQ ID NO: 348635

SEQ ID NO: 381932 - DNA, 399 bp, Homo Sapiens; identical to SEQ ID NO: 348636
  misc_feature (17)..(17): n is a, c, g, or t
  misc_feature (61)..(61): n is a, c, g, or t

SEQ ID NO: 381933 - DNA, 917 bp, Homo Sapiens; identical to SEQ ID NO: 348639
  misc_feature (51)..(89): n is a, c, g, or t
  misc_feature (150)..(215): n is a, c, g, or t
  misc_feature (570)..(665): n is a, c, g, or t

SEQ ID NO: 381934 - DNA, 554 bp, Homo Sapiens; identical to SEQ ID NO: 348640
  misc_feature (410)..(477): n is a, c, g, or t

SEQ ID NO: 381935 - DNA, 589 bp, Homo Sapiens; identical to SEQ ID NO: 348642

SEQ ID NO: 381936 - DNA, 1480 bp, Homo Sapiens; identical to SEQ ID NO: 348643
  misc_feature (54)..(90): n is a, c, g, or t

SEQ ID NO: 381937 - DNA, 460 bp, Homo Sapiens; identical to SEQ ID NO: 348644
  misc_feature (45)..(45): n is a, c, g, or t
  misc_feature (53)..(53): n is a, c, g, or t
  misc_feature (94)..(94): n is a, c, g, or t

SEQ ID NO: 381938 - DNA, 3004 bp, Homo Sapiens; identical to SEQ ID NO: 348645

SEQ ID NO: 381939 - DNA, 954 bp, Homo Sapiens; identical to SEQ ID NO: 348646
  misc_feature (46)..(46): n is a, c, g, or t
  misc_feature (783)..(783): n is a, c, g, or t
  misc_feature (811)..(837): n is a, c, g, or t

SEQ ID NO: 381940 - DNA, 550 bp, Homo Sapiens; identical to SEQ ID NO: 348647
  misc_feature (505)..(505): n is a, c, g, or t

SEQ ID NO: 381941 - DNA, 398 bp, Homo Sapiens; identical to SEQ ID NO: 348648

SEQ ID NO: 381942 - DNA, 742 bp, Homo Sapiens; identical to SEQ ID NO: 348655

SEQ ID NO: 381943 - DNA, 1409 bp, Homo Sapiens; identical to SEQ ID NO: 348656

SEQ ID NO: 381944 - DNA, 567 bp, Homo Sapiens; identical to SEQ ID NO: 348660
  misc_feature (311)..(371): n is a, c, g, or t

SEQ ID NO: 381945 - DNA, 2591 bp, Homo Sapiens; identical to SEQ ID NO: 348661
  misc_feature (2225)..(2367): n is a, c, g, or t
  misc_feature (2384)..(2419): n is a, c, g, or t
  misc_feature (2431)..(2443): n is a, c, g, or t

SEQ ID NO: 381946 - DNA, 511 bp, Homo Sapiens; identical to SEQ ID NO: 348662
  misc_feature (301)..(301): n is a, c, g, or t
  misc_feature (406)..(406): n is a, c, g, or t
  misc_feature (481)..(481): n is a, c, g, or t

SEQ ID NO: 381947 - DNA, 371 bp, Homo Sapiens; identical to SEQ ID NO: 348663
  misc_feature (59)..(59): n is a, c, g, or t

SEQ ID NO: 381948 - DNA, 494 bp, Homo Sapiens; identical to SEQ ID NO: 348664
  misc_feature (24)..(24): n is a, c, g, or t
  misc_feature (41)..(41): n is a, c, g, or t
  misc_feature (106)..(106): n is a, c, g, or t

SEQ ID NO: 381949 - DNA, 842 bp, Homo Sapiens; identical to SEQ ID NO: 348667

SEQ ID NO: 381950 - DNA, 819 bp, Homo Sapiens; identical to SEQ ID NO: 75234

SEQ ID NO: 381951 - DNA, 854 bp, Homo Sapiens; identical to SEQ ID NO: 348669
  misc_feature (755)..(771): n is a, c, g, or t

SEQ ID NO: 381952 - DNA, 917 bp, Homo Sapiens; identical to SEQ ID NO: 348676

SEQ ID NO: 381953 - DNA, 2515 bp, Homo Sapiens; identical to SEQ ID NO: 348677
  misc_feature (1943)..(1943): n is a, c, g, or t
  misc_feature (1945)..(1945): n is a, c, g, or t
  misc_feature (1947)..(1948): n is a, c, g, or t
  misc_feature (1955)..(1970): n is a, c, g, or t
  misc_feature (2147)..(2147): n is a, c, g, or t

SEQ ID NO: 381954 - DNA, 1021 bp, Homo Sapiens; identical to SEQ ID NO: 348678
  misc_feature (48)..(84): n is a, c, g, or t

SEQ ID NO: 381955 - DNA, 3110 bp, Homo Sapiens; identical to SEQ ID NO: 348680
  misc_feature (2688)..(2688): n is a, c, g, or t

SEQ ID NO: 381956 - DNA, 840 bp, Homo Sapiens; identical to SEQ ID NO: 348681

SEQ ID NO: 381957 - DNA, 1579 bp, Homo Sapiens; identical to SEQ ID NO: 348682

SEQ ID NO: 381958 - DNA, 1060 bp, Homo Sapiens; identical to SEQ ID NO: 348683

SEQ ID NO: 381959 - DNA, 558 bp, Homo Sapiens; identical to SEQ ID NO: 348684
  misc_feature (29)..(29): n is a, c, g, or t
  misc_feature (69)..(69): n is a, c, g, or t

SEQ ID NO: 381960 - DNA, 815 bp, Homo Sapiens; identical to SEQ ID NO: 348687

SEQ ID NO: 381961 - DNA, 843 bp, Homo Sapiens; identical to SEQ ID NO: 348688
  misc_feature (356)..(404): n is a, c, g, or t

SEQ ID NO: 381962 - DNA, 1205 bp, Homo Sapiens; identical to SEQ ID NO: 348689
  misc_feature (924)..(949): n is a, c, g, or t

SEQ ID NO: 381963 - DNA, 907 bp, Homo Sapiens; identical to SEQ ID NO: 348693
  misc_feature (53)..(53): n is a, c, g, or t
  misc_feature (100)..(100): n is a, c, g, or t
  misc_feature (122)..(122): n is a, c, g, or t
  misc_feature (798)..(858): n is a, c, g, or t

SEQ ID NO: 381964 - DNA, 1149 bp, Homo Sapiens; identical to SEQ ID NO: 348694

SEQ ID NO: 381965 - DNA, 1363 bp, Homo Sapiens; identical to SEQ ID NO: 348702

SEQ ID NO: 381966 - DNA, 912 bp, Homo Sapiens; identical to SEQ ID NO: 348703
  misc_feature (176)..(176): n is a, c, g, or t

SEQ ID NO: 381967 - DNA, 2079 bp, Homo Sapiens; identical to SEQ ID NO: 348704

SEQ ID NO: 381968 - DNA, 885 bp, Homo Sapiens; identical to SEQ ID NO: 348705

SEQ ID NO: 381969 - DNA, 1109 bp, Homo Sapiens; identical to SEQ ID NO: 348706

SEQ ID NO: 381970 - DNA, 476 bp, Homo Sapiens; identical to SEQ ID NO: 348707

SEQ ID NO: 381971 - DNA, 1530 bp, Homo Sapiens; identical to SEQ ID NO: 348708

SEQ ID NO: 381972 - DNA, 455 bp, Homo Sapiens; identical to SEQ ID NO: 348709
  misc_feature (16)..(16): n is a, c, g, or t
  misc_feature (34)..(34): n is a, c, g, or t
  misc_feature (60)..(60): n is a, c, g, or t
  misc_feature (75)..(75): n is a, c, g, or t
  misc_feature (92)..(92): n is a, c, g, or t

SEQ ID NO: 381973 - DNA, 1424 bp, Homo Sapiens; identical to SEQ ID NO: 348713

SEQ ID NO: 381974 - DNA, 878 bp, Homo Sapiens; identical to SEQ ID NO: 348714
  misc_feature (513)..(670): n is a, c, g, or t

SEQ ID NO: 381975 - DNA, 655 bp, Homo Sapiens; identical to SEQ ID NO: 348715

SEQ ID NO: 381976 - DNA, 1018 bp, Homo Sapiens; identical to SEQ ID NO: 348716

SEQ ID NO: 381977 - DNA, 855 bp, Homo Sapiens; identical to SEQ ID NO: 348719
  misc_feature (183)..(183): n is a, c, g, or t

SEQ ID NO: 381978 - DNA, 915 bp, Homo Sapiens; identical to SEQ ID NO: 348720

SEQ ID NO: 381979 - DNA, 1368 bp, Homo Sapiens; identical to SEQ ID NO: 348722

SEQ ID NO: 381980 - DNA, 876 bp, Homo Sapiens; identical to SEQ ID NO: 348723

SEQ ID NO: 381981 - DNA, 861 bp, Homo Sapiens; identical to SEQ ID NO: 75071

SEQ ID NO: 381982 - DNA, 2143 bp, Homo Sapiens; identical to SEQ ID NO: 348727
  misc_feature (1297)..(1297): n is a, c, g, or t
  misc_feature (1920)..(2070): n is a, c, g, or t
  misc_feature (2073)..(2073): n is a, c, g, or t
  misc_feature (2085)..(2098): n is a, c, g, or t

SEQ ID NO: 381983 - DNA, 1024 bp, Homo Sapiens; identical to SEQ ID NO: 348728
  misc_feature (935)..(935): n is a, c, g, or t
  misc_feature (958)..(958): n is a, c, g, or t

SEQ ID NO: 381984 - DNA, 866 bp, Homo Sapiens; identical to SEQ ID NO: 348729
  misc_feature (748)..(748): n is a, c, g, or t
  misc_feature (791)..(791): n is a, c, g, or t
  misc_feature (855)..(855): n is a, c, g, or t

SEQ ID NO: 381985 - DNA, 416 bp, Homo Sapiens; identical to SEQ ID NO: 348730

SEQ ID NO: 381986 - DNA, 506 bp, Homo Sapiens; identical to SEQ ID NO: 348731
  misc_feature (38)..(38): n is a, c, g, or t

SEQ ID NO: 381987 - DNA, 880 bp, Homo Sapiens; identical to SEQ ID NO: 348732

SEQ ID NO: 381988 - DNA, 985 bp, Homo Sapiens; identical to SEQ ID NO: 348733
  misc_feature (114)..(160): n is a, c, g, or t
  misc_feature (633)..(937): n is a, c, g, or t

SEQ ID NO: 381989 - DNA, 615 bp, Homo Sapiens; identical to SEQ ID NO: 348734
  misc_feature (33)..(33): n is a, c, g, or t
  misc_feature (526)..(526): n is a, c, g, or t
  misc_feature (590)..(590): n is a, c, g, or t

SEQ ID NO: 381990 - DNA, 1196 bp, Homo Sapiens; identical to SEQ ID NO: 348737
  misc_feature (86)..(94): n is a, c, g, or t
  misc_feature (131)..(189): n is a, c, g, or t
  misc_feature (1179)..(1179): n is a, c, g, or t

SEQ ID NO: 381991 - DNA, 1335 bp, Homo Sapiens; identical to SEQ ID NO: 348738
  misc_feature (57)..(57): n is a, c, g, or t
  misc_feature (82)..(82): n is a, c, g, or t
  misc_feature (134)..(192): n is a, c, g, or t

SEQ ID NO: 381992 - DNA, 1288 bp, Homo Sapiens; identical to SEQ ID NO: 348741

SEQ ID NO: 381993 - DNA, 815 bp, Homo Sapiens; identical to SEQ ID NO: 348742

SEQ ID NO: 381994 - DNA, 985 bp, Homo Sapiens; identical to SEQ ID NO: 348744
  misc_feature (4)..(4): n is a, c, g, or t
  misc_feature (10)..(11): n is a, c, g, or t
  misc_feature (15)..(15): n is a, c, g, or t
  misc_feature (19)..(19): n is a, c, g, or t
  misc_feature (22)..(23): n is a, c, g, or t
  misc_feature (26)..(26): n is a, c, g, or t
  misc_feature (30)..(30): n is a, c, g, or t
  misc_feature (34)..(34): n is a, c, g, or t
  misc_feature (37)..(37): n is a, c, g, or t
  misc_feature (49)..(49): n is a, c, g, or t

SEQ ID NO: 381995 - DNA, 973 bp, Homo Sapiens; identical to SEQ ID NO: 348745
  misc_feature (883)..(883): n is a, c, g, or t
  misc_feature (904)..(904): n is a, c, g, or t
  misc_feature (915)..(915): n is a, c, g, or t
  misc_feature (932)..(932): n is a, c, g, or t
  misc_feature (940)..(940): n is a, c, g, or t
  misc_feature (952)..(952): n is a, c, g, or t
  misc_feature (958)..(958): n is a, c, g, or t

SEQ ID NO: 381996 - DNA, 2326 bp, Homo Sapiens; identical to SEQ ID NO: 348746

SEQ ID NO: 381997 - DNA, 1000 bp, Homo Sapiens; identical to SEQ ID NO: 348747

SEQ ID NO: 381998 - DNA, 485 bp, Homo Sapiens; identical to SEQ ID NO: 348748
  misc_feature (31)..(31): n is a, c, g, or t
  misc_feature (38)..(38): n is a, c, g, or t
  misc_feature (56)..(56): n is a, c, g, or t
  misc_feature (74)..(74): n is a, c, g, or t
  misc_feature (126)..(126): n is a, c, g, or t
  misc_feature (222)..(222): n is a, c, g, or t
  misc_feature (269)..(269): n is a, c, g, or t

SEQ ID NO: 381999 - DNA, 832 bp, Homo Sapiens; identical to SEQ ID NO: 348753

SEQ ID NO: 382000 - DNA, 1104 bp, Homo Sapiens; identical to SEQ ID NO: 348754

SEQ ID NO: 382001 - DNA, 1314 bp, Homo Sapiens; identical to SEQ ID NO: 348757

SEQ ID NO: 382002 - DNA, 1172 bp, Homo Sapiens; identical to SEQ ID NO: 348758
  misc_feature (12)..(12): n is a, c, g, or t

SEQ ID NO: 382003 - DNA, 507 bp, Homo Sapiens; identical to SEQ ID NO: 348762
  misc_feature (434)..(434): n is a, c, g, or t
  misc_feature (451)..(451): n is a, c, g, or t
  misc_feature (465)..(465): n is a, c, g, or t
  misc_feature (475)..(475): n is a, c, g, or t
  misc_feature (490)..(490): n is a, c, g, or t

SEQ ID NO: 382004 - DNA, 448 bp, Homo Sapiens; identical to SEQ ID NO: 348763
  misc_feature (11)..(11): n is a, c, g, or t
  misc_feature (25)..(25): n is a, c, g, or t

SEQ ID NO: 382005 - DNA, 1246 bp, Homo Sapiens; identical to SEQ ID NO: 348764
  misc_feature (24)..(24): n is a, c, g, or t
  misc_feature (30)..(30): n is a, c, g, or t
  misc_feature (37)..(37): n is a, c, g, or t
  misc_feature (748)..(748): n is a, c, g, or t

SEQ ID NO: 382006 - DNA, 1355 bp, Homo Sapiens; identical to SEQ ID NO: 348766
  misc_feature (13)..(13): n is a, c, g, or t
  misc_feature (15)..(15): n is a, c, g, or t
  misc_feature (40)..(40): n is a, c, g, or t
  misc_feature (45)..(45): n is a, c, g, or t
  misc_feature (54)..(54): n is a, c, g, or t
  misc_feature (58)..(58): n is a, c, g, or t

SEQ ID NO: 382007 - DNA, 1993 bp, Homo Sapiens; identical to SEQ ID NO: 348767
  misc_feature (1317)..(1317): n is a, c, g, or t
  misc_feature (1333)..(1334): n is a, c, g, or t
  misc_feature (1349)..(1349): n is a, c, g, or t
  misc_feature (1379)..(1379): n is a, c, g, or t
  misc_feature (1387)..(1387): n is a, c, g, or t
  misc_feature (1405)..(1405): n is a, c, g, or t
  misc_feature (1414)..(1414): n is a, c, g, or t
  misc_feature (1428)..(1428): n is a, c, g, or t
  misc_feature (1869)..(1880): n is a, c, g, or t

SEQ ID NO: 382008 - DNA, 314 bp, Homo Sapiens; identical to SEQ ID NO: 348768

SEQ ID NO: 382009 - DNA, 1394 bp, Homo Sapiens; identical to SEQ ID NO: 348772

SEQ ID NO: 382010 - DNA, 1125 bp, Homo Sapiens; identical to SEQ ID NO: 348773

SEQ ID NO: 382011 - DNA, 389 bp, Homo Sapiens; identical to SEQ ID NO: 348777
  misc_feature (186)..(240): n is a, c, g, or t

SEQ ID NO: 382012 - DNA, 1187 bp, Homo Sapiens; identical to SEQ ID NO: 348778
  misc_feature (7)..(7): n is a, c, g, or t
  misc_feature (125)..(179): n is a, c, g, or t
  misc_feature (360)..(360): n is a, c, g, or t
  misc_feature (625)..(625): n is a, c, g, or t
  misc_feature (632)..(632): n is a, c, g, or t
  misc_feature (678)..(679): n is a, c, g, or t
  misc_feature (681)..(681): n is a, c, g, or t
  misc_feature (683)..(683): n is a, c, g, or t

SEQ ID NO: 382013 - DNA, 1261 bp, Homo Sapiens; identical to SEQ ID NO: 348779
  misc_feature (202)..(204): n is a, c, g, or t
  misc_feature (228)..(230): n is a, c, g, or t
  misc_feature (234)..(251): n is a, c, g, or t
  misc_feature (282)..(282): n is a, c, g, or t

SEQ ID NO: 382014 - DNA, 2086 bp, Homo Sapiens; identical to SEQ ID NO: 348786
  misc_feature (47)..(83): n is a, c, g, or t
  misc_feature (1838)..(1985): n is a, c, g, or t

SEQ ID NO: 382015 - DNA, 887 bp, Homo Sapiens; identical to SEQ ID NO: 348787

SEQ ID NO: 382016 - DNA, 3225 bp, Homo Sapiens; identical to SEQ ID NO: 348788
  misc_feature (2135)..(2135): n is a, c, g, or t
  misc_feature (2491)..(2583): n is a, c, g, or t
  misc_feature (2754)..(2763): n is a, c, g, or t
  misc_feature (2929)..(2941): n is a, c, g, or t

SEQ ID NO: 382017 - DNA, 542 bp, Homo Sapiens; identical to SEQ ID NO: 348789
  misc_feature (67)..(75): n is a, c, g, or t

SEQ ID NO: 382018 - DNA, 2043 bp, Homo Sapiens; identical to SEQ ID NO: 348790
  misc_feature (1409)..(1418): n is a, c, g, or t
  misc_feature (1480)..(1539): n is a, c, g, or t
  misc_feature (1636)..(1636): n is a, c, g, or t
  misc_feature (1667)..(1667): n is a, c, g, or t
  misc_feature (1886)..(1886): n is a, c, g, or t

SEQ ID NO: 382019 - DNA, 635 bp, Homo Sapiens; identical to SEQ ID NO: 348791
  misc_feature (334)..(369): n is a, c, g, or t

SEQ ID NO: 382020 - DNA, 1599 bp, Homo Sapiens; identical to SEQ ID NO: 348806

SEQ ID NO: 382021 - DNA, 784 bp, Homo Sapiens; identical to SEQ ID NO: 348807

SEQ ID NO: 382022 - DNA, 951 bp, Homo Sapiens; identical to SEQ ID NO: 348811

SEQ ID NO: 382023 - DNA, 1311 bp, Homo Sapiens; identical to SEQ ID NO: 348812

SEQ ID NO: 382024 - DNA, 1052 bp, Homo Sapiens; identical to SEQ ID NO: 348813
  misc_feature (526)..(558): n is a, c, g, or t
  misc_feature (575)..(595): n is a, c, g, or t
  misc_feature (950)..(972): n is a, c, g, or t
  misc_feature (978)..(979): n is a, c, g, or t
  misc_feature (981)..(981): n is a, c, g, or t
  misc_feature (1004)..(1004): n is a, c, g, or t

SEQ ID NO: 382025 - DNA, 1089 bp, Homo Sapiens; identical to SEQ ID NO: 348814

SEQ ID NO: 382026 - DNA, 569 bp, Homo Sapiens; identical to SEQ ID NO: 348815

SEQ ID NO: 382027 - DNA, 396 bp, Homo Sapiens; identical to SEQ ID NO: 348816
  misc_feature (38)..(38): n is a, c, g, or t
  misc_feature (43)..(43): n is a, c, g, or t

SEQ ID NO: 382028 - DNA, 890 bp, Homo Sapiens; identical to SEQ ID NO: 348819

SEQ ID NO: 382029 - DNA, 2760 bp, Homo Sapiens; identical to SEQ ID NO: 348820
  misc_feature (1921)..(1989): n is a, c, g, or t
  misc_feature (2628)..(2685): n is a, c, g, or t

SEQ ID NO: 382030 - DNA, 483 bp, Homo Sapiens; identical to SEQ ID NO: 348823

SEQ ID NO: 382031 - DNA, 455 bp, Homo Sapiens; identical to SEQ ID NO: 348824
  misc_feature (21)..(21): n is a, c, g, or t
  misc_feature (205)..(205): n is a, c, g, or t
  misc_feature (284)..(284): n is a, c, g, or t
  misc_feature (348)..(348): n is a, c, g, or t

SEQ ID NO: 382032 - DNA, 799 bp, Homo Sapiens; identical to SEQ ID NO: 348831
  misc_feature (17)..(17): n is a, c, g, or t
  misc_feature (21)..(21): n is a, c, g, or t
  misc_feature (37)..(37): n is a, c, g, or t
  misc_feature (91)..(91): n is a, c, g, or t
  misc_feature (134)..(134): n is a, c, g, or t
  misc_feature (151)..(151): n is a, c, g, or t

SEQ ID NO: 382033 - DNA, 1612 bp, Homo Sapiens; identical to SEQ ID NO: 348832

SEQ ID NO: 382034 - DNA, 1031 bp, Homo Sapiens; identical to SEQ ID NO: 348833

SEQ ID NO: 382035 - DNA, 1937 bp, Homo Sapiens; identical to SEQ ID NO: 348834

SEQ ID NO: 382036 - DNA, 873 bp, Homo Sapiens; identical to SEQ ID NO: 348835
  misc_feature (19)..(19): n is a, c, g, or t
  misc_feature (85)..(85): n is a, c, g, or t

SEQ ID NO: 382037 - DNA, 1549 bp, Homo Sapiens; identical to SEQ ID NO: 348836
  misc_feature (4)..(5): n is a, c, g, or t
  misc_feature (11)..(11): n is a, c, g, or t
  misc_feature (20)..(20): n is a, c, g, or t
  misc_feature (37)..(37): n is a, c, g, or t
  misc_feature (41)..(41): n is a, c, g, or t
  misc_feature (85)..(85): n is a, c, g, or t
  misc_feature (90)..(90): n is a, c, g, or t
  misc_feature (106)..(219): n is a, c, g, or t
  misc_feature (231)..(233): n is a, c, g, or t
  misc_feature (238)..(238): n is a, c, g, or t
  misc_feature (242)..(242): n is a, c, g, or t
  misc_feature (251)..(251): n is a, c, g, or t
  misc_feature (254)..(255): n is a, c, g, or t
  misc_feature (259)..(259): n is a, c, g, or t
  misc_feature (275)..(275): n is a, c, g, or t
  misc_feature (354)..(354): n is a, c, g, or t
  misc_feature (971)..(1144): n is a, c, g, or t

SEQ ID NO: 382038 - DNA, 1305 bp, Homo Sapiens; identical to SEQ ID NO: 348837
  misc_feature (171)..(179): n is a, c, g, or t

SEQ ID NO: 382039 - DNA, 723 bp, Homo Sapiens; identical to SEQ ID NO: 348840
  misc_feature (329)..(358): n is a, c, g, or t
  misc_feature (620)..(621): n is a, c, g, or t
  misc_feature (681)..(681): n is a, c, g, or t

SEQ ID NO: 382040 - DNA, 1975 bp, Homo Sapiens; identical to SEQ ID NO: 348841
  misc_feature (382)..(411): n is a, c, g, or t

SEQ ID NO: 382041 - DNA, 1332 bp, Homo Sapiens; identical to SEQ ID NO: 348844
  misc_feature (789)..(852): n is a, c, g, or t
  misc_feature (862)..(969): n is a, c, g, or t

SEQ ID NO: 382042 - DNA, 362 bp, Homo Sapiens; identical to SEQ ID NO: 348845

SEQ ID NO: 382043 - DNA, 483 bp, Homo Sapiens; identical to SEQ ID NO: 348847

SEQ ID NO: 382044 - DNA, 481 bp, Homo Sapiens; identical to SEQ ID NO: 348848
  misc_feature (20)..(20): n is a, c, g, or t
  misc_feature (42)..(42): n is a, c, g, or t

SEQ ID NO: 382045 - DNA, 1218 bp, Homo Sapiens; identical to SEQ ID NO: 348851

SEQ ID NO: 382046 - DNA, 1108 bp, Homo Sapiens; identical to SEQ ID NO: 348852

SEQ ID NO: 382047 - DNA, 1275 bp, Homo Sapiens; identical to SEQ ID NO: 348857
  misc_feature (1200)..(1202): n is a, c, g, or t
  misc_feature (1204)..(1204): n is a, c, g, or t
  misc_feature (1206)..(1206): n is a, c, g, or t
  misc_feature (1209)..(1210): n is a, c, g, or t
  misc_feature (1212)..(1212): n is a, c, g, or t
  misc_feature (1214)..(1215): n is a, c, g, or t
  misc_feature (1217)..(1219): n is a, c, g, or t
  misc_feature (1221)..(1226): n is a, c, g, or t

SEQ ID NO: 382048 - DNA, 445 bp, Homo Sapiens; identical to SEQ ID NO: 348858
  misc_feature (82)..(82): n is a, c, g, or t

SEQ ID NO: 382049 - DNA, 1771 bp, Homo Sapiens; identical to SEQ ID NO: 348861
  misc_feature (1159)..(1168): n is a, c, g, or t
  misc_feature (1706)..(1706): n is a, c, g, or t

SEQ ID NO: 382050 - DNA, 455 bp, Homo Sapiens; identical to SEQ ID NO: 348862
  misc_feature (24)..(24): n is a, c, g, or t
  misc_feature (31)..(31): n is a, c, g, or t

SEQ ID NO: 382051 - DNA, 1364 bp, Homo Sapiens; identical to SEQ ID NO: 348867

SEQ ID NO: 382052 - DNA, 424 bp, Homo Sapiens; identical to SEQ ID NO: 264484

SEQ ID NO: 382053 - DNA, 1309 bp, Homo Sapiens; identical to SEQ ID NO: 348872

SEQ ID NO: 382054 - DNA, 1295 bp, Homo Sapiens; identical to SEQ ID NO: 348873
  misc_feature (52)..(88): n is a, c, g, or t
  misc_feature (1021)..(1021): n is a, c, g, or t
  misc_feature (1090)..(1102): n is a, c, g, or t

SEQ ID NO: 382055 - DNA, 963 bp, Homo Sapiens; identical to SEQ ID NO: 348874
  misc_feature (13)..(13): n is a, c, g, or t

SEQ ID NO: 382056 - DNA, 467 bp, Homo Sapiens; identical to SEQ ID NO: 348875
  misc_feature (331)..(331): n is a, c, g, or t

SEQ ID NO: 382057 - DNA, 1865 bp, Homo Sapiens; identical to SEQ ID NO: 348877
  misc_feature (1088)..(1376): n is a, c, g, or t
  misc_feature (1503)..(1525): n is a, c, g, or t

SEQ ID NO: 382058 - DNA, 336 bp, Homo Sapiens; identical to SEQ ID NO: 348878

SEQ ID NO: 382059 - DNA, 665 bp, Homo Sapiens; identical to SEQ ID NO: 348879
  misc_feature (44)..(53): n is a, c, g, or t
  misc_feature (95)..(151): n is a, c, g, or t
  misc_feature (231)..(333): n is a, c, g, or t
  misc_feature (337)..(337): n is a, c, g, or t

SEQ ID NO: 382060 - DNA, 1177 bp, Homo Sapiens; identical to SEQ ID NO: 348891

SEQ ID NO: 382061 - DNA, 1602 bp, Homo Sapiens; identical to SEQ ID NO: 348892

SEQ ID NO: 382062 - DNA, 1003 bp, Homo Sapiens; identical to SEQ ID NO: 348895

SEQ ID NO: 382063 - DNA, 939 bp, Homo Sapiens; identical to SEQ ID NO: 348896

SEQ ID NO: 382064 - DNA, 686 bp, Homo Sapiens; identical to SEQ ID NO: 348909

SEQ ID NO: 382065 - DNA, 1050 bp, Homo Sapiens; identical to SEQ ID NO: 348910
  misc_feature (825)..(825): n is a, c, g, or t
  misc_feature (827)..(827): n is a, c, g, or t
  misc_feature (830)..(830): n is a, c, g, or t
  misc_feature (832)..(848): n is a, c, g, or t
  misc_feature (850)..(854): n is a, c, g, or t

SEQ ID NO: 382066 - DNA, 1177 bp, Homo Sapiens; identical to SEQ ID NO: 348912
  misc_feature (629)..(638): n is a, c, g, or t
  misc_feature (911)..(1118): n is a, c, g, or t
  misc_feature (1122)..(1122): n is a, c, g, or t
  misc_feature (1126)..(1126): n is a, c, g, or t
  misc_feature (1130)..(1130): n is a, c, g, or t
  misc_feature (1134)..(1134): n is a, c, g, or t
  misc_feature (1139)..(1139): n is a, c, g, or t
  misc_feature (1144)..(1144): n is a, c, g, or t
  misc_feature (1147)..(1148): n is a, c, g, or t
  misc_feature (1166)..(1166): n is a, c, g, or t
  misc_feature (1168)..(1168): n is a, c, g, or t
  misc_feature (1174)..(1174): n is a, c, g, or t
  misc_feature (1177)..(1177): n is a, c, g, or t

SEQ ID NO: 382067 - DNA, 1360 bp, Homo Sapiens; identical to SEQ ID NO: 348913

SEQ ID NO: 382068 - DNA, 806 bp, Homo Sapiens; identical to SEQ ID NO: 348914

SEQ ID NO: 382069 - DNA, 521 bp, Homo Sapiens; identical to SEQ ID NO: 348915

SEQ ID NO: 382070 - DNA, 638 bp, Homo Sapiens; identical to SEQ ID NO: 348916

SEQ ID NO: 382071 - DNA, 1305 bp, Homo Sapiens; identical to SEQ ID NO: 348921

SEQ ID NO: 382072 - DNA, 320 bp, Homo Sapiens; identical to SEQ ID NO: 348922

SEQ ID NO: 382073 - DNA, 832 bp, Homo Sapiens; identical to SEQ ID NO: 348924

SEQ ID NO: 382074 - DNA, 886 bp, Homo Sapiens; identical to SEQ ID NO: 348925

SEQ ID NO: 382075 - DNA, 857 bp, Homo Sapiens; identical to SEQ ID NO: 348931
  misc_feature (787)..(788): n is a, c, g, or t
  misc_feature (807)..(808): n is a, c, g, or t

SEQ ID NO: 382076 - DNA, 526 bp, Homo Sapiens; identical to SEQ ID NO: 348932
  misc_feature (208)..(325): n is a, c, g, or t

SEQ ID NO: 382077 - DNA, 1561 bp, Homo Sapiens; identical to SEQ ID NO: 348934
  misc_feature (185)..(185): n is a, c, g, or t
  misc_feature (992)..(992): n is a, c, g, or t
  misc_feature (1025)..(1025): n is a, c, g, or t
  misc_feature (1075)..(1075): n is a, c, g, or t
  misc_feature (1219)..(1219): n is a, c, g, or t
  misc_feature (1263)..(1263): n is a, c, g, or t
  misc_feature (1343)..(1343): n is a, c, g, or t
  misc_feature (1366)..(1366): n is a, c, g, or t
  misc_feature (1373)..(1373): n is a, c, g, or t
  misc_feature (1429)..(1459): n is a, c, g, or t
  misc_feature (1462)..(1462): n is a, c, g, or t
  misc_feature (1485)..(1485): n is a, c, g, or t
  misc_feature (1488)..(1489): n is a, c, g, or t
  misc_feature (1491)..(1491): n is a, c, g, or t
  misc_feature (1529)..(1529): n is a, c, g, or t
  misc_feature (1531)..(1531): n is a, c, g, or t
  misc_feature (1533)..(1533): n is a, c, g, or t

SEQ ID NO: 382078 - DNA, 2167 bp, Homo Sapiens; identical to SEQ ID NO: 348935

SEQ ID NO: 382079 - DNA, 1039 bp, Homo Sapiens; identical to SEQ ID NO: 348936

SEQ ID NO: 382080 - DNA, 397 bp, Homo Sapiens; identical to SEQ ID NO: 348937

SEQ ID NO: 382081 - DNA, 1704 bp, Homo Sapiens; identical to SEQ ID NO: 348938

SEQ ID NO: 382082 - DNA, 1378 bp, Homo Sapiens; identical to SEQ ID NO: 348939

SEQ ID NO: 382083 - DNA, 820 bp, Homo Sapiens; identical to SEQ ID NO: 348940

SEQ ID NO: 382084 - DNA, 948 bp, Homo Sapiens; identical to SEQ ID NO: 348943
  misc_feature (580)..(580): n is a, c, g, or t

SEQ ID NO: 382085 - DNA, 1113 bp, Homo Sapiens; identical to SEQ ID NO: 348944
  misc_feature (550)..(550): n is a, c, g, or t

SEQ ID NO: 382086 - DNA, 683 bp, Homo Sapiens; identical to SEQ ID NO: 348945

SEQ ID NO: 382087 - DNA, 1070 bp, Homo Sapiens; identical to SEQ ID NO: 348948

SEQ ID NO: 382088 - DNA, 877 bp, Homo Sapiens; identical to SEQ ID NO: 348949

SEQ ID NO: 382089 - DNA, 516 bp, Homo Sapiens; identical to SEQ ID NO: 348958

SEQ ID NO: 382090 - DNA, 2945 bp, Homo Sapiens; identical to SEQ ID NO: 348959

SEQ ID NO: 382091 - DNA, 543 bp, Homo Sapiens; identical to SEQ ID NO: 348960
  misc_feature (28)..(28): n is a, c, g, or t

SEQ ID NO: 382092 - DNA, 713 bp, Homo Sapiens; identical to SEQ ID NO: 348961
  misc_feature (699)..(699): n is a, c, g, or t

SEQ ID NO: 382093 - DNA, 694 bp, Homo Sapiens; identical to SEQ ID NO: 348965
  misc_feature (245)..(282): n is a, c, g, or t
  misc_feature (478)..(523): n is a, c, g, or t

SEQ ID NO: 382094 - DNA, 2006 bp, Homo Sapiens; identical to SEQ ID NO: 348966
  misc_feature (174)..(174): n is a, c, g, or t
  misc_feature (209)..(209): n is a, c, g, or t
  misc_feature (253)..(253): n is a, c, g, or t

SEQ ID NO: 382095 - DNA, 2281 bp, Homo Sapiens; identical to SEQ ID NO: 348967
  misc_feature (262)..(297): n is a, c, g, or t
  misc_feature (511)..(511): n is a, c, g, or t
  misc_feature (524)..(524): n is a, c, g, or t
  misc_feature (2160)..(2210): n is a, c, g, or t

SEQ ID NO: 382096 - DNA, 834 bp, Homo Sapiens; identical to SEQ ID NO: 348968
  misc_feature (262)..(307): n is a, c, g, or t
  misc_feature (519)..(531): n is a, c, g, or t

SEQ ID NO: 382097 - DNA, 447 bp, Homo Sapiens; identical to SEQ ID NO: 348969
  misc_feature (82)..(82): n is a, c, g, or t
  misc_feature (213)..(253): n is a, c, g, or t

SEQ ID NO: 382098 - DNA, 1149 bp, Homo Sapiens; identical to SEQ ID NO: 348974
  misc_feature (17)..(17): n is a, c, g, or t
  misc_feature (21)..(22): n is a, c, g, or t
  misc_feature (29)..(29): n is a, c, g, or t
  misc_feature (35)..(35): n is a, c, g, or t
  misc_feature (39)..(39): n is a, c, g, or t
  misc_feature (41)..(41): n is a, c, g, or t
  misc_feature (44)..(44): n is a, c, g, or t
  misc_feature (47)..(47): n is a, c, g, or t
  misc_feature (51)..(51): n is a, c, g, or t
  misc_feature (53)..(53): n is a, c, g, or t
  misc_feature (56)..(56): n is a, c, g, or t
  misc_feature (74)..(75): n is a, c, g, or t
  misc_feature (86)..(86): n is a, c, g, or t
  misc_feature (94)..(94): n is a, c, g, or t
  misc_feature (96)..(96): n is a, c, g, or t
  misc_feature (102)..(104): n is a, c, g, or t
  misc_feature (112)..(112): n is a, c, g, or t
  misc_feature (115)..(116): n is a, c, g, or t
  misc_feature (119)..(119): n is a, c, g, or t
  misc_feature (129)..(129): n is a, c, g, or t
  misc_feature (139)..(139): n is a, c, g, or t
  misc_feature (145)..(145): n is a, c, g, or t
  misc_feature (149)..(149): n is a, c, g, or t
  misc_feature (151)..(151): n is a, c, g, or t
  misc_feature (153)..(153): n is a, c, g, or t
  misc_feature (1111)..(1112): n is a, c, g, or t

SEQ ID NO: 382099 - DNA, 939 bp, Homo Sapiens; identical to SEQ ID NO: 348975

SEQ ID NO: 382100 - DNA, 855 bp, Homo Sapiens; identical to SEQ ID NO: 348976

SEQ ID NO: 382101 - DNA, 4051 bp, Homo Sapiens; identical to SEQ ID NO: 348977
  misc_feature (51)..(87): n is a, c, g, or t

SEQ ID NO: 382102 - DNA, 483 bp, Homo Sapiens; identical to SEQ ID NO: 348978
  misc_feature (13)..(13): n is a, c, g, or t
  misc_feature (29)..(29): n is a, c, g, or t
  misc_feature (285)..(285): n is a, c, g, or t

SEQ ID NO: 382103 - DNA, 1578 bp, Homo Sapiens; identical to SEQ ID NO: 348981
  misc_feature (380)..(388): n is a, c, g, or t
  misc_feature (417)..(473): n is a, c, g, or t
  misc_feature (1071)..(1096): n is a, c, g, or t

SEQ ID NO: 382104 - DNA, 388 bp, Homo Sapiens; identical to SEQ ID NO: 348982

SEQ ID NO: 382105 - DNA, 2781 bp, Homo Sapiens; identical to SEQ ID NO: 348989

SEQ ID NO: 382106 - DNA, 447 bp, Homo Sapiens; identical to SEQ ID NO: 348990
  misc_feature (41)..(41): n is a, c, g, or t
  misc_feature (50)..(50): n is a, c, g, or t

SEQ ID NO: 382107 - DNA, 1499 bp, Homo Sapiens; identical to SEQ ID NO: 348995

SEQ ID NO: 382108 - DNA, 999 bp, Homo Sapiens; identical to SEQ ID NO: 348996
  misc_feature (829)..(851): n is a, c, g, or t
  misc_feature (944)..(952): n is a, c, g, or t

SEQ ID NO: 382109 - DNA, 914 bp, Homo Sapiens; identical to SEQ ID NO: 348997
  misc_feature (41)..(73): n is a, c, g, or t
  misc_feature (572)..(572): n is a, c, g, or t
  misc_feature (694)..(749): n is a, c, g, or t
  misc_feature (773)..(773): n is a, c, g, or t

SEQ ID NO: 382110 - DNA, 2159 bp, Homo Sapiens; identical to SEQ ID NO: 348998
  misc_feature (29)..(29): n is a, c, g, or t
  misc_feature (31)..(31): n is a, c, g, or t
  misc_feature (37)..(37): n is a, c, g, or t
  misc_feature (1902)..(1957): n is a, c, g, or t

SEQ ID NO: 382111 - DNA, 1208 bp, Homo Sapiens; identical to SEQ ID NO: 349001

SEQ ID NO: 382112 - DNA, 1700 bp, Homo Sapiens; identical to SEQ ID NO: 349002
  misc_feature (1534)..(1608): n is a, c, g, or t

SEQ ID NO: 382113 - DNA, 1003 bp, Homo Sapiens; identical to SEQ ID NO: 349009
  misc_feature (473)..(481): n is a, c, g, or t
  misc_feature (747)..(747): n is a, c, g, or t
  misc_feature (787)..(809): n is a, c, g, or t
  misc_feature (814)..(814): n is a, c, g, or t
  misc_feature (909)..(909): n is a, c, g, or t
  misc_feature (931)..(931): n is a, c, g, or t
  misc_feature (937)..(937): n is a, c, g, or t
  misc_feature (951)..(951): n is a, c, g, or t
  misc_feature (966)..(967): n is a, c, g, or t
  misc_feature (972)..(972): n is a, c, g, or t
  misc_feature (974)..(974): n is a, c, g, or t
  misc_feature (976)..(977): n is a, c, g, or t
  misc_feature (990)..(990): n is a, c, g, or t
  misc_feature (992)..(992): n is a, c, g, or t

SEQ ID NO: 382114 - DNA, 550 bp, Homo Sapiens; identical to SEQ ID NO: 349010
  misc_feature (137)..(153): n is a, c, g, or t

SEQ ID NO: 382115 - DNA, 450 bp, Homo Sapiens; identical to SEQ ID NO: 349012
  misc_feature (92)..(186): n is a, c, g, or t

SEQ ID NO: 382116 - DNA, 281 bp, Homo Sapiens; identical to SEQ ID NO: 349013
  misc_feature (95)..(186): n is a, c, g, or t

SEQ ID NO: 382117 - DNA, 1049 bp, Homo Sapiens; identical to SEQ ID NO: 349015
  misc_feature (109)..(136): n is a, c, g, or t
  misc_feature (149)..(245): n is a, c, g, or t
  misc_feature (280)..(401): n is a, c, g, or t
  misc_feature (537)..(558): n is a, c, g, or t

SEQ ID NO: 382118 - DNA, 847 bp, Homo Sapiens; identical to SEQ ID NO: 349016
  misc_feature (288)..(308): n is a, c, g, or t

SEQ ID NO: 382119 - DNA, 2365 bp, Homo Sapiens; identical to SEQ ID NO: 349019
  misc_feature (1194)..(1209): n is a, c, g, or t

SEQ ID NO: 382120 - DNA, 504 bp, Homo Sapiens; identical to SEQ ID NO: 349020
  misc_feature (18)..(18): n is a, c, g, or t
  misc_feature (31)..(31): n is a, c, g, or t
  misc_feature (44)..(44): n is a, c, g, or t
  misc_feature (99)..(99): n is a, c, g, or t
  misc_feature (297)..(312): n is a, c, g, or t

SEQ ID NO: 382121 - DNA, 1236 bp, Homo Sapiens; identical to SEQ ID NO: 349022

SEQ ID NO: 382122 - DNA, 1171 bp, Homo Sapiens; identical to SEQ ID NO: 349023
  misc_feature (662)..(682): n is a, c, g, or t
  misc_feature (932)..(943): n is a, c, g, or t
  misc_feature (945)..(946): n is a, c, g, or t
  misc_feature (948)..(950): n is a, c, g, or t
  misc_feature (952)..(953): n is a, c, g, or t
  misc_feature (956)..(957): n is a, c, g, or t
  misc_feature (959)..(961): n is a, c, g, or t
  misc_feature (963)..(967): n is a, c, g, or t
  misc_feature (997)..(1015): n is a, c, g, or t
  misc_feature (1068)..(1100): n is a, c, g, or t

SEQ ID NO: 382123 - DNA, 490 bp, Homo Sapiens; identical to SEQ ID NO: 349026

SEQ ID NO: 382124 - DNA, 971 bp, Homo Sapiens; identical to SEQ ID NO: 349027

SEQ ID NO: 382125 - DNA, 2401 bp, Homo Sapiens; identical to SEQ ID NO: 349030
  misc_feature (18)..(18): n is a, c, g, or t
  misc_feature (50)..(50): n is a, c, g, or t
  misc_feature (906)..(923): n is a, c, g, or t
  misc_feature (1011)..(1026): n is a, c, g, or t
  misc_feature (1154)..(1263): n is a, c, g, or t
  misc_feature (1286)..(1361): n is a, c, g, or t
  misc_feature (1392)..(1411): n is a, c, g, or t
  misc_feature (1732)..(1732): n is a, c, g, or t
  misc_feature (1753)..(1753): n is a, c, g, or t
  misc_feature (1816)..(1816): n is a, c, g, or t
  misc_feature (1839)..(1839): n is a, c, g, or t
  misc_feature (1885)..(1885): n is a, c, g, or t
  misc_feature (1899)..(1908): n is a, c, g, or t
  misc_feature (1923)..(1923): n is a, c, g, or t
  misc_feature (1950)..(1950): n is a, c, g, or t
  misc_feature (1993)..(1993): n is a, c, g, or t
  misc_feature (2127)..(2135): n is a, c, g, or t
  misc_feature (2137)..(2137): n is a, c, g, or t
  misc_feature (2160)..(2160): n is a, c, g, or t
  misc_feature (2171)..(2171): n is a, c, g, or t
  misc_feature (2204)..(2204): n is a, c, g, or t
  misc_feature (2234)..(2245): n is a, c, g, or t
  misc_feature (2265)..(2266): n is a, c, g, or t
  misc_feature (2292)..(2292): n is a, c, g, or t

SEQ ID NO: 382126 - DNA, 269 bp, Homo Sapiens; identical to SEQ ID NO: 349031

SEQ ID NO: 382127 - DNA, 1930 bp, Homo Sapiens; identical to SEQ ID NO: 349032

SEQ ID NO: 382128 - DNA, 681 bp, Homo Sapiens; identical to SEQ ID NO: 349033

SEQ ID NO: 382129 - DNA, 892 bp, Homo Sapiens; identical to SEQ ID NO: 349035

SEQ ID NO: 382130 - DNA, 2152 bp, Homo Sapiens; identical to SEQ ID NO: 349036
  misc_feature (2011)..(2022): n is a, c, g, or t

SEQ ID NO: 382131 - DNA, 912 bp, Homo Sapiens; identical to SEQ ID NO: 349037
  misc_feature (659)..(667): n is a, c, g, or t

SEQ ID NO: 382132 - DNA, 567 bp, Homo Sapiens; identical to SEQ ID NO: 349038
  misc_feature (13)..(13): n is a, c, g, or t
  misc_feature (28)..(28): n is a, c, g, or t

SEQ ID NO: 382133 - DNA, 514 bp, Homo Sapiens; identical to SEQ ID NO: 349040

SEQ ID NO: 382134 - DNA, 700 bp, Homo Sapiens; identical to SEQ ID NO: 349041

SEQ ID NO: 382135 - DNA, 3645 bp, Homo Sapiens; identical to SEQ ID NO: 349042

SEQ ID NO: 382136 - DNA, 1712 bp, Homo Sapiens; identical to SEQ ID NO: 349043
  misc_feature (652)..(690): n is a, c, g, or t

SEQ ID NO: 382137 - DNA, 1122 bp, Homo Sapiens; identical to SEQ ID NO: 349044
  misc_feature (471)..(509): n is a, c, g, or t

SEQ ID NO: 382138 - DNA, 1882 bp, Homo Sapiens; identical to SEQ ID NO: 349047
  misc_feature (45)..(45): n is a, c, g, or t
  misc_feature (79)..(79): n is a, c, g, or t
  misc_feature (107)..(107): n is a, c, g, or t
  misc_feature (334)..(334): n is a, c, g, or t
  misc_feature (352)..(352): n is a, c, g, or t
  misc_feature (354)..(354): n is a, c, g, or t
  misc_feature (467)..(483): n is a, c, g, or t
  misc_feature (488)..(488): n is a, c, g, or t
  misc_feature (510)..(510): n is a, c, g, or t
  misc_feature (844)..(852): n is a, c, g, or t

SEQ ID NO: 382139 - DNA, 701 bp, Homo Sapiens; identical to SEQ ID NO: 349048

SEQ ID NO: 382140 - DNA, 478 bp, Homo Sapiens; identical to SEQ ID NO: 349049
  misc_feature (14)..(14): n is a, c, g, or t
  misc_feature (35)..(35): n is a, c, g, or t
  misc_feature (129)..(129): n is a, c, g, or t

SEQ ID NO: 382141 - DNA, 1005 bp, Homo Sapiens; identical to SEQ ID NO: 349053

SEQ ID NO: 382142 - DNA, 467 bp, Homo Sapiens; identical to SEQ ID NO: 349054
  misc_feature (54)..(54): n is a, c, g, or t

SEQ ID NO: 382143 - DNA, 562 bp, Homo Sapiens; identical to SEQ ID NO: 349057

SEQ ID NO: 382144 - DNA, 1802 bp, Homo Sapiens; identical to SEQ ID NO: 349058
  misc_feature (271)..(362): n is a, c, g, or t
  misc_feature (450)..(458): n is a, c, g, or t

SEQ ID NO: 382145 - DNA, 1261 bp, Homo Sapiens; identical to SEQ ID NO: 349059

SEQ ID NO: 382146 - DNA, 2018 bp, Homo Sapiens; identical to SEQ ID NO: 349060
  misc_feature (1287)..(1297): n is a, c, g, or t
  misc_feature (1343)..(1343): n is a, c, g, or t
  misc_feature (1365)..(1365): n is a, c, g, or t
  misc_feature (1391)..(1399): n is a, c, g, or t
  misc_feature (1429)..(1438): n is a, c, g, or t
  misc_feature (1812)..(1822): n is a, c, g, or t
  misc_feature (1834)..(1834): n is a, c, g, or t

SEQ ID NO: 382147 - DNA, 408 bp, Homo Sapiens; identical to SEQ ID NO: 349061
  misc_feature (350)..(350): n is a, c, g, or t
  misc_feature (393)..(393): n is a, c, g, or t

SEQ ID NO: 382148 - DNA, 488 bp, Homo Sapiens; identical to SEQ ID NO: 349062
  misc_feature (472)..(472): n is a, c, g, or t

SEQ ID NO: 382149 - DNA, 1016 bp, Homo Sapiens; identical to SEQ ID NO: 349064

SEQ ID NO: 382150 - DNA, 703 bp, Homo Sapiens; identical to SEQ ID NO: 349065

SEQ ID NO: 382151 - DNA, 404 bp, Homo Sapiens; identical to SEQ ID NO: 349066

SEQ ID NO: 382152 - DNA, 1909 bp, Homo Sapiens; identical to SEQ ID NO: 349067
  misc_feature (174)..(182): n is a, c, g, or t

SEQ ID NO: 382153 - DNA, 1018 bp, Homo Sapiens; identical to SEQ ID NO: 349075
  misc_feature (145)..(145): n is a, c, g, or t
  misc_feature (161)..(161): n is a, c, g, or t
  misc_feature (200)..(200): n is a, c, g, or t
  misc_feature (907)..(907): n is a, c, g, or t
  misc_feature (972)..(972): n is a, c, g, or t
  misc_feature (995)..(995): n is a, c, g, or t

SEQ ID NO: 382154 - DNA, 1104 bp, Homo Sapiens; identical to SEQ ID NO: 349076

SEQ ID NO: 382155 - DNA, 1534 bp, Homo Sapiens; identical to SEQ ID NO: 349082
  misc_feature (352)..(598): n is a, c, g, or t
  misc_feature (611)..(652): n is a, c, g, or t

SEQ ID NO: 382156 - DNA, 1432 bp, Homo Sapiens; identical to SEQ ID NO: 349083
  misc_feature (462)..(524): n is a, c, g, or t
  misc_feature (913)..(1158): n is a, c, g, or t

SEQ ID NO: 382157 - DNA, 1448 bp, Homo Sapiens; identical to SEQ ID NO: 349084
  misc_feature (27)..(27): n is a, c, g, or t
  misc_feature (30)..(30): n is a, c, g, or t
  misc_feature (1086)..(1330): n is a, c, g, or t
  misc_feature (1343)..(1376): n is a, c, g, or t

SEQ ID NO: 382158 - DNA, 1997 bp, Homo Sapiens; identical to SEQ ID NO: 349089

SEQ ID NO: 382159 - DNA, 395 bp, Homo Sapiens; identical to SEQ ID NO: 349090
  misc_feature (31)..(31): n is a, c, g, or t
  misc_feature (48)..(48): n is a, c, g, or t
  misc_feature (63)..(63): n is a, c, g, or t
  misc_feature (70)..(70): n is a, c, g, or t
  misc_feature (95)..(95): n is a, c, g, or t

SEQ ID NO: 382160 - DNA, 996 bp, Homo Sapiens; identical to SEQ ID NO: 349097

SEQ ID NO: 382161 - DNA, 1614 bp, Homo Sapiens; identical to SEQ ID NO: 349098
  misc_feature (1435)..(1435): n is a, c, g, or t
  misc_feature (1585)..(1585): n is a, c, g, or t
  misc_feature (1604)..(1604): n is a, c, g, or t

SEQ ID NO: 382162 - DNA, 408 bp, Homo Sapiens; identical to SEQ ID NO: 349099
  misc_feature (20)..(20): n is a, c, g, or t

SEQ ID NO: 382163 - DNA, 2350 bp, Homo Sapiens; identical to SEQ ID NO: 349101
  misc_feature (263)..(273): n is a, c, g, or t
  misc_feature (1779)..(1795): n is a, c, g, or t
  misc_feature (1812)..(1868): n is a, c, g, or t
  misc_feature (1939)..(1950): n is a, c, g, or t
  misc_feature (1953)..(2045): n is a, c, g, or t

SEQ ID NO: 382164 - DNA, 1712 bp, Homo Sapiens; identical to SEQ ID NO: 349102
  misc_feature (209)..(220): n is a, c, g, or t
  misc_feature (421)..(437): n is a, c, g, or t
  misc_feature (486)..(501): n is a, c, g, or t
  misc_feature (596)..(604): n is a, c, g, or t
  misc_feature (643)..(643): n is a, c, g, or t

SEQ ID NO: 382165 - DNA, 387 bp, Homo Sapiens; identical to SEQ ID NO: 349103

SEQ ID NO: 382166 - DNA, 987 bp, Homo Sapiens; identical to SEQ ID NO: 349104

SEQ ID NO: 382167 - DNA, 1765 bp, Homo Sapiens; identical to SEQ ID NO: 349105
  misc_feature (783)..(813): n is a, c, g, or t
  misc_feature (1067)..(1079): n is a, c, g, or t

SEQ ID NO: 382168 - DNA, 473 bp, Homo Sapiens; identical to SEQ ID NO: 349106
  misc_feature (15)..(15): n is a, c, g, or t
  misc_feature (25)..(25): n is a, c, g, or t
  misc_feature (131)..(131): n is a, c, g, or t
  misc_feature (171)..(171): n is a, c, g, or t
  misc_feature (226)..(226): n is a, c, g, or t

SEQ ID NO: 382169 - DNA, 1283 bp, Homo Sapiens; identical to SEQ ID NO: 349107

SEQ ID NO: 382170 - DNA, 1714 bp, Homo Sapiens; identical to SEQ ID NO: 349108

SEQ ID NO: 382171 - DNA, 1833 bp, Homo Sapiens; identical to SEQ ID NO: 349109
  misc_feature (1453)..(1453): n is a, c, g, or t
  misc_feature (1527)..(1527): n is a, c, g, or t

SEQ ID NO: 382172 - DNA, 132 bp, Homo Sapiens; identical to SEQ ID NO: 349110

SEQ ID NO: 382173 - DNA, 1141 bp, Homo Sapiens; identical to SEQ ID NO: 349111
  misc_feature (1004)..(1004): n is a, c, g, or t
  misc_feature (1006)..(1006): n is a, c, g, or t
  misc_feature (1008)..(1008): n is a, c, g, or t
  misc_feature (1020)..(1020): n is a, c, g, or t
  misc_feature (1034)..(1035): n is a, c, g, or t
  misc_feature (1046)..(1046): n is a, c, g, or t
  misc_feature (1049)..(1049): n is a, c, g, or t
  misc_feature (1069)..(1069): n is a, c, g, or t
  misc_feature (1076)..(1076): n is a, c, g, or t
  misc_feature (1078)..(1078): n is a, c, g, or t
  misc_feature (1087)..(1087): n is a, c, g, or t
  misc_feature (1089)..(1091): n is a, c, g, or t
  misc_feature (1097)..(1097): n is a, c, g, or t
  misc_feature (1107)..(1108): n is a, c, g, or t
  misc_feature (1113)..(1113): n is a, c, g, or t
  misc_feature (1124)..(1124): n is a, c, g, or t
  misc_feature (1134)..(1134): n is a, c, g, or t
  misc_feature (1137)..(1137): n is a, c, g, or t

SEQ ID NO: 382174 - DNA, 461 bp, Homo Sapiens; identical to SEQ ID NO: 349112
  misc_feature (14)..(14): n is a, c, g, or t
  misc_feature (30)..(30): n is a, c, g, or t
  misc_feature (36)..(36): n is a, c, g, or t
  misc_feature (141)..(151): n is a, c, g, or t

SEQ ID NO: 382175 - DNA, 1386 bp, Homo Sapiens; identical to SEQ ID NO: 349113

SEQ ID NO: 382176 - DNA, 1451 bp, Homo Sapiens; identical to SEQ ID NO: 349114

SEQ ID NO: 382177 - DNA, 1167 bp, Homo Sapiens; identical to SEQ ID NO: 349115

SEQ ID NO: 382178 - DNA, 1387 bp, Homo Sapiens; identical to SEQ ID NO: 349118

SEQ ID NO: 382179 - DNA, 2475 bp, Homo Sapiens; identical to SEQ ID NO: 349119

SEQ ID NO: 382180 - DNA, 2022 bp, Homo Sapiens; identical to SEQ ID NO: 349125
  misc_feature (227)..(305): n is a, c, g, or t

SEQ ID NO: 382181 - DNA, 599 bp, Homo Sapiens; identical to SEQ ID NO: 349126
  misc_feature (238)..(302): n is a, c, g, or t

SEQ ID NO: 382182 - DNA, 1265 bp, Homo Sapiens; identical to SEQ ID NO: 349141
  misc_feature (29)..(29): n is a, c, g, or t
  misc_feature (62)..(62): n is a, c, g, or t
  misc_feature (1023)..(1023): n is a, c, g, or t
  misc_feature (1028)..(1028): n is a, c, g, or t

SEQ ID NO: 382183 - DNA, 1470 bp, Homo Sapiens; identical to SEQ ID NO: 349142
  misc_feature (251)..(251): n is a, c, g, or t
  misc_feature (888)..(888): n is a, c, g, or t
  misc_feature (931)..(931): n is a, c, g, or t
  misc_feature (960)..(960): n is a, c, g, or t
  misc_feature (1068)..(1068): n is a, c, g, or t
  misc_feature (1444)..(1444): n is a, c, g, or t

SEQ ID NO: 382184 - DNA, 2008 bp, Homo Sapiens; identical to SEQ ID NO: 349143

SEQ ID NO: 382185 - DNA, 419 bp, Homo Sapiens; identical to SEQ ID NO: 349144
  misc_feature (73)..(73): n is a, c, g, or t

SEQ ID NO: 382186 - DNA, 823 bp, Homo Sapiens; identical to SEQ ID NO: 349145
  misc_feature (105)..(105): n is a, c, g, or t
  misc_feature (137)..(137): n is a, c, g, or t
  misc_feature (157)..(157): n is a, c, g, or t
  misc_feature (189)..(189): n is a, c, g, or t

SEQ ID NO: 382187 - DNA, 1174 bp, Homo Sapiens; identical to SEQ ID NO: 349146

SEQ ID NO: 382188 - DNA, 1140 bp, Homo Sapiens; identical to SEQ ID NO: 349147
  misc_feature (1042)..(1042): n is a, c, g, or t
  misc_feature (1118)..(1118): n is a, c, g, or t

SEQ ID NO: 382189 - DNA, 456 bp, Homo Sapiens; identical to SEQ ID NO: 349148
  misc_feature (34)..(34): n is a, c, g, or t
  misc_feature (42)..(42): n is a, c, g, or t
  misc_feature (48)..(48): n is a, c, g, or t
  misc_feature (379)..(379): n is a, c, g, or t
  misc_feature (393)..(393): n is a, c, g, or t

SEQ ID NO: 382190 - DNA, 494 bp, Homo Sapiens; identical to SEQ ID NO: 349149
  misc_feature (22)..(22): n is a, c, g, or t
  misc_feature (61)..(61): n is a, c, g, or t
  misc_feature (67)..(67): n is a, c, g, or t
  misc_feature (89)..(89): n is a, c, g, or t
  misc_feature (154)..(154): n is a, c, g, or t
  misc_feature (331)..(331): n is a, c, g, or t
  misc_feature (397)..(397): n is a, c, g, or t

SEQ ID NO: 382191 - DNA, 2914 bp, Homo Sapiens; identical to SEQ ID NO: 349154
  misc_feature (1777)..(1786): n is a, c, g, or t

SEQ ID NO: 382192 - DNA, 294 bp, Homo Sapiens; identical to SEQ ID NO: 349155

SEQ ID NO: 382193 - DNA, 2148 bp, Homo Sapiens; identical to SEQ ID NO: 349156
  misc_feature (65)..(77): n is a, c, g, or t
  misc_feature (263)..(272): n is a, c, g, or t
  misc_feature (426)..(494): n is a, c, g, or t
  misc_feature (1986)..(2003): n is a, c, g, or t

SEQ ID NO: 382194 - DNA, 863 bp, Homo Sapiens; identical to SEQ ID NO: 349157
  misc_feature (452)..(493): n is a, c, g, or t
  misc_feature (696)..(720): n is a, c, g, or t

SEQ ID NO: 382195 - DNA, 744 bp, Homo Sapiens; identical to SEQ ID NO: 349160
  misc_feature (697)..(697): n is a, c, g, or t

SEQ ID NO: 382196 - DNA, 982 bp, Homo Sapiens; identical to SEQ ID NO: 349161

SEQ ID NO: 382197 - DNA, 960 bp, Homo Sapiens; identical to SEQ ID NO: 349167

SEQ ID NO: 382198 - DNA, 448 bp, Homo Sapiens; identical to SEQ ID NO: 349168

SEQ ID NO: 382199 - DNA, 973 bp, Homo Sapiens; identical to SEQ ID NO: 349186
  misc_feature (44)..(80): n is a, c, g, or t

SEQ ID NO: 382200 - DNA, 915 bp, Homo Sapiens; identical to SEQ ID NO: 349187
  misc_feature (95)..(95): n is a, c, g, or t
  misc_feature (127)..(127): n is a, c, g, or t
  misc_feature (835)..(871): n is a, c, g, or t

SEQ ID NO: 382201 - DNA, 1452 bp, Homo Sapiens; identical to SEQ ID NO: 349188

SEQ ID NO: 382202 - DNA, 1290 bp, Homo Sapiens; identical to SEQ ID NO: 349189
  misc_feature (36)..(36): n is a, c, g, or t
  misc_feature (136)..(144): n is a, c, g, or t
  misc_feature (1057)..(1057): n is a, c, g, or t

SEQ ID NO: 382203 - DNA, 890 bp, Homo Sapiens; identical to SEQ ID NO: 349195

SEQ ID NO: 382204 - DNA, 1141 bp, Homo Sapiens; identical to SEQ ID NO: 349196
  misc_feature (901)..(901): n is a, c, g, or t
  misc_feature (958)..(958): n is a, c, g, or t
  misc_feature (977)..(977): n is a, c, g, or t
  misc_feature (1000)..(1001): n is a, c, g, or t
  misc_feature (1019)..(1019): n is a, c, g, or t
  misc_feature (1043)..(1043): n is a, c, g, or t
  misc_feature (1059)..(1059): n is a, c, g, or t
  misc_feature (1089)..(1089): n is a, c, g, or t
  misc_feature (1106)..(1106): n is a, c, g, or t
  misc_feature (1115)..(1115): n is a, c, g, or t
  misc_feature (1131)..(1131): n is a, c, g, or t

SEQ ID NO: 382205 - DNA, 743 bp, Homo Sapiens; identical to SEQ ID NO: 349197

SEQ ID NO: 382206 - DNA, 770 bp, Homo Sapiens; identical to SEQ ID NO: 349198

SEQ ID NO: 382207 - DNA, 1113 bp, Homo Sapiens; identical to SEQ ID NO: 349203
  misc_feature (9)..(9): n is a, c, g, or t
  misc_feature (17)..(17): n is a, c, g, or t
  misc_feature (26)..(26): n is a, c, g, or t
  misc_feature (31)..(31): n is a, c, g, or t
  misc_feature (35)..(35): n is a, c, g, or t
  misc_feature (37)..(37): n is a, c, g, or t
  misc_feature (44)..(44): n is a, c, g, or t
  misc_feature (52)..(52): n is a, c, g, or t
  misc_feature (54)..(54): n is a, c, g, or t
  misc_feature (56)..(56): n is a, c, g, or t
  misc_feature (60)..(60): n is a, c, g, or t
  misc_feature (73)..(73): n is a, c, g, or t
  misc_feature (107)..(107): n is a, c, g, or t
  misc_feature (110)..(110): n is a, c, g, or t
  misc_feature (147)..(147): n is a, c, g, or t
  misc_feature (185)..(185): n is a, c, g, or t
  misc_feature (263)..(318): n is a, c, g, or t

SEQ ID NO: 382208 - DNA, 914 bp, Homo Sapiens; identical to SEQ ID NO: 349204
  misc_feature (143)..(143): n is a, c, g, or t
  misc_feature (154)..(154): n is a, c, g, or t
  misc_feature (156)..(156): n is a, c, g, or t
  misc_feature (292)..(292): n is a, c, g, or t
  misc_feature (464)..(464): n is a, c, g, or t
  misc_feature (510)..(510): n is a, c, g, or t
  misc_feature (816)..(816): n is a, c, g, or t
  misc_feature (860)..(860): n is a, c, g, or t
  misc_feature (865)..(865): n is a, c, g, or t
  misc_feature (869)..(869): n is a, c, g, or t
  misc_feature (871)..(871): n is a, c, g, or t
  misc_feature (874)..(874): n is a, c, g, or t
  misc_feature (885)..(885): n is a, c, g, or t
  misc_feature (887)..(887): n is a, c, g, or t
  misc_feature (894)..(895): n is a, c, g, or t
  misc_feature (898)..(898): n is a, c, g, or t

SEQ ID NO: 382209 - DNA, 788 bp, Homo Sapiens; identical to SEQ ID NO: 349205
  misc_feature (129)..(172): n is a, c, g, or t
  misc_feature (645)..(645): n is a, c, g, or t
  misc_feature (659)..(659): n is a, c, g, or t
  misc_feature (706)..(706): n is a, c, g, or t
  misc_feature (712)..(712): n is a, c, g, or t
  misc_feature (720)..(720): n is a, c, g, or t
  misc_feature (726)..(726): n is a, c, g, or t
  misc_feature (740)..(740): n is a, c, g, or t
  misc_feature (765)..(765): n is a, c, g, or t

SEQ ID NO: 382210 - DNA, 2119 bp, Homo Sapiens; identical to SEQ ID NO: 349206
  misc_feature (103)..(147): n is a, c, g, or t
  misc_feature (1878)..(1878): n is a, c, g, or t

SEQ ID NO: 382211 - DNA, 3754 bp, Homo Sapiens; identical to SEQ ID NO: 349207
  misc_feature (3250)..(3293): n is a, c, g, or t

SEQ ID NO: 382212 - DNA, 694 bp, Homo Sapiens; identical to SEQ ID NO: 349208
  misc_feature (131)..(174): n is a, c, g, or t
  misc_feature (567)..(567): n is a, c, g, or t

SEQ ID NO: 382213 - DNA, 800 bp, Homo Sapiens; identical to SEQ ID NO: 349209

SEQ ID NO: 382214 - DNA, 460 bp, Homo Sapiens; identical to SEQ ID NO: 349210
  misc_feature (22)..(22): n is a, c, g, or t
  misc_feature (337)..(414): n is a, c, g, or t

SEQ ID NO: 382215 - DNA, 1835 bp, Homo Sapiens; identical to SEQ ID NO: 349211

SEQ ID NO: 382216 - DNA, 220 bp, Homo Sapiens; identical to SEQ ID NO: 349212

SEQ ID NO: 382217 - DNA, 1578 bp, Homo Sapiens; identical to SEQ ID NO: 349216

SEQ ID NO: 382218 - DNA, 441 bp, Homo Sapiens; identical to SEQ ID NO: 349217

SEQ ID NO: 382219 - DNA, 1218 bp, Homo Sapiens; identical to SEQ ID NO: 349220

SEQ ID NO: 382220 - DNA, 1178 bp, Homo Sapiens; identical to SEQ ID NO: 349221
  misc_feature (447)..(447): n is a, c, g, or t
  misc_feature (679)..(688): n is a, c, g, or t
  misc_feature (695)..(695): n is a, c, g, or t
  misc_feature (726)..(777): n is a, c, g, or t
  misc_feature (999)..(999): n is a, c, g, or t
  misc_feature (1006)..(1016): n is a, c, g, or t
  misc_feature (1025)..(1026): n is a, c, g, or t

SEQ ID NO: 382221 - DNA, 1170 bp, Homo Sapiens; identical to SEQ ID NO: 349224
  misc_feature (368)..(376): n is a, c, g, or t

SEQ ID NO: 382222 - DNA, 923 bp, Homo Sapiens; identical to SEQ ID NO: 349225
  misc_feature (656)..(656): n is a, c, g, or t

SEQ ID NO: 382223 - DNA, 1317 bp, Homo Sapiens; identical to SEQ ID NO: 349227
  misc_feature (7)..(7): n is a, c, g, or t
  misc_feature (15)..(15): n is a, c, g, or t
  misc_feature (45)..(45): n is a, c, g, or t

SEQ ID NO: 382224 - DNA, 1476 bp, Homo Sapiens; identical to SEQ ID NO: 349228

SEQ ID NO: 382225 - DNA, 1224 bp, Homo Sapiens; identical to SEQ ID NO: 349231
  misc_feature (40)..(40): n is a, c, g, or t
  misc_feature (145)..(153): n is a, c, g, or t
  misc_feature (288)..(288): n is a, c, g, or t

SEQ ID NO: 382226 - DNA, 1256 bp, Homo Sapiens; identical to SEQ ID NO: 349232

SEQ ID NO: 382227 - DNA, 671 bp, Homo Sapiens; identical to SEQ ID NO: 349233

SEQ ID NO: 382228 - DNA, 717 bp, Homo Sapiens; identical to SEQ ID NO: 349234

SEQ ID NO: 382229 - DNA, 516 bp, Homo Sapiens; identical to SEQ ID NO: 349235
  misc_feature (470)..(470): n is a, c, g, or t
  misc_feature (496)..(496): n is a, c, g, or t

SEQ ID NO: 382230 - DNA, 733 bp, Homo Sapiens; identical to SEQ ID NO: 349238
  misc_feature (278)..(355): n is a, c, g, or t
  misc_feature (591)..(624): n is a, c, g, or t

SEQ ID NO: 382231 - DNA, 780 bp, Homo Sapiens; identical to SEQ ID NO: 349239
  misc_feature (137)..(177): n is a, c, g, or t

SEQ ID NO: 382232 - DNA, 1213 bp, Homo Sapiens; identical to SEQ ID NO: 349243
  misc_feature (13)..(13): n is a, c, g, or t
  misc_feature (146)..(165): n is a, c, g, or t

SEQ ID NO: 382233 - DNA, 851 bp, Homo Sapiens; identical to SEQ ID NO: 349244
  misc_feature (38)..(38): n is a, c, g, or t

SEQ ID NO: 382234 - DNA, 1678 bp, Homo Sapiens; identical to SEQ ID NO: 349245
  misc_feature (141)..(141): n is a, c, g, or t
  misc_feature (233)..(233): n is a, c, g, or t
  misc_feature (876)..(912): n is a, c, g, or t
  misc_feature (1047)..(1058): n is a, c, g, or t

SEQ ID NO: 382235 - DNA, 1793 bp, Homo Sapiens; identical to SEQ ID NO: 349246
  misc_feature (58)..(58): n is a, c, g, or t
  misc_feature (67)..(67): n is a, c, g, or t
  misc_feature (69)..(111): n is a, c, g, or t
  misc_feature (173)..(203): n is a, c, g, or t

SEQ ID NO: 382236 - DNA, 700 bp, Homo Sapiens; identical to SEQ ID NO: 349247
  misc_feature (128)..(223): n is a, c, g, or t

SEQ ID NO: 382237 - DNA, 495 bp, Homo Sapiens; identical to SEQ ID NO: 349248
  misc_feature (26)..(26): n is a, c, g, or t

SEQ ID NO: 382238 - DNA, 603 bp, Homo Sapiens; identical to SEQ ID NO: 349252
  misc_feature (46)..(46): n is a, c, g, or t

SEQ ID NO: 382239 - DNA, 1072 bp, Homo Sapiens; identical to SEQ ID NO: 349253

SEQ ID NO: 382240 - DNA, 423 bp, Homo Sapiens; identical to SEQ ID NO: 349254

SEQ ID NO: 382241 - DNA, 1418 bp, Homo Sapiens; identical to SEQ ID NO: 349255
  misc_feature (82)..(82): n is a, c, g, or t
  misc_feature (1279)..(1279): n is a, c, g, or t
  misc_feature (1339)..(1339): n is a, c, g, or t
  misc_feature (1366)..(1366): n is a, c, g, or t
  misc_feature (1388)..(1388): n is a, c, g, or t
  misc_feature (1408)..(1408): n is a, c, g, or t

SEQ ID NO: 382242 - DNA, 595 bp, Homo Sapiens; identical to SEQ ID NO: 349256

SEQ ID NO: 382243 - DNA, 2376 bp, Homo Sapiens; identical to SEQ ID NO: 349257
  misc_feature (50)..(86): n is a, c, g, or t
  misc_feature (1729)..(1729): n is a, c, g, or t

SEQ ID NO: 382244 - DNA, 1106 bp, Homo Sapiens; identical to SEQ ID NO: 349259
  misc_feature (86)..(86): n is a, c, g, or t
  misc_feature (135)..(135): n is a, c, g, or t

SEQ ID NO: 382245 - DNA, 834 bp, Homo Sapiens; identical to SEQ ID NO: 349260

SEQ ID NO: 382246 - DNA, 1672 bp, Homo Sapiens; identical to SEQ ID NO: 349261
  misc_feature (619)..(710): n is a, c, g, or t
  misc_feature (878)..(1175): n is a, c, g, or t
  misc_feature (1177)..(1187): n is a, c, g, or t
  misc_feature (1259)..(1321): n is a, c, g, or t
  misc_feature (1525)..(1525): n is a, c, g, or t
  misc_feature (1600)..(1600): n is a, c, g, or t

SEQ ID NO: 382247 - DNA, 1172 bp, Homo Sapiens; identical to SEQ ID NO: 349262
  misc_feature (556)..(578): n is a, c, g, or t

SEQ ID NO: 382248 - DNA, 571 bp, Homo Sapiens; identical to SEQ ID NO: 349270

SEQ ID NO: 382249 - DNA, 1240 bp, Homo Sapiens; identical to SEQ ID NO: 349271
  misc_feature (49)..(85): n is a, c, g, or t
  misc_feature (1166)..(1184): n is a, c, g, or t

SEQ ID NO: 382250 - DNA, 2740 bp, Homo Sapiens; identical to SEQ ID NO: 349272
  misc_feature (7)..(7): n is a, c, g, or t
  misc_feature (9)..(9): n is a, c, g, or t
  misc_feature (22)..(22): n is a, c, g, or t
  misc_feature (62)..(63): n is a, c, g, or t
  misc_feature (66)..(66): n is a, c, g, or t
  misc_feature (68)..(69): n is a, c, g, or t
  misc_feature (78)..(78): n is a, c, g, or t
  misc_feature (83)..(83): n is a, c, g, or t
  misc_feature (93)..(93): n is a, c, g, or t
  misc_feature (114)..(114): n is a, c, g, or t
  misc_feature (127)..(127): n is a, c, g, or t
  misc_feature (136)..(136): n is a, c, g, or t
  misc_feature (138)..(138): n is a, c, g, or t
  misc_feature (153)..(153): n is a, c, g, or t
  misc_feature (158)..(158): n is a, c, g, or t
  misc_feature (161)..(161): n is a, c, g, or t
  misc_feature (164)..(205): n is a, c, g, or t
  misc_feature (210)..(210): n is a, c, g, or t
  misc_feature (213)..(213): n is a, c, g, or t
  misc_feature (221)..(221): n is a, c, g, or t
  misc_feature (225)..(225): n is a, c, g, or t
  misc_feature (232)..(305): n is a, c, g, or t
  misc_feature (309)..(310): n is a, c, g, or t
  misc_feature (318)..(318): n is a, c, g, or t
  misc_feature (339)..(339): n is a, c, g, or t
  misc_feature (344)..(344): n is a, c, g, or t
  misc_feature (415)..(415): n is a, c, g, or t
  misc_feature (427)..(447): n is a, c, g, or t
  misc_feature (1201)..(1236): n is a, c, g, or t
  misc_feature (2708)..(2708): n is a, c, g, or t

SEQ ID NO: 382251 - DNA, 1054 bp, Homo Sapiens; identical to SEQ ID NO: 349273

SEQ ID NO: 382252 - DNA, 676 bp, Homo Sapiens; identical to SEQ ID NO: 349274

SEQ ID NO: 382253 - DNA, 2590 bp, Homo Sapiens; identical to SEQ ID NO: 349275
  misc_feature (1786)..(1828): n is a, c, g, or t
  misc_feature (1935)..(2006): n is a, c, g, or t
  misc_feature (2161)..(2161): n is a, c, g, or t
  misc_feature (2544)..(2544): n is a, c, g, or t
  misc_feature (2548)..(2548): n is a, c, g, or t

SEQ ID NO: 382254 - DNA, 838 bp, Homo Sapiens; identical to SEQ ID NO: 349276

SEQ ID NO: 382255 - DNA, 493 bp, Homo Sapiens; identical to SEQ ID NO: 349277

SEQ ID NO: 382256 - DNA, 549 bp, Homo Sapiens; identical to SEQ ID NO: 349278
  misc_feature (124)..(159): n is a, c, g, or t

SEQ ID NO: 382257 - DNA, 1589 bp, Homo Sapiens; identical to SEQ ID NO: 349283
  misc_feature (1091)..(1124): n is a, c, g, or t

SEQ ID NO: 382258 - DNA, 541 bp, Homo Sapiens; identical to SEQ ID NO: 349284

SEQ ID NO: 382259 - DNA, 848 bp, Homo Sapiens; identical to SEQ ID NO: 349286

SEQ ID NO: 382260 - DNA, 728 bp, Homo Sapiens; identical to SEQ ID NO: 349287

SEQ ID NO: 382261 - DNA, 1023 bp, Homo Sapiens; identical to SEQ ID NO: 349288
  misc_feature (340)..(340): n is a, c, g, or t

SEQ ID NO: 382262 - DNA, 449 bp, Homo Sapiens; identical to SEQ ID NO: 349289
  misc_feature (18)..(18): n is a, c, g, or t

SEQ ID NO: 382263 - DNA, 682 bp, Homo Sapiens; identical to SEQ ID NO: 349296
  misc_feature (69)..(69): n is a, c, g, or t
  misc_feature (79)..(79): n is a, c, g, or t
  misc_feature (129)..(129): n is a, c, g, or t

SEQ ID NO: 382264 - DNA, 1242 bp, Homo Sapiens; identical to SEQ ID NO: 349297
  misc_feature (1132)..(1187): n is a, c, g, or t

SEQ ID NO: 382265 - DNA, 363 bp, Homo Sapiens; identical to SEQ ID NO: 349298
  misc_feature (52)..(52): n is a, c, g, or t

SEQ ID NO: 382266 - DNA, 1099 bp, Homo Sapiens; identical to SEQ ID NO: 349300
  misc_feature (928)..(928): n is a, c, g, or t

SEQ ID NO: 382267 - DNA, 1357 bp, Homo Sapiens; identical to SEQ ID NO: 349301
  misc_feature (895)..(907): n is a, c, g, or t
  misc_feature (1027)..(1140): n is a, c, g, or t

SEQ ID NO: 382268 - DNA, 454 bp, Homo Sapiens; identical to SEQ ID NO: 349302

SEQ ID NO: 382269 - DNA, 857 bp, Homo Sapiens; identical to SEQ ID NO: 349308

SEQ ID NO: 382270 - DNA, 2544 bp, Homo Sapiens; identical to SEQ ID NO: 349309
  misc_feature (95)..(103): n is a, c, g, or t
  misc_feature (161)..(161): n is a, c, g, or t
  misc_feature (2460)..(2473): n is a, c, g, or t

SEQ ID NO: 382271 - DNA, 1046 bp, Homo Sapiens; identical to SEQ ID NO: 349311
  misc_feature (11)..(11): n is a, c, g, or t
  misc_feature (659)..(659): n is a, c, g, or t

SEQ ID NO: 382272 - DNA, 977 bp, Homo Sapiens; identical to SEQ ID NO: 349312

SEQ ID NO: 382273 - DNA, 2055 bp, Homo Sapiens; identical to SEQ ID NO: 349316
  misc_feature (51)..(87): n is a, c, g, or t
  misc_feature (252)..(277): n is a, c, g, or t

SEQ ID NO: 382274 - DNA, 310 bp, Homo Sapiens; identical to SEQ ID NO: 349317

SEQ ID NO: 382275 - DNA, 1402 bp, Homo Sapiens; identical to SEQ ID NO: 349322
  misc_feature (345)..(359): n is a, c, g, or t
  misc_feature (378)..(378): n is a, c, g, or t
  misc_feature (981)..(989): n is a, c, g, or t
  misc_feature (1192)..(1200): n is a, c, g, or t

SEQ ID NO: 382276 - DNA, 345 bp, Homo Sapiens; identical to SEQ ID NO: 349323

SEQ ID NO: 382277 - DNA, 525 bp, Homo Sapiens; identical to SEQ ID NO: 349324
  misc_feature (400)..(408): n is a, c, g, or t
  misc_feature (444)..(444): n is a, c, g, or t
  misc_feature (456)..(456): n is a, c, g, or t
  misc_feature (472)..(472): n is a, c, g, or t
  misc_feature (489)..(489): n is a, c, g, or t
  misc_feature (498)..(498): n is a, c, g, or t
  misc_feature (503)..(503): n is a, c, g, or t

SEQ ID NO: 382278 - DNA, 1184 bp, Homo Sapiens; identical to SEQ ID NO: 349332
  misc_feature (1060)..(1060): n is a, c, g, or t
  misc_feature (1065)..(1065): n is a, c, g, or t
  misc_feature (1067)..(1067): n is a, c, g, or t
  misc_feature (1070)..(1070): n is a, c, g, or t
  misc_feature (1077)..(1077): n is a, c, g, or t
  misc_feature (1081)..(1081): n is a, c, g, or t
  misc_feature (1088)..(1088): n is a, c, g, or t
  misc_feature (1095)..(1095): n is a, c, g, or t
  misc_feature (1105)..(1105): n is a, c, g, or t
  misc_feature (1108)..(1108): n is a, c, g, or t
  misc_feature (1113)..(1113): n is a, c, g, or t
  misc_feature (1115)..(1115): n is a, c, g, or t
  misc_feature (1142)..(1142): n is a, c, g, or t
  misc_feature (1164)..(1164): n is a, c, g, or t
  misc_feature (1169)..(1170): n is a, c, g, or t

SEQ ID NO: 382279 - DNA, 905 bp, Homo Sapiens; identical to SEQ ID NO: 349333

SEQ ID NO: 382280 - DNA, 3074 bp, Homo Sapiens; identical to SEQ ID NO: 349340
  misc_feature (1663)..(1663): n is a, c, g, or t
  misc_feature (2639)..(2639): n is a, c, g, or t
  misc_feature (2920)..(2920): n is a, c, g, or t
  misc_feature (2927)..(2927): n is a, c, g, or t
  misc_feature (2971)..(2971): n is a, c, g, or t
  misc_feature (2975)..(2975): n is a, c, g, or t
  misc_feature (3005)..(3005): n is a, c, g, or t
  misc_feature (3013)..(3016): n is a, c, g, or t
  misc_feature (3019)..(3019): n is a, c, g, or t
  misc_feature (3035)..(3036): n is a, c, g, or t

SEQ ID NO: 382281 - DNA, 1450 bp, Homo Sapiens; identical to SEQ ID NO: 349341
  misc_feature (19)..(19): n is a, c, g, or t
  misc_feature (158)..(158): n is a, c, g, or t
  misc_feature (166)..(166): n is a, c, g, or t
  misc_feature (311)..(311): n is a, c, g, or t

SEQ ID NO: 382282 - DNA, 1055 bp, Homo Sapiens; identical to SEQ ID NO: 349342
  misc_feature (897)..(897): n is a, c, g, or t

SEQ ID NO: 382283 - DNA, 930 bp, Homo Sapiens; identical to SEQ ID NO: 349344

SEQ ID NO: 382284 - DNA, 225 bp, Homo Sapiens; identical to SEQ ID NO: 349345

SEQ ID NO: 382285 - DNA, 3164 bp, Homo Sapiens; identical to SEQ ID NO: 349346

SEQ ID NO: 382286 - DNA, 660 bp, Homo Sapiens; identical to SEQ ID NO: 349347
  misc_feature (287)..(287): n is a, c, g, or t
  misc_feature (319)..(319): n is a, c, g, or t

SEQ ID NO: 382287 - DNA, 778 bp, Homo Sapiens; identical to SEQ ID NO: 349351
  misc_feature (744)..(744): n is a, c, g, or t

SEQ ID NO: 382288 - DNA, 846 bp, Homo Sapiens; identical to SEQ ID NO: 349352

SEQ ID NO: 382289 - DNA, 1866 bp, Homo Sapiens; identical to SEQ ID NO: 349358
  misc_feature (1587)..(1690): n is a, c, g, or t
  misc_feature (1707)..(1770): n is a, c, g, or t

SEQ ID NO: 382290 - DNA, 863 bp, Homo Sapiens; identical to SEQ ID NO: 349359
  misc_feature (555)..(595): n is a, c, g, or t

SEQ ID NO: 382291 - DNA, 538 bp, Homo Sapiens; identical to SEQ ID NO: 349360
  misc_feature (390)..(430): n is a, c, g, or t

SEQ ID NO: 382292 - DNA, 300 bp, Homo Sapiens; identical to SEQ ID NO: 349364
  misc_feature (81)..(81): n is a, c, g, or t
  misc_feature (101)..(147): n is a, c, g, or t
  misc_feature (157)..(157): n is a, c, g, or t
  misc_feature (167)..(167): n is a, c, g, or t
  misc_feature (220)..(220): n is a, c, g, or t
  misc_feature (258)..(258): n is a, c, g, or t

SEQ ID NO: 382293 - DNA, 2227 bp, Homo Sapiens; identical to SEQ ID NO: 349365
  misc_feature (175)..(215): n is a, c, g, or t

SEQ ID NO: 382294 - DNA, 1748 bp, Homo Sapiens; identical to SEQ ID NO: 349366
  misc_feature (1622)..(1668): n is a, c, g, or t

SEQ ID NO: 382295 - DNA, 402 bp, Homo Sapiens; identical to SEQ ID NO: 349367
  misc_feature (213)..(273): n is a, c, g, or t
  misc_feature (363)..(363): n is a, c, g, or t

SEQ ID NO: 382296 - DNA, 1925 bp, Homo Sapiens; identical to SEQ ID NO: 349368
  misc_feature (1457)..(1517): n is a, c, g, or t
  misc_feature (1725)..(1771): n is a, c, g, or t

SEQ ID NO: 382297 - DNA, 2419 bp, Homo Sapiens; identical to SEQ ID NO: 349374
  misc_feature (1145)..(1145): n is a, c, g, or t
  misc_feature (1501)..(1501): n is a, c, g, or t
  misc_feature (1591)..(1591): n is a, c, g, or t
  misc_feature (2209)..(2209): n is a, c, g, or t
  misc_feature (2212)..(2365): n is a, c, g, or t

SEQ ID NO: 382298 - DNA, 854 bp, Homo Sapiens; identical to SEQ ID NO: 349375

SEQ ID NO: 382299 - DNA, 940 bp, Homo Sapiens; identical to SEQ ID NO: 349377

SEQ ID NO: 382300 - DNA, 183 bp, Homo Sapiens; identical to SEQ ID NO: 349378

SEQ ID NO: 382301 - DNA, 863 bp, Homo Sapiens; identical to SEQ ID NO: 349379
  misc_feature (744)..(798): n is a, c, g, or t

SEQ ID NO: 382302 - DNA, 437 bp, Homo Sapiens; identical to SEQ ID NO: 349380
  misc_feature (62)..(62): n is a, c, g, or t

SEQ ID NO: 382303 - DNA, 1326 bp, Homo Sapiens; identical to SEQ ID NO: 349382
  misc_feature (27)..(27): n is a, c, g, or t
  misc_feature (64)..(64): n is a, c, g, or t
  misc_feature (68)..(68): n is a, c, g, or t
  misc_feature (147)..(147): n is a, c, g, or t
  misc_feature (573)..(608): n is a, c, g, or t
  misc_feature (804)..(825): n is a, c, g, or t

SEQ ID NO: 382304 - DNA, 826 bp, Homo Sapiens; identical to SEQ ID NO: 349383
  misc_feature (207)..(207): n is a, c, g, or t
  misc_feature (482)..(504): n is a, c, g, or t
  misc_feature (700)..(735): n is a, c, g, or t

SEQ ID NO: 382305 - DNA, 1053 bp, Homo Sapiens; identical to SEQ ID NO: 349385

SEQ ID NO: 382306 - DNA, 481 bp, Homo Sapiens; identical to SEQ ID NO: 349386

SEQ ID NO: 382307 - DNA, 575 bp, Homo Sapiens; identical to SEQ ID NO: 349387
  misc_feature (561)..(561): n is a, c, g, or t

SEQ ID NO: 382308 - DNA, 2963 bp, Homo Sapiens; identical to SEQ ID NO: 349391
  misc_feature (3)..(3): n is a, c, g, or t
  misc_feature (5)..(5): n is a, c, g, or t
  misc_feature (7)..(7): n is a, c, g, or t
  misc_feature (9)..(9): n is a, c, g, or t
  misc_feature (32)..(32): n is a, c, g, or t
  misc_feature (53)..(53): n is a, c, g, or t
  misc_feature (58)..(58): n is a, c, g, or t
  misc_feature (63)..(63): n is a, c, g, or t
  misc_feature (70)..(70): n is a, c, g, or t
  misc_feature (72)..(74): n is a, c, g, or t
  misc_feature (80)..(80): n is a, c, g, or t
  misc_feature (82)..(82): n is a, c, g, or t
  misc_feature (108)..(109): n is a, c, g, or t
  misc_feature (124)..(124): n is a, c, g, or t
  misc_feature (135)..(135): n is a, c, g, or t
  misc_feature (139)..(139): n is a, c, g, or t
  misc_feature (2177)..(2193): n is a, c, g, or t

SEQ ID NO: 382309 - DNA, 993 bp, Homo Sapiens; identical to SEQ ID NO: 349392
  misc_feature (635)..(648): n is a, c, g, or t
  misc_feature (869)..(869): n is a, c, g, or t
  misc_feature (874)..(874): n is a, c, g, or t
  misc_feature (912)..(912): n is a, c, g, or t
  misc_feature (932)..(932): n is a, c, g, or t
  misc_feature (939)..(939): n is a, c, g, or t
  misc_feature (957)..(957): n is a, c, g, or t
  misc_feature (974)..(974): n is a, c, g, or t

SEQ ID NO: 382310 - DNA, 644 bp, Homo Sapiens; identical to SEQ ID NO: 349393

SEQ ID NO: 382311 - DNA, 1539 bp, Homo Sapiens; identical to SEQ ID NO: 349394

SEQ ID NO: 382312 - DNA, 227 bp, Homo Sapiens; identical to SEQ ID NO: 349395

SEQ ID NO: 382313 - DNA, 2418 bp, Homo Sapiens; identical to SEQ ID NO: 349399
  misc_feature (1896)..(1985): n is a, c, g, or t
  misc_feature (1990)..(1998): n is a, c, g, or t
  misc_feature (2005)..(2060): n is a, c, g, or t

SEQ ID NO: 382314 - DNA, 711 bp, Homo Sapiens; identical to SEQ ID NO: 349400

SEQ ID NO: 382315 - DNA, 2625 bp, Homo Sapiens; identical to SEQ ID NO: 349401
  misc_feature (29)..(29): n is a, c, g, or t
  misc_feature (36)..(36): n is a, c, g, or t
  misc_feature (356)..(471): n is a, c, g, or t
  misc_feature (2147)..(2147): n is a, c, g, or t
  misc_feature (2189)..(2190): n is a, c, g, or t

SEQ ID NO: 382316 - DNA, 919 bp, Homo Sapiens; identical to SEQ ID NO: 349402
  misc_feature (427)..(436): n is a, c, g, or t
  misc_feature (461)..(479): n is a, c, g, or t

SEQ ID NO: 382317 - DNA, 1029 bp, Homo Sapiens; identical to SEQ ID NO: 349403
  misc_feature (455)..(570): n is a, c, g, or t
  misc_feature (863)..(863): n is a, c, g, or t
  misc_feature (893)..(893): n is a, c, g, or t
  misc_feature (917)..(917): n is a, c, g, or t
  misc_feature (919)..(919): n is a, c, g, or t
  misc_feature (924)..(924): n is a, c, g, or t
  misc_feature (929)..(929): n is a, c, g, or t
  misc_feature (954)..(954): n is a, c, g, or t
  misc_feature (959)..(959): n is a, c, g, or t
  misc_feature (963)..(963): n is a, c, g, or t
  misc_feature (977)..(977): n is a, c, g, or t
  misc_feature (991)..(991): n is a, c, g, or t
  misc_feature (994)..(994): n is a, c, g, or t
  misc_feature (1005)..(1005): n is a, c, g, or t
  misc_feature (1017)..(1017): n is a, c, g, or t
  misc_feature (1020)..(1020): n is a, c, g, or t
  misc_feature (1025)..(1025): n is a, c, g, or t

SEQ ID NO: 382318 - DNA, 1047 bp, Homo Sapiens; identical to SEQ ID NO: 349404
  misc_feature (364)..(479): n is a, c, g, or t
  misc_feature (543)..(543): n is a, c, g, or t
  misc_feature (990)..(990): n is a, c, g, or t
  misc_feature (995)..(995): n is a, c, g, or t
  misc_feature (1013)..(1013): n is a, c, g, or t
  misc_feature (1017)..(1017): n is a, c, g, or t
  misc_feature (1021)..(1021): n is a, c, g, or t
  misc_feature (1030)..(1030): n is a, c, g, or t
  misc_feature (1044)..(1044): n is a, c, g, or t

SEQ ID NO: 382319 - DNA, 1280 bp, Homo Sapiens; identical to SEQ ID NO: 349405
  misc_feature (44)..(44): n is a, c, g, or t
  misc_feature (52)..(52): n is a, c, g, or t
  misc_feature (54)..(54): n is a, c, g, or t
  misc_feature (196)..(196): n is a, c, g, or t
  misc_feature (304)..(304): n is a, c, g, or t
  misc_feature (307)..(307): n is a, c, g, or t
  misc_feature (366)..(479): n is a, c, g, or t
  misc_feature (1070)..(1070): n is a, c, g, or t
  misc_feature (1120)..(1120): n is a, c, g, or t
  misc_feature (1134)..(1134): n is a, c, g, or t
  misc_feature (1146)..(1146): n is a, c, g, or t
  misc_feature (1166)..(1166): n is a, c, g, or t
  misc_feature (1216)..(1216): n is a, c, g, or t
  misc_feature (1223)..(1223): n is a, c, g, or t
  misc_feature (1238)..(1238): n is a, c, g, or t

SEQ ID NO: 382320 - DNA, 807 bp, Homo Sapiens; identical to SEQ ID NO: 349406
  misc_feature (429)..(544): n is a, c, g, or t

SEQ ID NO: 382321 - DNA, 417 bp, Homo Sapiens; identical to SEQ ID NO: 349407
  misc_feature (42)..(42): n is a, c, g, or t

SEQ ID NO: 382322 - DNA, 461 bp, Homo Sapiens; identical to SEQ ID NO: 349408
  misc_feature (21)..(21): n is a, c, g, or t
  misc_feature (27)..(27): n is a, c, g, or t
  misc_feature (66)..(66): n is a, c, g, or t

SEQ ID NO: 382323 - DNA, 919 bp, Homo Sapiens; identical to SEQ ID NO: 349409
  misc_feature (28)..(28): n is a, c, g, or t
  misc_feature (199)..(251): n is a, c, g, or t
  misc_feature (781)..(781): n is a, c, g, or t

SEQ ID NO: 382324 - DNA, 1994 bp, Homo Sapiens; identical to SEQ ID NO: 349410
  misc_feature (1336)..(1336): n is a, c, g, or t
  misc_feature (1909)..(1909): n is a, c, g, or t
  misc_feature (1911)..(1911): n is a, c, g, or t

SEQ ID NO: 382325 - DNA, 1322 bp, Homo Sapiens; identical to SEQ ID NO: 349414
  misc_feature (163)..(163): n is a, c, g, or t
  misc_feature (355)..(378): n is a, c, g, or t
  misc_feature (778)..(800): n is a, c, g, or t
  misc_feature (1140)..(1206): n is a, c, g, or t
  misc_feature (1238)..(1249): n is a, c, g, or t

SEQ ID NO: 382326 - DNA, 534 bp, Homo Sapiens; identical to SEQ ID NO: 349415
  misc_feature (276)..(293): n is a, c, g, or t
  misc_feature (372)..(372): n is a, c, g, or t
  misc_feature (465)..(465): n is a, c, g, or t
  misc_feature (518)..(518): n is a, c, g, or t

SEQ ID NO: 382327 - DNA, 1097 bp, Homo Sapiens; identical to SEQ ID NO: 349416
  misc_feature (245)..(245): n is a, c, g, or t

SEQ ID NO: 382328 - DNA, 774 bp, Homo Sapiens; identical to SEQ ID NO: 349417
  misc_feature (754)..(754): n is a, c, g, or t

SEQ ID NO: 382329 - DNA, 2819 bp, Homo Sapiens; identical to SEQ ID NO: 349424
  misc_feature (1935)..(1945): n is a, c, g, or t

SEQ ID NO: 382330 - DNA, 423 bp, Homo Sapiens; identical to SEQ ID NO: 349425
  misc_feature (21)..(21): n is a, c, g, or t
  misc_feature (46)..(46): n is a, c, g, or t

SEQ ID NO: 382331 - DNA, 1619 bp, Homo Sapiens; identical to SEQ ID NO: 349426

SEQ ID NO: 382332 - DNA, 345 bp, Homo Sapiens; identical to SEQ ID NO: 349427
  misc_feature (63)..(63): n is a, c, g, or t

SEQ ID NO: 382333 - DNA, 499 bp, Homo Sapiens; identical to SEQ ID NO: 349430

SEQ ID NO: 382334 - DNA, 819 bp, Homo Sapiens; identical to SEQ ID NO: 349431
  misc_feature (693)..(732): n is a, c, g, or t

SEQ ID NO: 382335 - DNA, 1392 bp, Homo Sapiens; identical to SEQ ID NO: 349437
  misc_feature (46)..(46): n is a, c, g, or t
  misc_feature (1294)..(1331): n is a, c, g, or t

SEQ ID NO: 382336 - DNA, 946 bp, Homo Sapiens; identical to SEQ ID NO: 349438
  misc_feature (26)..(26): n is a, c, g, or t
  misc_feature (893)..(893): n is a, c, g, or t

SEQ ID NO: 382337 - DNA, 2157 bp, Homo Sapiens; identical to SEQ ID NO: 349439
  misc_feature (61)..(61): n is a, c, g, or t

SEQ ID NO: 382338 - DNA, 5166 bp, Homo Sapiens; identical to SEQ ID NO: 349440
  misc_feature (5108)..(5126): n is a, c, g, or t

SEQ ID NO: 382339 - DNA, 1467 bp, Homo Sapiens; identical to SEQ ID NO: 349445

SEQ ID NO: 382340 - DNA, 2300 bp, Homo Sapiens; identical to SEQ ID NO: 349446
  misc_feature (13)..(13): n is a, c, g, or t
  misc_feature (1416)..(1430): n is a, c, g, or t
  misc_feature (1522)..(1572): n is a, c, g, or t
  misc_feature (1603)..(1660): n is a, c, g, or t
  misc_feature (1781)..(1790): n is a, c, g, or t
  misc_feature (1816)..(1824): n is a, c, g, or t

SEQ ID NO: 382341 - DNA, 719 bp, Homo Sapiens; identical to SEQ ID NO: 349451
  misc_feature (481)..(481): n is a, c, g, or t

SEQ ID NO: 382342 - DNA, 1284 bp, Homo Sapiens; identical to SEQ ID NO: 349452

SEQ ID NO: 382343 - DNA, 2700 bp, Homo Sapiens; identical to SEQ ID NO: 349453
  misc_feature (145)..(145): n is a, c, g, or t

SEQ ID NO: 382344 - DNA, 615 bp, Homo Sapiens; identical to SEQ ID NO: 349454
  misc_feature (14)..(14): n is a, c, g, or t
  misc_feature (51)..(51): n is a, c, g, or t
  misc_feature (378)..(392): n is a, c, g, or t

SEQ ID NO: 382345 - DNA, 1815 bp, Homo Sapiens; identical to SEQ ID NO: 349455

SEQ ID NO: 382346 - DNA, 1302 bp, Homo Sapiens; identical to SEQ ID NO: 349456
  misc_feature (775)..(775): n is a, c, g, or t

SEQ ID NO: 382347 - DNA, 416 bp, Homo Sapiens; identical to SEQ ID NO: 349459
  misc_feature (18)..(18): n is a, c, g, or t

SEQ ID NO: 382348 - DNA, 150 bp, Homo Sapiens; identical to SEQ ID NO: 349460

SEQ ID NO: 382349 - DNA, 867 bp, Homo Sapiens; identical to SEQ ID NO: 349466
  misc_feature (413)..(413): n is a, c, g, or t

SEQ ID NO: 382350 - DNA, 1384 bp, Homo Sapiens; identical to SEQ ID NO: 349467
  misc_feature (1273)..(1273): n is a, c, g, or t
  misc_feature (1328)..(1328): n is a, c, g, or t

SEQ ID NO: 382351 - DNA, 864 bp, Homo Sapiens; identical to SEQ ID NO: 349473
  misc_feature (156)..(196): n is a, c, g, or t

SEQ ID NO: 382352 - DNA, 498 bp, Homo Sapiens; identical to SEQ ID NO: 349474
  misc_feature (170)..(210): n is a, c, g, or t

SEQ ID NO: 382353 - DNA, 2086 bp, Homo Sapiens; identical to SEQ ID NO: 349476
  misc_feature (488)..(506): n is a, c, g, or t
  misc_feature (1313)..(1313): n is a, c, g, or t

SEQ ID NO: 382354 - DNA, 495 bp, Homo Sapiens; identical to SEQ ID NO: 349477

SEQ ID NO: 382355 - DNA, 1129 bp, Homo Sapiens; identical to SEQ ID NO: 349480
  misc_feature (15)..(15): n is a, c, g, or t
  misc_feature (91)..(91): n is a, c, g, or t

SEQ ID NO: 382356 - DNA, 1839 bp, Homo Sapiens; identical to SEQ ID NO: 349481

SEQ ID NO: 382357 - DNA, 848 bp, Homo Sapiens; identical to SEQ ID NO: 349482

SEQ ID NO: 382358 - DNA, 1311 bp, Homo Sapiens; identical to SEQ ID NO: 349483

SEQ ID NO: 382359 - DNA, 828 bp, Homo Sapiens; identical to SEQ ID NO: 349484

SEQ ID NO: 382360 - DNA, 1345 bp, Homo Sapiens; identical to SEQ ID NO: 349496
  misc_feature (1328)..(1328): n is a, c, g, or t

SEQ ID NO: 382361 - DNA, 417 bp, Homo Sapiens; identical to SEQ ID NO: 349497
  misc_feature (16)..(16): n is a, c, g, or t
  misc_feature (21)..(21): n is a, c, g, or t
  misc_feature (39)..(39): n is a, c, g, or t
  misc_feature (47)..(47): n is a, c, g, or t
  misc_feature (91)..(91): n is a, c, g, or t
  misc_feature (97)..(97): n is a, c, g, or t
  misc_feature (118)..(118): n is a, c, g, or t
  misc_feature (131)..(131): n is a, c, g, or t
  misc_feature (159)..(159): n is a, c, g, or t
  misc_feature (235)..(235): n is a, c, g, or t

SEQ ID NO: 382362 - DNA, 928 bp, Homo Sapiens; identical to SEQ ID NO: 349498
  misc_feature (24)..(24): n is a, c, g, or t

SEQ ID NO: 382363 - DNA, 858 bp, Homo Sapiens; identical to SEQ ID NO: 349499
  misc_feature (348)..(376): n is a, c, g, or t
  misc_feature (558)..(768): n is a, c, g, or t

SEQ ID NO: 382364 - DNA, 878 bp, Homo Sapiens; identical to SEQ ID NO: 349511
  misc_feature (807)..(817): n is a, c, g, or t

SEQ ID NO: 382365 - DNA, 589 bp, Homo Sapiens; identical to SEQ ID NO: 349512
  misc_feature (469)..(469): n is a, c, g, or t
  misc_feature (479)..(479): n is a, c, g, or t
  misc_feature (530)..(530): n is a, c, g, or t
  misc_feature (552)..(552): n is a, c, g, or t

SEQ ID NO: 382366 - DNA, 2016 bp, Homo Sapiens; identical to SEQ ID NO: 349514

SEQ ID NO: 382367 - DNA, 854 bp, Homo Sapiens; identical to SEQ ID NO: 349515

SEQ ID NO: 382368 - DNA, 823 bp, Homo Sapiens; identical to SEQ ID NO: 349516
  misc_feature (121)..(208): n is a, c, g, or t

SEQ ID NO: 382369 - DNA, 689 bp, Homo Sapiens; identical to SEQ ID NO: 349519
  misc_feature (153)..(186): n is a, c, g, or t

SEQ ID NO: 382370 - DNA, 714 bp, Homo Sapiens; identical to SEQ ID NO: 349520
  misc_feature (536)..(536): n is a, c, g, or t

SEQ ID NO: 382371 - DNA, 1202 bp, Homo Sapiens; identical to SEQ ID NO: 349521
  misc_feature (165)..(211): n is a, c, g, or t
  misc_feature (1172)..(1172): n is a, c, g, or t

SEQ ID NO: 382372 - DNA, 1064 bp, Homo Sapiens; identical to SEQ ID NO: 349523
  misc_feature (7)..(7): n is a, c, g, or t
  misc_feature (15)..(15): n is a, c, g, or t
  misc_feature (21)..(21): n is a, c, g, or t
  misc_feature (24)..(24): n is a, c, g, or t
  misc_feature (35)..(35): n is a, c, g, or t
  misc_feature (37)..(37): n is a, c, g, or t
  misc_feature (40)..(40): n is a, c, g, or t
  misc_feature (48)..(48): n is a, c, g, or t
  misc_feature (50)..(50): n is a, c, g, or t
  misc_feature (52)..(52): n is a, c, g, or t
  misc_feature (55)..(55): n is a, c, g, or t
  misc_feature (59)..(60): n is a, c, g, or t
  misc_feature (63)..(63): n is a, c, g, or t
  misc_feature (75)..(75): n is a, c, g, or t
  misc_feature (85)..(85): n is a, c, g, or t
  misc_feature (88)..(88): n is a, c, g, or t
  misc_feature (92)..(92): n is a, c, g, or t
  misc_feature (102)..(102): n is a, c, g, or t
  misc_feature (104)..(104): n is a, c, g, or t
  misc_feature (106)..(107): n is a, c, g, or t
  misc_feature (132)..(132): n is a, c, g, or t
  misc_feature (143)..(144): n is a, c, g, or t
  misc_feature (150)..(150): n is a, c, g, or t
  misc_feature (158)..(158): n is a, c, g, or t
  misc_feature (161)..(161): n is a, c, g, or t
  misc_feature (171)..(171): n is a, c, g, or t
  misc_feature (176)..(177): n is a, c, g, or t
  misc_feature (289)..(317): n is a, c, g, or t

SEQ ID NO: 382373 - DNA, 1136 bp, Homo Sapiens; identical to SEQ ID NO: 349524

SEQ ID NO: 382374 - DNA, 555 bp, Homo Sapiens; identical to SEQ ID NO: 349525

SEQ ID NO: 382375 - DNA, 1722 bp, Homo Sapiens; identical to SEQ ID NO: 349526
  misc_feature (1569)..(1599): n is a, c, g, or t

SEQ ID NO: 382376 - DNA, 544 bp, Homo Sapiens; identical to SEQ ID NO: 349527
  misc_feature (409)..(409): n is a, c, g, or t
  misc_feature (476)..(476): n is a, c, g, or t
  misc_feature (502)..(502): n is a, c, g, or t
  misc_feature (510)..(510): n is a, c, g, or t
  misc_feature (524)..(524): n is a, c, g, or t
  misc_feature (531)..(531): n is a, c, g, or t

SEQ ID NO: 382377 - DNA, 1179 bp, Homo Sapiens; identical to SEQ ID NO: 349530

SEQ ID NO: 382378 - DNA, 1081 bp, Homo Sapiens; identical to SEQ ID NO: 349531

SEQ ID NO: 382379 - DNA, 686 bp, Homo Sapiens; identical to SEQ ID NO: 349532
  misc_feature (32)..(32): n is a, c, g, or t
  misc_feature (121)..(121): n is a, c, g, or t
  misc_feature (126)..(126): n is a, c, g, or t

SEQ ID NO: 382380 - DNA, 506 bp, Homo Sapiens; identical to SEQ ID NO: 349533

SEQ ID NO: 382381 - DNA, 1367 bp, Homo Sapiens; identical to SEQ ID NO: 349534
  misc_feature (335)..(335): n is a, c, g, or t

SEQ ID NO: 382382 - DNA, 1105 bp, Homo Sapiens; identical to SEQ ID NO: 349535
  misc_feature (983)..(983): n is a, c, g, or t
  misc_feature (986)..(986): n is a, c, g, or t
  misc_feature (988)..(988): n is a, c, g, or t
  misc_feature (990)..(992): n is a, c, g, or t
  misc_feature (994)..(994): n is a, c, g, or t
  misc_feature (996)..(1003): n is a, c, g, or t
  misc_feature (1005)..(1015): n is a, c, g, or t

SEQ ID NO: 382383 - DNA, 870 bp, Homo Sapiens; identical to SEQ ID NO: 349536

SEQ ID NO: 382384 - DNA, 1631 bp, Homo Sapiens; identical to SEQ ID NO: 349537
  misc_feature (1236)..(1236): n is a, c, g, or t
  misc_feature (1575)..(1575): n is a, c, g, or t
  misc_feature (1584)..(1584): n is a, c, g, or t
  misc_feature (1619)..(1619): n is a, c, g, or t
  misc_feature (1626)..(1626): n is a, c, g, or t

SEQ ID NO: 382385 - DNA, 513 bp, Homo Sapiens; identical to SEQ ID NO: 349538
  misc_feature (27)..(27): n is a, c, g, or t
  misc_feature (39)..(39): n is a, c, g, or t

SEQ ID NO: 382386 - DNA, 754 bp, Homo Sapiens; identical to SEQ ID NO: 349539

SEQ ID NO: 382387 - DNA, 953 bp, Homo Sapiens; identical to SEQ ID NO: 349540

SEQ ID NO: 382388 - DNA, 1538 bp, Homo Sapiens; identical to SEQ ID NO: 349541
  misc_feature (518)..(530): n is a, c, g, or t

SEQ ID NO: 382389 - DNA, 296 bp, Homo Sapiens; identical to SEQ ID NO: 349542

SEQ ID NO: 382390 - DNA, 1393 bp, Homo Sapiens; identical to SEQ ID NO: 349544
  misc_feature (248)..(248): n is a, c, g, or t
  misc_feature (451)..(451): n is a, c, g, or t
  misc_feature (1029)..(1029): n is a, c, g, or t
  misc_feature (1039)..(1039): n is a, c, g, or t
  misc_feature (1041)..(1041): n is a, c, g, or t
  misc_feature (1048)..(1048): n is a, c, g, or t
  misc_feature (1063)..(1064): n is a, c, g, or t
  misc_feature (1080)..(1080): n is a, c, g, or t

SEQ ID NO: 382391 - DNA, 395 bp, Homo Sapiens; identical to SEQ ID NO: 349545

SEQ ID NO: 382392 - DNA, 844 bp, Homo Sapiens; identical to SEQ ID NO: 349548

SEQ ID NO: 382393 - DNA, 398 bp, Homo Sapiens; identical to SEQ ID NO: 349549

SEQ ID NO: 382394 - DNA, 445 bp, Homo Sapiens; identical to SEQ ID NO: 349555
  misc_feature (148)..(148): n is a, c, g, or t

SEQ ID NO: 382395 - DNA, 407 bp, Homo Sapiens; identical to SEQ ID NO: 349556
  misc_feature (353)..(353): n is a, c, g, or t

SEQ ID NO: 382396 - DNA, 988 bp, Homo Sapiens; identical to SEQ ID NO: 349557
  misc_feature (796)..(796): n is a, c, g, or t

SEQ ID NO: 382397 - DNA, 3690 bp, Homo Sapiens; identical to SEQ ID NO: 349558
  misc_feature (3440)..(3440): n is a, c, g, or t
  misc_feature (3540)..(3540): n is a, c, g, or t
  misc_feature (3614)..(3614): n is a, c, g, or t
  misc_feature (3617)..(3617): n is a, c, g, or t

SEQ ID NO: 382398 - DNA, 1498 bp, Homo Sapiens; identical to SEQ ID NO: 349559
  misc_feature (858)..(912): n is a, c, g, or t
  misc_feature (962)..(971): n is a, c, g, or t
  misc_feature (1150)..(1201): n is a, c, g, or t

SEQ ID NO: 382399 - DNA, 820 bp, Homo Sapiens; identical to SEQ ID NO: 349560

SEQ ID NO: 382400 - DNA, 454 bp, Homo Sapiens; identical to SEQ ID NO: 258334

SEQ ID NO: 382401 - DNA, 1029 bp, Homo Sapiens; identical to SEQ ID NO: 349562

SEQ ID NO: 382402 - DNA, 984 bp, Homo Sapiens; identical to SEQ ID NO: 349563
  misc_feature (879)..(879): n is a, c, g, or t
  misc_feature (892)..(892): n is a, c, g, or t
  misc_feature (916)..(916): n is a, c, g, or t
  misc_feature (949)..(949): n is a, c, g, or t
  misc_feature (961)..(961): n is a, c, g, or t
  misc_feature (968)..(968): n is a, c, g, or t

SEQ ID NO: 382403 - DNA, 957 bp, Homo Sapiens; identical to SEQ ID NO: 349564

SEQ ID NO: 382404 - DNA, 996 bp, Homo Sapiens; identical to SEQ ID NO: 349565
  misc_feature (684)..(742): n is a, c, g, or t

SEQ ID NO: 382405 - DNA, 765 bp, Homo Sapiens; identical to SEQ ID NO: 349566

SEQ ID NO: 382406 - DNA, 937 bp, Homo Sapiens; identical to SEQ ID NO: 349570
  misc_feature (52)..(88): n is a, c, g, or t

SEQ ID NO: 382407 - DNA, 1105 bp, Homo Sapiens; identical to SEQ ID NO: 349571
  misc_feature (372)..(429): n is a, c, g, or t

SEQ ID NO: 382408 - DNA, 1590 bp, Homo Sapiens; identical to SEQ ID NO: 349572
  misc_feature (49)..(67): n is a, c, g, or t
  misc_feature (1014)..(1044): n is a, c, g, or t

SEQ ID NO: 382409 - DNA, 1034 bp, Homo Sapiens; identical to SEQ ID NO: 349573
  misc_feature (937)..(947): n is a, c, g, or t

SEQ ID NO: 382410 - DNA, 1154 bp, Homo Sapiens; identical to SEQ ID NO: 349574
  misc_feature (870)..(910): n is a, c, g, or t
  misc_feature (1072)..(1108): n is a, c, g, or t

SEQ ID NO: 382411 - DNA, 1054 bp, Homo Sapiens; identical to SEQ ID NO: 349575
  misc_feature (265)..(265): n is a, c, g, or t
  misc_feature (356)..(356): n is a, c, g, or t

SEQ ID NO: 382412 - DNA, 947 bp, Homo Sapiens; identical to SEQ ID NO: 349576

SEQ ID NO: 382413 - DNA, 1943 bp, Homo Sapiens; identical to SEQ ID NO: 349577

SEQ ID NO: 382414 - DNA, 3232 bp, Homo Sapiens; identical to SEQ ID NO: 349578
  misc_feature (161)..(201): n is a, c, g, or t
  misc_feature (1979)..(2028): n is a, c, g, or t

SEQ ID NO: 382415 - DNA, 477 bp, Homo Sapiens; identical to SEQ ID NO: 349579

SEQ ID NO: 382416 - DNA, 1867 bp, Homo Sapiens; identical to SEQ ID NO: 349582
  misc_feature (506)..(506): n is a, c, g, or t
  misc_feature (509)..(509): n is a, c, g, or t
  misc_feature (511)..(511): n is a, c, g, or t
  misc_feature (520)..(520): n is a, c, g, or t
  misc_feature (599)..(599): n is a, c, g, or t
  misc_feature (604)..(604): n is a, c, g, or t
  misc_feature (626)..(626): n is a, c, g, or t
  misc_feature (640)..(640): n is a, c, g, or t
  misc_feature (679)..(679): n is a, c, g, or t
  misc_feature (776)..(776): n is a, c, g, or t

SEQ ID NO: 382417 - DNA, 828 bp, Homo Sapiens; identical to SEQ ID NO: 349583

SEQ ID NO: 382418 - DNA, 701 bp, Homo Sapiens; identical to SEQ ID NO: 349584

SEQ ID NO: 382419 - DNA, 326 bp, Homo Sapiens; identical to SEQ ID NO: 349585

SEQ ID NO: 382420 - DNA, 825 bp, Homo Sapiens; identical to SEQ ID NO: 349586
  misc_feature (696)..(696): n is a, c, g, or t
  misc_feature (701)..(701): n is a, c, g, or t
  misc_feature (704)..(704): n is a, c, g, or t
  misc_feature (707)..(707): n is a, c, g, or t
  misc_feature (715)..(715): n is a, c, g, or t
  misc_feature (722)..(722): n is a, c, g, or t
  misc_feature (725)..(725): n is a, c, g, or t
  misc_feature (728)..(728): n is a, c, g, or t

SEQ ID NO: 382421 - DNA, 2536 bp, Homo Sapiens; identical to SEQ ID NO: 349589
  misc_feature (2533)..(2533): n is a, c, g, or t

SEQ ID NO: 382422 - DNA, 685 bp, Homo Sapiens; identical to SEQ ID NO: 349590
  misc_feature (77)..(77): n is a, c, g, or t
  misc_feature (80)..(80): n is a, c, g, or t

SEQ ID NO: 382423 - DNA, 1798 bp, Homo Sapiens; identical to SEQ ID NO: 349592
  misc_feature (1695)..(1695): n is a, c, g, or t
  misc_feature (1748)..(1748): n is a, c, g, or t
  misc_feature (1784)..(1784): n is a, c, g, or t

SEQ ID NO: 382424 - DNA, 606 bp, Homo Sapiens; identical to SEQ ID NO: 349593
  misc_feature (546)..(546): n is a, c, g, or t
  misc_feature (578)..(578): n is a, c, g, or t
  misc_feature (591)..(591): n is a, c, g, or t

SEQ ID NO: 382425 - DNA, 400 bp, Homo Sapiens; identical to SEQ ID NO: 349594
  misc_feature (386)..(386): n is a, c, g, or t

SEQ ID NO: 382426 - DNA, 1187 bp, Homo Sapiens; identical to SEQ ID NO: 349597

SEQ ID NO: 382427 - DNA, 439 bp, Homo Sapiens; identical to SEQ ID NO: 349598
  misc_feature (11)..(11): n is a, c, g, or t
  misc_feature (22)..(22): n is a, c, g, or t
  misc_feature (40)..(40): n is a, c, g, or t
  misc_feature (67)..(67): n is a, c, g, or t

SEQ ID NO: 382428 - DNA, 464 bp, Homo Sapiens; identical to SEQ ID NO: 349601
  misc_feature (290)..(344): n is a, c, g, or t

SEQ ID NO: 382429 - DNA, 486 bp, Homo Sapiens; identical to SEQ ID NO: 349602
  misc_feature (77)..(133): n is a, c, g, or t

SEQ ID NO: 382430 - DNA, 1456 bp, Homo Sapiens; identical to SEQ ID NO: 349606
  misc_feature (43)..(79): n is a, c, g, or t

SEQ ID NO: 382431 - DNA, 1283 bp, Homo Sapiens; identical to SEQ ID NO: 349607
  misc_feature (1179)..(1179): n is a, c, g, or t
  misc_feature (1216)..(1216): n is a, c, g, or t

SEQ ID NO: 382432 - DNA, 2867 bp, Homo Sapiens; identical to SEQ ID NO: 349610
  misc_feature (157)..(158): n is a, c, g, or t
  misc_feature (175)..(175): n is a, c, g, or t
  misc_feature (182)..(182): n is a, c, g, or t
  misc_feature (199)..(256): n is a, c, g, or t
  misc_feature (289)..(289): n is a, c, g, or t
  misc_feature (296)..(296): n is a, c, g, or t
  misc_feature (300)..(300): n is a, c, g, or t
  misc_feature (311)..(311): n is a, c, g, or t
  misc_feature (342)..(342): n is a, c, g, or t
  misc_feature (442)..(442): n is a, c, g, or t
  misc_feature (457)..(457): n is a, c, g, or t
  misc_feature (475)..(475): n is a, c, g, or t
  misc_feature (501)..(501): n is a, c, g, or t
  misc_feature (505)..(505): n is a, c, g, or t
  misc_feature (539)..(539): n is a, c, g, or t
  misc_feature (542)..(543): n is a, c, g, or t
  misc_feature (555)..(555): n is a, c, g, or t
  misc_feature (562)..(562): n is a, c, g, or t
  misc_feature (762)..(762): n is a, c, g, or t

SEQ ID NO: 382433 - DNA, 440 bp, Homo Sapiens; identical to SEQ ID NO: 349611
  misc_feature (13)..(13): n is a, c, g, or t
  misc_feature (28)..(28): n is a, c, g, or t
  misc_feature (36)..(36): n is a, c, g, or t
  misc_feature (73)..(73): n is a, c, g, or t

SEQ ID NO: 382434 - DNA, 715 bp, Homo Sapiens; identical to SEQ ID NO: 349612
  misc_feature (29)..(29): n is a, c, g, or t
  misc_feature (88)..(88): n is a, c, g, or t

SEQ ID NO: 382435 - DNA, 808 bp, Homo Sapiens; identical to SEQ ID NO: 349613
  misc_feature (546)..(601): n is a, c, g, or t

SEQ ID NO: 382436 - DNA, 1007 bp, Homo Sapiens; identical to SEQ ID NO: 349618
  misc_feature (164)..(185): n is a, c, g, or t

SEQ ID NO: 382437 - DNA, 959 bp, Homo Sapiens; identical to SEQ ID NO: 349619
  misc_feature (3)..(3): n is a, c, g, or t
  misc_feature (18)..(18): n is a, c, g, or t
  misc_feature (21)..(21): n is a, c, g, or t
  misc_feature (37)..(37): n is a, c, g, or t
  misc_feature (858)..(867): n is a, c, g, or t

SEQ ID NO: 382438 - DNA, 1202 bp, Homo Sapiens; identical to SEQ ID NO: 349628

SEQ ID NO: 382439 - DNA, 859 bp, Homo Sapiens; identical to SEQ ID NO: 349629

SEQ ID NO: 382440 - DNA, 589 bp, Homo Sapiens; identical to SEQ ID NO: 349631

SEQ ID NO: 382441 - DNA, 678 bp, Homo Sapiens; identical to SEQ ID NO: 349632
  misc_feature (244)..(244): n is a, c, g, or t
  misc_feature (247)..(247): n is a, c, g, or t
  misc_feature (263)..(263): n is a, c, g, or t
  misc_feature (304)..(304): n is a, c, g, or t

SEQ ID NO: 382442 - DNA, 1252 bp, Homo Sapiens; identical to SEQ ID NO: 349635

SEQ ID NO: 382443 - DNA, 968 bp, Homo Sapiens; identical to SEQ ID NO: 349636

SEQ ID NO: 382444 - DNA, 564 bp, Homo Sapiens; identical to SEQ ID NO: 349639

SEQ ID NO: 382445 - DNA, 376 bp, Homo Sapiens; identical to SEQ ID NO: 349640
  misc_feature (64)..(64): n is a, c, g, or t
  misc_feature (122)..(122): n is a, c, g, or t
  misc_feature (147)..(147): n is a, c, g, or t

SEQ ID NO: 382446 - DNA, 1069 bp, Homo Sapiens; identical to SEQ ID NO: 349647
  misc_feature (27)..(27): n is a, c, g, or t
  misc_feature (29)..(29): n is a, c, g, or t
  misc_feature (178)..(178): n is a, c, g, or t

SEQ ID NO: 382447 - DNA, 1106 bp, Homo Sapiens; identical to SEQ ID NO: 349648
  misc_feature (666)..(666): n is a, c, g, or t
  misc_feature (978)..(978): n is a, c, g, or t
  misc_feature (998)..(998): n is a, c, g, or t

SEQ ID NO: 382448 - DNA, 726 bp, Homo Sapiens; identical to SEQ ID NO: 349656

SEQ ID NO: 382449 - DNA, 1727 bp, Homo Sapiens; identical to SEQ ID NO: 349657
  misc_feature (226)..(283): n is a, c, g, or t
  misc_feature (1224)..(1331): n is a, c, g, or t
  misc_feature (1562)..(1576): n is a, c, g, or t

SEQ ID NO: 382450 - DNA, 3464 bp, Homo Sapiens; identical to SEQ ID NO: 349658
  misc_feature (416)..(473): n is a, c, g, or t

SEQ ID NO: 382451 - DNA, 728 bp, Homo Sapiens; identical to SEQ ID NO: 349664
  misc_feature (662)..(662): n is a, c, g, or t
  misc_feature (665)..(665): n is a, c, g, or t

SEQ ID NO: 382452 - DNA, 876 bp, Homo Sapiens; identical to SEQ ID NO: 349665
  misc_feature (27)..(27): n is a, c, g, or t

SEQ ID NO: 382453 - DNA, 1595 bp, Homo Sapiens; identical to SEQ ID NO: 349666
  misc_feature (1096)..(1382): n is a, c, g, or t

SEQ ID NO: 382454 - DNA, 683 bp, Homo Sapiens; identical to SEQ ID NO: 349667

SEQ ID NO: 382455 - DNA, 2008 bp, Homo Sapiens; identical to SEQ ID NO: 349668
  misc_feature (27)..(27): n is a, c, g, or t
  misc_feature (799)..(862): n is a, c, g, or t
  misc_feature (934)..(934): n is a, c, g, or t
  misc_feature (977)..(977): n is a, c, g, or t
  misc_feature (979)..(979): n is a, c, g, or t

SEQ ID NO: 382456 - DNA, 1358 bp, Homo Sapiens; identical to SEQ ID NO: 349669
  misc_feature (1014)..(1037): n is a, c, g, or t
  misc_feature (1057)..(1057): n is a, c, g, or t
  misc_feature (1214)..(1214): n is a, c, g, or t

SEQ ID NO: 382457 - DNA, 834 bp, Homo Sapiens; identical to SEQ ID NO: 349670

SEQ ID NO: 382458 - DNA, 622 bp, Homo Sapiens; identical to SEQ ID NO: 349675

SEQ ID NO: 382459 - DNA, 739 bp, Homo Sapiens; identical to SEQ ID NO: 349676
  misc_feature (488)..(520): n is a, c, g, or t

SEQ ID NO: 382460 - DNA, 511 bp, Homo Sapiens; identical to SEQ ID NO: 349685
  misc_feature (42)..(42): n is a, c, g, or t
  misc_feature (52)..(52): n is a, c, g, or t
  misc_feature (495)..(495): n is a, c, g, or t

SEQ ID NO: 382461 - DNA, 1284 bp, Homo Sapiens; identical to SEQ ID NO: 349686

SEQ ID NO: 382462 - DNA, 967 bp, Homo Sapiens; identical to SEQ ID NO: 349687

SEQ ID NO: 382463 - DNA, 753 bp, Homo Sapiens; identical to SEQ ID NO: 349688
  misc_feature (23)..(23): n is a, c, g, or t
  misc_feature (33)..(33): n is a, c, g, or t

SEQ ID NO: 382464 - DNA, 467 bp, Homo Sapiens; identical to SEQ ID NO: 349689

SEQ ID NO: 382465 - DNA, 482 bp, Homo Sapiens; identical to SEQ ID NO: 349690

SEQ ID NO: 382466 - DNA, 1676 bp, Homo Sapiens; identical to SEQ ID NO: 349691
  misc_feature (813)..(863): n is a, c, g, or t

SEQ ID NO: 382467 - DNA, 726 bp, Homo Sapiens; identical to SEQ ID NO: 349692
  misc_feature (216)..(255): n is a, c, g, or t

SEQ ID NO: 382468 - DNA, 486 bp, Homo Sapiens; identical to SEQ ID NO: 349693
  misc_feature (113)..(113): n is a, c, g, or t
  misc_feature (341)..(341): n is a, c, g, or t
  misc_feature (387)..(412): n is a, c, g, or t
  misc_feature (433)..(433): n is a, c, g, or t

SEQ ID NO: 382469 - DNA, 4011 bp, Homo Sapiens; identical to SEQ ID NO: 349694

SEQ ID NO: 382470 - DNA, 428 bp, Homo Sapiens; identical to SEQ ID NO: 349695

SEQ ID NO: 382471 - DNA, 709 bp, Homo Sapiens; identical to SEQ ID NO: 349696
  misc_feature (36)..(36): n is a, c, g, or t
  misc_feature (175)..(220): n is a, c, g, or t

SEQ ID NO: 382472 - DNA, 1228 bp, Homo Sapiens; identical to SEQ ID NO: 349701

SEQ ID NO: 382473 - DNA, 1457 bp, Homo Sapiens; identical to SEQ ID NO: 349702
  misc_feature (1250)..(1263): n is a, c, g, or t

SEQ ID NO: 382474 - DNA, 1249 bp, Homo Sapiens; identical to SEQ ID NO: 349706
  misc_feature (98)..(149): n is a, c, g, or t
  misc_feature (152)..(152): n is a, c, g, or t
  misc_feature (157)..(157): n is a, c, g, or t
  misc_feature (233)..(233): n is a, c, g, or t
  misc_feature (242)..(242): n is a, c, g, or t
  misc_feature (1168)..(1168): n is a, c, g, or t

SEQ ID NO: 382475 - DNA, 991 bp, Homo Sapiens; identical to SEQ ID NO: 349707
  misc_feature (398)..(452): n is a, c, g, or t
  misc_feature (589)..(589): n is a, c, g, or t
  misc_feature (668)..(668): n is a, c, g, or t
  misc_feature (764)..(764): n is a, c, g, or t
  misc_feature (773)..(773): n is a, c, g, or t
  misc_feature (782)..(782): n is a, c, g, or t
  misc_feature (786)..(786): n is a, c, g, or t
  misc_feature (801)..(801): n is a, c, g, or t
  misc_feature (853)..(853): n is a, c, g, or t
  misc_feature (855)..(855): n is a, c, g, or t
  misc_feature (866)..(866): n is a, c, g, or t
  misc_feature (870)..(870): n is a, c, g, or t
  misc_feature (878)..(878): n is a, c, g, or t
  misc_feature (889)..(889): n is a, c, g, or t
  misc_feature (894)..(894): n is a, c, g, or t
  misc_feature (913)..(913): n is a, c, g, or t
  misc_feature (919)..(919): n is a, c, g, or t
  misc_feature (921)..(923): n is a, c, g, or t
  misc_feature (934)..(935): n is a, c, g, or t
  misc_feature (938)..(941): n is a, c, g, or t
  misc_feature (945)..(945): n is a, c, g, or t
  misc_feature (949)..(950): n is a, c, g, or t
  misc_feature (952)..(953): n is a, c, g, or t
  misc_feature (955)..(955): n is a, c, g, or t
  misc_feature (958)..(958): n is a, c, g, or t
  misc_feature (965)..(965): n is a, c, g, or t
  misc_feature (973)..(973): n is a, c, g, or t
  misc_feature (982)..(983): n is a, c, g, or t

SEQ ID NO: 382476 - DNA, 1254 bp, Homo Sapiens; identical to SEQ ID NO: 349709

SEQ ID NO: 382477 - DNA, 1126 bp, Homo Sapiens; identical to SEQ ID NO: 349710

SEQ ID NO: 382478 - DNA, 848 bp, Homo Sapiens; identical to SEQ ID NO: 349718
  misc_feature (42)..(78): n is a, c, g, or t

SEQ ID NO: 382479 - DNA, 2284 bp, Homo Sapiens; identical to SEQ ID NO: 349719

SEQ ID NO: 382480 - DNA, 1910 bp, Homo Sapiens; identical to SEQ ID NO: 349720
  misc_feature (1743)..(1751): n is a, c, g, or t
  misc_feature (1848)..(1856): n is a, c, g, or t

SEQ ID NO: 382481 - DNA, 724 bp, Homo Sapiens; identical to SEQ ID NO: 349721
  misc_feature (590)..(590): n is a, c, g, or t

SEQ ID NO: 382482 - DNA, 1506 bp, Homo Sapiens; identical to SEQ ID NO: 349723
  misc_feature (89)..(118): n is a, c, g, or t

SEQ ID NO: 382483 - DNA, 907 bp, Homo Sapiens; identical to SEQ ID NO: 349724
  misc_feature (151)..(151): n is a, c, g, or t
  misc_feature (548)..(548): n is a, c, g, or t
  misc_feature (727)..(727): n is a, c, g, or t

SEQ ID NO: 382484 - DNA, 1126 bp, Homo Sapiens; identical to SEQ ID NO: 349726

SEQ ID NO: 382485 - DNA, 1173 bp, Homo Sapiens; identical to SEQ ID NO: 349727

SEQ ID NO: 382486 - DNA, 2251 bp, Homo Sapiens; identical to SEQ ID NO: 349734
  misc_feature (60)..(72): n is a, c, g, or t
  misc_feature (1564)..(1592): n is a, c, g, or t

SEQ ID NO: 382487 - DNA, 480 bp, Homo Sapiens; identical to SEQ ID NO: 349735
  misc_feature (12)..(12): n is a, c, g, or t
  misc_feature (43)..(71): n is a, c, g, or t

SEQ ID NO: 382488 - DNA, 986 bp, Homo Sapiens; identical to SEQ ID NO: 349736
  misc_feature (592)..(592): n is a, c, g, or t
  misc_feature (829)..(829): n is a, c, g, or t
  misc_feature (831)..(831): n is a, c, g, or t
  misc_feature (885)..(885): n is a, c, g, or t
  misc_feature (897)..(898): n is a, c, g, or t
  misc_feature (900)..(900): n is a, c, g, or t
  misc_feature (904)..(905): n is a, c, g, or t
  misc_feature (954)..(954): n is a, c, g, or t
  misc_feature (969)..(970): n is a, c, g, or t
  misc_feature (975)..(975): n is a, c, g, or t
  misc_feature (977)..(977): n is a, c, g, or t
  misc_feature (979)..(979): n is a, c, g, or t
  misc_feature (984)..(985): n is a, c, g, or t

SEQ ID NO: 382489 - DNA, 454 bp, Homo Sapiens; identical to SEQ ID NO: 349737
  misc_feature (173)..(211): n is a, c, g, or t

SEQ ID NO: 382490 - DNA, 1262 bp, Homo Sapiens; identical to SEQ ID NO: 349740
  misc_feature (1138)..(1180): n is a, c, g, or t

SEQ ID NO: 382491 - DNA, 904 bp, Homo Sapiens; identical to SEQ ID NO: 349741
  misc_feature (56)..(93): n is a, c, g, or t

SEQ ID NO: 382492 - DNA, 172 bp, Homo Sapiens; identical to SEQ ID NO: 349742

SEQ ID NO: 382493 - DNA, 940 bp, Homo Sapiens; identical to SEQ ID NO: 349748

SEQ ID NO: 382494 - DNA, 1388 bp, Homo Sapiens; identical to SEQ ID NO: 349749

SEQ ID NO: 382495 - DNA, 901 bp, Homo Sapiens; identical to SEQ ID NO: 349750
  misc_feature (392)..(418): n is a, c, g, or t
  misc_feature (787)..(814): n is a, c, g, or t

SEQ ID NO: 382496 - DNA, 2190 bp, Homo Sapiens; identical to SEQ ID NO: 349751
  misc_feature (88)..(115): n is a, c, g, or t
  misc_feature (485)..(516): n is a, c, g, or t

SEQ ID NO: 382497 - DNA, 346 bp, Homo Sapiens; identical to SEQ ID NO: 349753
  misc_feature (26)..(26): n is a, c, g, or t
  misc_feature (176)..(176): n is a, c, g, or t
  misc_feature (270)..(270): n is a, c, g, or t

SEQ ID NO: 382498 - DNA, 781 bp, Homo Sapiens; identical to SEQ ID NO: 349754

SEQ ID NO: 382499 - DNA, 3675 bp, Homo Sapiens; identical to SEQ ID NO: 349755
  misc_feature (1955)..(1994): n is a, c, g, or t
  misc_feature (2016)..(2016): n is a, c, g, or t
  misc_feature (2170)..(2170): n is a, c, g, or t
  misc_feature (2644)..(2653): n is a, c, g, or t
  misc_feature (2971)..(2986): n is a, c, g, or t
  misc_feature (3362)..(3435): n is a, c, g, or t

SEQ ID NO: 382500 - DNA, 461 bp, Homo Sapiens; identical to SEQ ID NO: 349759
  misc_feature (77)..(130): n is a, c, g, or t

SEQ ID NO: 382501 - DNA, 464 bp, Homo Sapiens; identical to SEQ ID NO: 349760

SEQ ID NO: 382502 - DNA, 987 bp, Homo Sapiens; identical to SEQ ID NO: 349761
  misc_feature (453)..(512): n is a, c, g, or t
  misc_feature (602)..(655): n is a, c, g, or t

SEQ ID NO: 382503 - DNA, 1420 bp, Homo Sapiens; identical to SEQ ID NO: 349762
  misc_feature (332)..(385): n is a, c, g, or t
  misc_feature (475)..(534): n is a, c, g, or t

SEQ ID NO: 382504 - DNA, 1129 bp, Homo Sapiens; identical to SEQ ID NO: 349769

SEQ ID NO: 382505 - DNA, 1060 bp, Homo Sapiens; identical to SEQ ID NO: 349770

SEQ ID NO: 382506 - DNA, 2800 bp, Homo Sapiens; identical to SEQ ID NO: 349771
  misc_feature (2503)..(2503): n is a, c, g, or t

SEQ ID NO: 382507 - DNA, 962 bp, Homo Sapiens; identical to SEQ ID NO: 349772

SEQ ID NO: 382508 - DNA, 1259 bp, Homo Sapiens; identical to SEQ ID NO: 349773
  misc_feature (883)..(883): n is a, c, g, or t
  misc_feature (1083)..(1083): n is a, c, g, or t

SEQ ID NO: 382509 - DNA, 558 bp, Homo Sapiens; identical to SEQ ID NO: 349774

SEQ ID NO: 382510 - DNA, 1288 bp, Homo Sapiens; identical to SEQ ID NO: 349776

SEQ ID NO: 382511 - DNA, 492 bp, Homo Sapiens; identical to SEQ ID NO: 349777
  misc_feature (16)..(16): n is a, c, g, or t
  misc_feature (60)..(60): n is a, c, g, or t
  misc_feature (84)..(84): n is a, c, g, or t
  misc_feature (129)..(129): n is a, c, g, or t

SEQ ID NO: 382512 - DNA, 1172 bp, Homo Sapiens; identical to SEQ ID NO: 349784
  misc_feature (707)..(769): n is a, c, g, or t
  misc_feature (828)..(828): n is a, c, g, or t

SEQ ID NO: 382513 - DNA, 831 bp, Homo Sapiens; identical to SEQ ID NO: 349785
  misc_feature (26)..(26): n is a, c, g, or t
  misc_feature (31)..(31): n is a, c, g, or t

SEQ ID NO: 382514 - DNA, 1183 bp, Homo Sapiens; identical to SEQ ID NO: 349793

SEQ ID NO: 382515 - DNA, 1056 bp, Homo Sapiens; identical to SEQ ID NO: 349794
  misc_feature (966)..(1002): n is a, c, g, or t

SEQ ID NO: 382516 - DNA, 881 bp, Homo Sapiens; identical to SEQ ID NO: 349801
  misc_feature (352)..(369): n is a, c, g, or t

SEQ ID NO: 382517 - DNA, 1588 bp, Homo Sapiens; identical to SEQ ID NO: 349802
  misc_feature (50)..(86): n is a, c, g, or t
  misc_feature (184)..(207): n is a, c, g, or t
  misc_feature (1488)..(1488): n is a, c, g, or t

SEQ ID NO: 382518 - DNA, 1295 bp, Homo Sapiens; identical to SEQ ID NO: 349810
  misc_feature (75)..(127): n is a, c, g, or t

SEQ ID NO: 382519 - DNA, 1026 bp, Homo Sapiens; identical to SEQ ID NO: 349811
  misc_feature (15)..(15): n is a, c, g, or t
  misc_feature (23)..(23): n is a, c, g, or t
  misc_feature (59)..(59): n is a, c, g, or t
  misc_feature (65)..(65): n is a, c, g, or t
  misc_feature (518)..(538): n is a, c, g, or t

SEQ ID NO: 382520 - DNA, 468 bp, Homo Sapiens; identical to SEQ ID NO: 349812

SEQ ID NO: 382521 - DNA, 1097 bp, Homo Sapiens; identical to SEQ ID NO: 349813
  misc_feature (19)..(19): n is a, c, g, or t
  misc_feature (89)..(89): n is a, c, g, or t
  misc_feature (95)..(95): n is a, c, g, or t
  misc_feature (240)..(240): n is a, c, g, or t
  misc_feature (352)..(352): n is a, c, g, or t
  misc_feature (371)..(371): n is a, c, g, or t
  misc_feature (395)..(395): n is a, c, g, or t
  misc_feature (420)..(420): n is a, c, g, or t
  misc_feature (435)..(435): n is a, c, g, or t
  misc_feature (551)..(551): n is a, c, g, or t
  misc_feature (878)..(878): n is a, c, g, or t
  misc_feature (971)..(971): n is a, c, g, or t
  misc_feature (1011)..(1012): n is a, c, g, or t
  misc_feature (1014)..(1014): n is a, c, g, or t
  misc_feature (1019)..(1019): n is a, c, g, or t
  misc_feature (1029)..(1030): n is a, c, g, or t
  misc_feature (1032)..(1032): n is a, c, g, or t
  misc_feature (1039)..(1039): n is a, c, g, or t
  misc_feature (1041)..(1041): n is a, c, g, or t
  misc_feature (1063)..(1064): n is a, c, g, or t
  misc_feature (1066)..(1066): n is a, c, g, or t
  misc_feature (1068)..(1068): n is a, c, g, or t
  misc_feature (1071)..(1071): n is a, c, g, or t
  misc_feature (1079)..(1079): n is a, c, g, or t
  misc_feature (1083)..(1083): n is a, c, g, or t
  misc_feature (1087)..(1087): n is a, c, g, or t

SEQ ID NO: 382522 - DNA, 2207 bp, Homo Sapiens; identical to SEQ ID NO: 349814
  misc_feature (64)..(64): n is a, c, g, or t

SEQ ID NO: 382523 - DNA, 2306 bp, Homo Sapiens; identical to SEQ ID NO: 349815
  misc_feature (177)..(181): n is a, c, g, or t
  misc_feature (183)..(183): n is a, c, g, or t
  misc_feature (185)..(187): n is a, c, g, or t
  misc_feature (189)..(245): n is a, c, g, or t
  misc_feature (248)..(248): n is a, c, g, or t
  misc_feature (250)..(250): n is a, c, g, or t
  misc_feature (252)..(255): n is a, c, g, or t
  misc_feature (258)..(279): n is a, c, g, or t

SEQ ID NO: 382524 - DNA, 718 bp, Homo Sapiens; identical to SEQ ID NO: 349816
  misc_feature (23)..(23): n is a, c, g, or t
  misc_feature (47)..(47): n is a, c, g, or t

SEQ ID NO: 382525 - DNA, 755 bp, Homo Sapiens; identical to SEQ ID NO: 349818

SEQ ID NO: 382526 - DNA, 1293 bp, Homo Sapiens; identical to SEQ ID NO: 349819

SEQ ID NO: 382527 - DNA, 880 bp, Homo Sapiens; identical to SEQ ID NO: 349821
  misc_feature (136)..(137): n is a, c, g, or t

SEQ ID NO: 382528 - DNA, 1079 bp, Homo Sapiens; identical to SEQ ID NO: 349822

SEQ ID NO: 382529 - DNA, 1094 bp, Homo Sapiens; identical to SEQ ID NO: 349835
  misc_feature (143)..(193): n is a, c, g, or t
  misc_feature (991)..(1020): n is a, c, g, or t

SEQ ID NO: 382530 - DNA, 1915 bp, Homo Sapiens; identical to SEQ ID NO: 349836
  misc_feature (19)..(19): n is a, c, g, or t
  misc_feature (24)..(24): n is a, c, g, or t
  misc_feature (26)..(26): n is a, c, g, or t
  misc_feature (28)..(28): n is a, c, g, or t
  misc_feature (41)..(41): n is a, c, g, or t
  misc_feature (46)..(46): n is a, c, g, or t
  misc_feature (100)..(100): n is a, c, g, or t
  misc_feature (107)..(108): n is a, c, g, or t
  misc_feature (154)..(154): n is a, c, g, or t
  misc_feature (208)..(208): n is a, c, g, or t
  misc_feature (211)..(234): n is a, c, g, or t
  misc_feature (236)..(236): n is a, c, g, or t
  misc_feature (239)..(239): n is a, c, g, or t
  misc_feature (255)..(256): n is a, c, g, or t
  misc_feature (264)..(264): n is a, c, g, or t
  misc_feature (266)..(267): n is a, c, g, or t
  misc_feature (270)..(270): n is a, c, g, or t
  misc_feature (280)..(280): n is a, c, g, or t
  misc_feature (284)..(284): n is a, c, g, or t
  misc_feature (287)..(287): n is a, c, g, or t
  misc_feature (330)..(330): n is a, c, g, or t
  misc_feature (378)..(378): n is a, c, g, or t
  misc_feature (382)..(382): n is a, c, g, or t
  misc_feature (392)..(392): n is a, c, g, or t
  misc_feature (504)..(504): n is a, c, g, or t
  misc_feature (512)..(512): n is a, c, g, or t
  misc_feature (565)..(565): n is a, c, g, or t
  misc_feature (571)..(572): n is a, c, g, or t
  misc_feature (576)..(576): n is a, c, g, or t
  misc_feature (590)..(590): n is a, c, g, or t
  misc_feature (601)..(601): n is a, c, g, or t
  misc_feature (638)..(638): n is a, c, g, or t
  misc_feature (640)..(641): n is a, c, g, or t
  misc_feature (645)..(645): n is a, c, g, or t
  misc_feature (653)..(653): n is a, c, g, or t
  misc_feature (660)..(660): n is a, c, g, or t
  misc_feature (687)..(687): n is a, c, g, or t
  misc_feature (689)..(689): n is a, c, g, or t
  misc_feature (735)..(735): n is a, c, g, or t
  misc_feature (742)..(742): n is a, c, g, or t
  misc_feature (752)..(752): n is a, c, g, or t
  misc_feature (757)..(757): n is a, c, g, or t
  misc_feature (759)..(759): n is a, c, g, or t
  misc_feature (924)..(924): n is a, c, g, or t
  misc_feature (1666)..(1666): n is a, c, g, or t
  misc_feature (1787)..(1787): n is a, c, g, or t

SEQ ID NO: 382531 - DNA, 957 bp, Homo Sapiens; identical to SEQ ID NO: 349838
  misc_feature (922)..(922): n is a, c, g, or t

SEQ ID NO: 382532 - DNA, 700 bp, Homo Sapiens; identical to SEQ ID NO: 349839

SEQ ID NO: 382533 - DNA, 1094 bp, Homo Sapiens; identical to SEQ ID NO: 349843
  misc_feature (70)..(125): n is a, c, g, or t

SEQ ID NO: 382534 - DNA, 760 bp, Homo Sapiens; identical to SEQ ID NO: 349844

SEQ ID NO: 382535 - DNA, 1177 bp, Homo Sapiens; identical to SEQ ID NO: 349846
  misc_feature (314)..(314): n is a, c, g, or t

SEQ ID NO: 382536 - DNA, 876 bp, Homo Sapiens; identical to SEQ ID NO: 349847

SEQ ID NO: 382537 - DNA, 669 bp, Homo Sapiens; identical to SEQ ID NO: 349849
  misc_feature (345)..(358): n is a, c, g, or t

SEQ ID NO: 382538 - DNA, 754 bp, Homo Sapiens; identical to SEQ ID NO: 349850
  misc_feature (92)..(92): n is a, c, g, or t
  misc_feature (141)..(141): n is a, c, g, or t
  misc_feature (435)..(435): n is a, c, g, or t

SEQ ID NO: 382539 - DNA, 718 bp, Homo Sapiens; identical to SEQ ID NO: 349851

SEQ ID NO: 382540 - DNA, 602 bp, Homo Sapiens; identical to SEQ ID NO: 349852

SEQ ID NO: 382541 - DNA, 1153 bp, Homo Sapiens; identical to SEQ ID NO: 349853

SEQ ID NO: 382542 - DNA, 1197 bp, Homo Sapiens; identical to SEQ ID NO: 349854
  misc_feature (1071)..(1071): n is a, c, g, or t
  misc_feature (1106)..(1106): n is a, c, g, or t
  misc_feature (1178)..(1178): n is a, c, g, or t

SEQ ID NO: 382543 - DNA, 1833 bp, Homo Sapiens; identical to SEQ ID NO: 349855
  misc_feature (673)..(681): n is a, c, g, or t

SEQ ID NO: 382544 - DNA, 1559 bp, Homo Sapiens; identical to SEQ ID NO: 349858
  misc_feature (334)..(334): n is a, c, g, or t

SEQ ID NO: 382545 - DNA, 791 bp, Homo Sapiens; identical to SEQ ID NO: 349859
  misc_feature (42)..(42): n is a, c, g, or t
  misc_feature (64)..(64): n is a, c, g, or t

SEQ ID NO: 382546 - DNA, 488 bp, Homo Sapiens; identical to SEQ ID NO: 349860
  misc_feature (16)..(16): n is a, c, g, or t
  misc_feature (33)..(33): n is a, c, g, or t

SEQ ID NO: 382547 - DNA, 2092 bp, Homo Sapiens; identical to SEQ ID NO: 349866
  misc_feature (1897)..(1897): n is a, c, g, or t

SEQ ID NO: 382548 - DNA, 481 bp, Homo Sapiens; identical to SEQ ID NO: 349867
  misc_feature (60)..(60): n is a, c, g, or t

SEQ ID NO: 382549 - DNA, 1938 bp, Homo Sapiens; identical to SEQ ID NO: 349870
  misc_feature (1316)..(1389): n is a, c, g, or t

SEQ ID NO: 382550 - DNA, 757 bp, Homo Sapiens; identical to SEQ ID NO: 349871
  misc_feature (28)..(28): n is a, c, g, or t
  misc_feature (152)..(152): n is a, c, g, or t

SEQ ID NO: 382551 - DNA, 1158 bp, Homo Sapiens; identical to SEQ ID NO: 349874

SEQ ID NO: 382552 - DNA, 379 bp, Homo Sapiens; identical to SEQ ID NO: 349875

SEQ ID NO: 382553 - DNA, 955 bp, Homo Sapiens; identical to SEQ ID NO: 349876
  misc_feature (505)..(646): n is a, c, g, or t

SEQ ID NO: 382554 - DNA, 733 bp, Homo Sapiens; identical to SEQ ID NO: 349877
  misc_feature (69)..(127): n is a, c, g, or t
  misc_feature (715)..(715): n is a, c, g, or t

SEQ ID NO: 382555 - DNA, 742 bp, Homo Sapiens; identical to SEQ ID NO: 349878
  misc_feature (69)..(69): n is a, c, g, or t
  misc_feature (391)..(533): n is a, c, g, or t

SEQ ID NO: 382556 - DNA, 2302 bp, Homo Sapiens; identical to SEQ ID NO: 349882
  misc_feature (2288)..(2288): n is a, c, g, or t

SEQ ID NO: 382557 - DNA, 1111 bp, Homo Sapiens; identical to SEQ ID NO: 349883
  misc_feature (510)..(622): n is a, c, g, or t

SEQ ID NO: 382558 - DNA, 433 bp, Homo Sapiens; identical to SEQ ID NO: 349884

SEQ ID NO: 382559 - DNA, 1591 bp, Homo Sapiens; identical to SEQ ID NO: 349885

SEQ ID NO: 382560 - DNA, 1450 bp, Homo Sapiens; identical to SEQ ID NO: 349886

SEQ ID NO: 382561 - DNA, 1000 bp, Homo Sapiens; identical to SEQ ID NO: 349887
  misc_feature (15)..(15): n is a, c, g, or t
  misc_feature (31)..(31): n is a, c, g, or t

SEQ ID NO: 382562 - DNA, 1677 bp, Homo Sapiens; identical to SEQ ID NO: 349888
  misc_feature (1205)..(1205): n is a, c, g, or t

SEQ ID NO: 382563 - DNA, 1290 bp, Homo Sapiens; identical to SEQ ID NO: 349889
  misc_feature (1010)..(1010): n is a, c, g, or t

SEQ ID NO: 382564 - DNA, 2652 bp, Homo Sapiens; identical to SEQ ID NO: 349890
  misc_feature (401)..(402): n is a, c, g, or t
  misc_feature (427)..(427): n is a, c, g, or t
  misc_feature (2160)..(2254): n is a, c, g, or t

SEQ ID NO: 382565 - DNA, 1031 bp, Homo Sapiens; identical to SEQ ID NO: 349891
  misc_feature (14)..(14): n is a, c, g, or t
  misc_feature (66)..(66): n is a, c, g, or t
  misc_feature (101)..(101): n is a, c, g, or t
  misc_feature (108)..(108): n is a, c, g, or t
  misc_feature (117)..(117): n is a, c, g, or t
  misc_feature (121)..(121): n is a, c, g, or t
  misc_feature (127)..(127): n is a, c, g, or t
  misc_feature (136)..(136): n is a, c, g, or t
  misc_feature (145)..(145): n is a, c, g, or t
  misc_feature (206)..(206): n is a, c, g, or t
  misc_feature (214)..(215): n is a, c, g, or t
  misc_feature (218)..(220): n is a, c, g, or t
  misc_feature (222)..(224): n is a, c, g, or t
  misc_feature (231)..(231): n is a, c, g, or t
  misc_feature (241)..(241): n is a, c, g, or t
  misc_feature (307)..(307): n is a, c, g, or t
  misc_feature (591)..(591): n is a, c, g, or t
  misc_feature (812)..(812): n is a, c, g, or t
  misc_feature (889)..(889): n is a, c, g, or t
  misc_feature (921)..(922): n is a, c, g, or t
  misc_feature (928)..(928): n is a, c, g, or t
  misc_feature (942)..(942): n is a, c, g, or t
  misc_feature (946)..(946): n is a, c, g, or t
  misc_feature (962)..(962): n is a, c, g, or t
  misc_feature (972)..(972): n is a, c, g, or t
  misc_feature (982)..(982): n is a, c, g, or t
  misc_feature (992)..(992): n is a, c, g, or t
  misc_feature (1003)..(1004): n is a, c, g, or t
  misc_feature (1010)..(1010): n is a, c, g, or t
  misc_feature (1020)..(1020): n is a, c, g, or t

SEQ ID NO: 382566 - DNA, 1066 bp, Homo Sapiens; identical to SEQ ID NO: 349892
  misc_feature (415)..(415): n is a, c, g, or t
  misc_feature (433)..(433): n is a, c, g, or t
  misc_feature (792)..(800): n is a, c, g, or t

SEQ ID NO: 382567 - DNA, 711 bp, Homo Sapiens; identical to SEQ ID NO: 349893

SEQ ID NO: 382568 - DNA, 379 bp, Homo Sapiens; identical to SEQ ID NO: 349897

SEQ ID NO: 382569 - DNA, 570 bp, Homo Sapiens; identical to SEQ ID NO: 349898
  misc_feature (65)..(65): n is a, c, g, or t
  misc_feature (484)..(484): n is a, c, g, or t
  misc_feature (515)..(515): n is a, c, g, or t
  misc_feature (560)..(560): n is a, c, g, or t

SEQ ID NO: 382570 - DNA, 1008 bp, Homo Sapiens; identical to SEQ ID NO: 349900

SEQ ID NO: 382571 - DNA, 1428 bp, Homo Sapiens; identical to SEQ ID NO: 349901
  misc_feature (225)..(312): n is a, c, g, or t
  misc_feature (663)..(671): n is a, c, g, or t
  misc_feature (691)..(704): n is a, c, g, or t
  misc_feature (713)..(964): n is a, c, g, or t

SEQ ID NO: 382572 - DNA, 788 bp, Homo Sapiens; identical to SEQ ID NO: 349905

SEQ ID NO: 382573 - DNA, 1006 bp, Homo Sapiens; identical to SEQ ID NO: 349906

SEQ ID NO: 382574 - DNA, 906 bp, Homo Sapiens; identical to SEQ ID NO: 349907

SEQ ID NO: 382575 - DNA, 999 bp, Homo Sapiens; identical to SEQ ID NO: 349908

SEQ ID NO: 382576 - DNA, 1068 bp, Homo Sapiens; identical to SEQ ID NO: 349909
  misc_feature (984)..(998): n is a, c, g, or t

SEQ ID NO: 382577 - DNA, 1080 bp, Homo Sapiens; identical to SEQ ID NO: 349910

SEQ ID NO: 382578 - DNA, 1908 bp, Homo Sapiens; identical to SEQ ID NO: 349911
  misc_feature (601)..(619): n is a, c, g, or t

SEQ ID NO: 382579 - DNA, 505 bp, Homo Sapiens; identical to SEQ ID NO: 349912

SEQ ID NO: 382580 - DNA, 1111 bp, Homo Sapiens; identical to SEQ ID NO: 349919
  misc_feature (744)..(744): n is a, c, g, or t

SEQ ID NO: 382581 - DNA, 1393 bp, Homo Sapiens; identical to SEQ ID NO: 349920
  misc_feature (1202)..(1202): n is a, c, g, or t
  misc_feature (1205)..(1206): n is a, c, g, or t
  misc_feature (1213)..(1216): n is a, c, g, or t
  misc_feature (1225)..(1226): n is a, c, g, or t
  misc_feature (1228)..(1228): n is a, c, g, or t

SEQ ID NO: 382582 - DNA, 435 bp, Homo Sapiens; identical to SEQ ID NO: 349921

SEQ ID NO: 382583 - DNA, 433 bp, Homo Sapiens; identical to SEQ ID NO: 349922
  misc_feature (54)..(54): n is a, c, g, or t
  misc_feature (410)..(410): n is a, c, g, or t

SEQ ID NO: 382584 - DNA, 796 bp, Homo Sapiens; identical to SEQ ID NO: 349923
  misc_feature (168)..(196): n is a, c, g, or t
  misc_feature (222)..(344): n is a, c, g, or t

SEQ ID NO: 382585 - DNA, 1411 bp, Homo Sapiens; identical to SEQ ID NO: 349924
  misc_feature (133)..(362): n is a, c, g, or t
  misc_feature (1329)..(1365): n is a, c, g, or t

SEQ ID NO: 382586 - DNA, 1054 bp, Homo Sapiens; identical to SEQ ID NO: 349925
  misc_feature (756)..(756): n is a, c, g, or t
  misc_feature (945)..(945): n is a, c, g, or t
  misc_feature (964)..(964): n is a, c, g, or t

SEQ ID NO: 382587 - DNA, 1555 bp, Homo Sapiens; identical to SEQ ID NO: 349929
  misc_feature (1501)..(1510): n is a, c, g, or t

SEQ ID NO: 382588 - DNA, 447 bp, Homo Sapiens; identical to SEQ ID NO: 349930
  misc_feature (19)..(19): n is a, c, g, or t
  misc_feature (30)..(30): n is a, c, g, or t
  misc_feature (71)..(71): n is a, c, g, or t
  misc_feature (102)..(102): n is a, c, g, or t
  misc_feature (211)..(211): n is a, c, g, or t
  misc_feature (229)..(229): n is a, c, g, or t

SEQ ID NO: 382589 - DNA, 411 bp, Homo Sapiens; identical to SEQ ID NO: 349931
  misc_feature (393)..(393): n is a, c, g, or t

SEQ ID NO: 382590 - DNA, 1085 bp, Homo Sapiens; identical to SEQ ID NO: 349936
  misc_feature (308)..(431): n is a, c, g, or t

SEQ ID NO: 382591 - DNA, 515 bp, Homo Sapiens; identical to SEQ ID NO: 349937
  misc_feature (425)..(425): n is a, c, g, or t
  misc_feature (452)..(452): n is a, c, g, or t
  misc_feature (484)..(484): n is a, c, g, or t
  misc_feature (505)..(505): n is a, c, g, or t

SEQ ID NO: 382592 - DNA, 1006 bp, Homo Sapiens; identical to SEQ ID NO: 349951

SEQ ID NO: 382593 - DNA, 633 bp, Homo Sapiens; identical to SEQ ID NO: 349952
  misc_feature (549)..(585): n is a, c, g, or t

SEQ ID NO: 382594 - DNA, 861 bp, Homo Sapiens; identical to SEQ ID NO: 349954

SEQ ID NO: 382595 - DNA, 767 bp, Homo Sapiens; identical to SEQ ID NO: 349955

SEQ ID NO: 382596 - DNA, 1484 bp, Homo Sapiens; identical to SEQ ID NO: 349961
  misc_feature (324)..(384): n is a, c, g, or t
  misc_feature (682)..(701): n is a, c, g, or t
  misc_feature (1406)..(1406): n is a, c, g, or t
  misc_feature (1436)..(1436): n is a, c, g, or t
  misc_feature (1450)..(1450): n is a, c, g, or t
  misc_feature (1452)..(1452): n is a, c, g, or t
  misc_feature (1455)..(1455): n is a, c, g, or t
  misc_feature (1458)..(1458): n is a, c, g, or t
  misc_feature (1460)..(1461): n is a, c, g, or t

SEQ ID NO: 382597 - DNA, 946 bp, Homo Sapiens; identical to SEQ ID NO: 349962
  misc_feature (861)..(861): n is a, c, g, or t
  misc_feature (868)..(868): n is a, c, g, or t
  misc_feature (885)..(885): n is a, c, g, or t
  misc_feature (898)..(898): n is a, c, g, or t
  misc_feature (901)..(901): n is a, c, g, or t
  misc_feature (915)..(915): n is a, c, g, or t
  misc_feature (940)..(940): n is a, c, g, or t

SEQ ID NO: 382598 - DNA, 1590 bp, Homo Sapiens; identical to SEQ ID NO: 349963
  misc_feature (260)..(317): n is a, c, g, or t
  misc_feature (489)..(543): n is a, c, g, or t
  misc_feature (842)..(842): n is a, c, g, or t
  misc_feature (931)..(931): n is a, c, g, or t
  misc_feature (937)..(937): n is a, c, g, or t
  misc_feature (945)..(945): n is a, c, g, or t
  misc_feature (949)..(949): n is a, c, g, or t
  misc_feature (962)..(962): n is a, c, g, or t
  misc_feature (1040)..(1040): n is a, c, g, or t
  misc_feature (1077)..(1077): n is a, c, g, or t
  misc_feature (1082)..(1082): n is a, c, g, or t
  misc_feature (1085)..(1085): n is a, c, g, or t
  misc_feature (1091)..(1091): n is a, c, g, or t
  misc_feature (1095)..(1095): n is a, c, g, or t
  misc_feature (1104)..(1104): n is a, c, g, or t
  misc_feature (1121)..(1121): n is a, c, g, or t
  misc_feature (1127)..(1127): n is a, c, g, or t
  misc_feature (1311)..(1311): n is a, c, g, or t
  misc_feature (1317)..(1317): n is a, c, g, or t
  misc_feature (1327)..(1329): n is a, c, g, or t
  misc_feature (1331)..(1331): n is a, c, g, or t
  misc_feature (1343)..(1344): n is a, c, g, or t
  misc_feature (1377)..(1377): n is a, c, g, or t
  misc_feature (1397)..(1398): n is a, c, g, or t
  misc_feature (1405)..(1405): n is a, c, g, or t
  misc_feature (1447)..(1447): n is a, c, g, or t
  misc_feature (1474)..(1474): n is a, c, g, or t
  misc_feature (1491)..(1491): n is a, c, g, or t
  misc_feature (1494)..(1495): n is a, c, g, or t
  misc_feature (1498)..(1498): n is a, c, g, or t
  misc_feature (1503)..(1522): n is a, c, g, or t
  misc_feature (1529)..(1529): n is a, c, g, or t
  misc_feature (1543)..(1543): n is a, c, g, or t
  misc_feature (1571)..(1571): n is a, c, g, or t

SEQ ID NO: 382599 - DNA, 2153 bp, Homo Sapiens; identical to SEQ ID NO: 349964
  misc_feature (451)..(512): n is a, c, g, or t
  misc_feature (1643)..(1665): n is a, c, g, or t

SEQ ID NO: 382600 - DNA, 1250 bp, Homo Sapiens; identical to SEQ ID NO: 349965
  misc_feature (128)..(128): n is a, c, g, or t
  misc_feature (765)..(816): n is a, c, g, or t
  misc_feature (1203)..(1203): n is a, c, g, or t

SEQ ID NO: 382601 - DNA, 691 bp, Homo Sapiens; identical to SEQ ID NO: 349966
  misc_feature (512)..(528): n is a, c, g, or t

SEQ ID NO: 382602 - DNA, 2838 bp, Homo Sapiens; identical to SEQ ID NO: 349967
  misc_feature (2352)..(2360): n is a, c, g, or t

SEQ ID NO: 382603 - DNA, 792 bp, Homo Sapiens; identical to SEQ ID NO: 349968
  misc_feature (65)..(82): n is a, c, g, or t

SEQ ID NO: 382604 - DNA, 649 bp, Homo Sapiens; identical to SEQ ID NO: 349969
  misc_feature (88)..(104): n is a, c, g, or t

SEQ ID NO: 382605 - DNA, 585 bp, Homo Sapiens; identical to SEQ ID NO: 349970
  misc_feature (103)..(103): n is a, c, g, or t
  misc_feature (194)..(194): n is a, c, g, or t
  misc_feature (196)..(196): n is a, c, g, or t
  misc_feature (526)..(526): n is a, c, g, or t
  misc_feature (549)..(549): n is a, c, g, or t
  misc_feature (556)..(556): n is a, c, g, or t

SEQ ID NO: 382606 - DNA, 3751 bp, Homo Sapiens; identical to SEQ ID NO: 349971
  misc_feature (3669)..(3705): n is a, c, g, or t

SEQ ID NO: 382607 - DNA, 911 bp, Homo Sapiens; identical to SEQ ID NO: 349972
  misc_feature (866)..(866): n is a, c, g, or t

SEQ ID NO: 382608 - DNA, 949 bp, Homo Sapiens; identical to SEQ ID NO: 349973

SEQ ID NO: 382609 - DNA, 854 bp, Homo Sapiens; identical to SEQ ID NO: 349986
  misc_feature (830)..(830): n is a, c, g, or t
  misc_feature (836)..(836): n is a, c, g, or t

SEQ ID NO: 382610 - DNA, 1194 bp, Homo Sapiens; identical to SEQ ID NO: 349987

SEQ ID NO: 382611 - DNA, 1186 bp, Homo Sapiens; identical to SEQ ID NO: 349988

SEQ ID NO: 382612 - DNA, 334 bp, Homo Sapiens; identical to SEQ ID NO: 349989
  misc_feature (316)..(316): n is a, c, g, or t

SEQ ID NO: 382613 - DNA, 996 bp, Homo Sapiens; identical to SEQ ID NO: 349990
  misc_feature (44)..(44): n is a, c, g, or t
  misc_feature (59)..(59): n is a, c, g, or t
  misc_feature (61)..(61): n is a, c, g, or t
  misc_feature (63)..(63): n is a, c, g, or t
  misc_feature (932)..(941): n is a, c, g, or t

SEQ ID NO: 382614 - DNA, 2303 bp, Homo Sapiens; identical to SEQ ID NO: 349991
  misc_feature (468)..(476): n is a, c, g, or t
  misc_feature (1961)..(1961): n is a, c, g, or t

SEQ ID NO: 382615 - DNA, 1255 bp, Homo Sapiens; identical to SEQ ID NO: 349994

SEQ ID NO: 382616 - DNA, 457 bp, Homo Sapiens; identical to SEQ ID NO: 349995
  misc_feature (166)..(166): n is a, c, g, or t
  misc_feature (444)..(444): n is a, c, g, or t

SEQ ID NO: 382617 - DNA, 1060 bp, Homo Sapiens; identical to SEQ ID NO: 349999
  misc_feature (214)..(214): n is a, c, g, or t
  misc_feature (259)..(259): n is a, c, g, or t
  misc_feature (287)..(287): n is a, c, g, or t
  misc_feature (312)..(321): n is a, c, g, or t
  misc_feature (604)..(612): n is a, c, g, or t

SEQ ID NO: 382618 - DNA, 1415 bp, Homo Sapiens; identical to SEQ ID NO: 350000
  misc_feature (629)..(654): n is a, c, g, or t

SEQ ID NO: 382619 - DNA, 1673 bp, Homo Sapiens; identical to SEQ ID NO: 350002
  misc_feature (15)..(15): n is a, c, g, or t
  misc_feature (23)..(23): n is a, c, g, or t
  misc_feature (1426)..(1451): n is a, c, g, or t

SEQ ID NO: 382620 - DNA, 1127 bp, Homo Sapiens; identical to SEQ ID NO: 350003
  misc_feature (21)..(21): n is a, c, g, or t
  misc_feature (33)..(33): n is a, c, g, or t
  misc_feature (49)..(49): n is a, c, g, or t
  misc_feature (94)..(94): n is a, c, g, or t
  misc_feature (591)..(591): n is a, c, g, or t
  misc_feature (600)..(603): n is a, c, g, or t
  misc_feature (605)..(609): n is a, c, g, or t
  misc_feature (614)..(614): n is a, c, g, or t

SEQ ID NO: 382621 - DNA, 1209 bp, Homo Sapiens; identical to SEQ ID NO: 350004
  misc_feature (45)..(81): n is a, c, g, or t

SEQ ID NO: 382622 - DNA, 468 bp, Homo Sapiens; identical to SEQ ID NO: 350005
  misc_feature (13)..(13): n is a, c, g, or t
  misc_feature (32)..(32): n is a, c, g, or t
  misc_feature (39)..(39): n is a, c, g, or t
  misc_feature (54)..(64): n is a, c, g, or t

SEQ ID NO: 382623 - DNA, 1193 bp, Homo Sapiens; identical to SEQ ID NO: 350007
  misc_feature (47)..(83): n is a, c, g, or t
  misc_feature (1090)..(1090): n is a, c, g, or t
  misc_feature (1131)..(1131): n is a, c, g, or t
  misc_feature (1148)..(1148): n is a, c, g, or t
  misc_feature (1155)..(1155): n is a, c, g, or t
  misc_feature (1160)..(1160): n is a, c, g, or t
  misc_feature (1175)..(1175): n is a, c, g, or t
  misc_feature (1178)..(1178): n is a, c, g, or t
  misc_feature (1181)..(1181): n is a, c, g, or t
  misc_feature (1184)..(1184): n is a, c, g, or t

SEQ ID NO: 382624 - DNA, 2585 bp, Homo Sapiens; identical to SEQ ID NO: 350008
  misc_feature (2042)..(2042): n is a, c, g, or t
  misc_feature (2050)..(2060): n is a, c, g, or t
  misc_feature (2062)..(2067): n is a, c, g, or t
  misc_feature (2069)..(2082): n is a, c, g, or t
  misc_feature (2085)..(2101): n is a, c, g, or t
  misc_feature (2103)..(2105): n is a, c, g, or t
  misc_feature (2107)..(2107): n is a, c, g, or t
  misc_feature (2111)..(2113): n is a, c, g, or t
  misc_feature (2115)..(2119): n is a, c, g, or t
  misc_feature (2121)..(2121): n is a, c, g, or t
  misc_feature (2123)..(2123): n is a, c, g, or t
  misc_feature (2131)..(2146): n is a, c, g, or t
  misc_feature (2151)..(2151): n is a, c, g, or t
  misc_feature (2155)..(2155): n is a, c, g, or t
  misc_feature (2160)..(2174): n is a, c, g, or t

SEQ ID NO: 382625 - DNA, 1154 bp, Homo Sapiens; identical to SEQ ID NO: 350009
  misc_feature (912)..(912): n is a, c, g, or t
  misc_feature (1021)..(1021): n is a, c, g, or t

SEQ ID NO: 382626 - DNA, 828 bp, Homo Sapiens; identical to SEQ ID NO: 350015
  misc_feature (121)..(121): n is a, c, g, or t
  misc_feature (628)..(628): n is a, c, g, or t

SEQ ID NO: 382627 - DNA, 992 bp, Homo Sapiens; identical to SEQ ID NO: 350016
  misc_feature (978)..(978): n is a, c, g, or t

SEQ ID NO: 382628 - DNA, 278 bp, Homo Sapiens; identical to SEQ ID NO: 350017
  misc_feature (72)..(72): n is a, c, g, or t
  misc_feature (79)..(79): n is a, c, g, or t
  misc_feature (81)..(92): n is a, c, g, or t
  misc_feature (173)..(173): n is a, c, g, or t
  misc_feature (185)..(185): n is a, c, g, or t

SEQ ID NO: 382629 - DNA, 401 bp, Homo Sapiens; identical to SEQ ID NO: 350018
  misc_feature (390)..(390): n is a, c, g, or t

SEQ ID NO: 382630 - DNA, 3155 bp, Homo Sapiens; identical to SEQ ID NO: 350021
  misc_feature (187)..(223): n is a, c, g, or t
  misc_feature (267)..(311): n is a, c, g, or t
  misc_feature (475)..(500): n is a, c, g, or t

SEQ ID NO: 382631 - DNA, 1545 bp, Homo Sapiens; identical to SEQ ID NO: 350022
  misc_feature (437)..(437): n is a, c, g, or t

SEQ ID NO: 382632 - DNA, 680 bp, Homo Sapiens; identical to SEQ ID NO: 350023

SEQ ID NO: 382633 - DNA, 1717 bp, Homo Sapiens; identical to SEQ ID NO: 350024

SEQ ID NO: 382634 - DNA, 1607 bp, Homo Sapiens; identical to SEQ ID NO: 350025
  misc_feature (1545)..(1547): n is a, c, g, or t

SEQ ID NO: 382635 - DNA, 896 bp, Homo Sapiens; identical to SEQ ID NO: 350026
  misc_feature (675)..(692): n is a, c, g, or t

SEQ ID NO: 382636 - DNA, 1648 bp, Homo Sapiens; identical to SEQ ID NO: 350035
  misc_feature (1591)..(1591): n is a, c, g, or t

SEQ ID NO: 382637 - DNA, 1340 bp, Homo Sapiens; identical to SEQ ID NO: 350036

SEQ ID NO: 382638 - DNA, 2447 bp, Homo Sapiens; identical to SEQ ID NO: 350037
  misc_feature (2081)..(2098): n is a, c, g, or t

SEQ ID NO: 382639 - DNA, 563 bp, Homo Sapiens; identical to SEQ ID NO: 350038
  misc_feature (404)..(404): n is a, c, g, or t
  misc_feature (419)..(419): n is a, c, g, or t
  misc_feature (430)..(430): n is a, c, g, or t
  misc_feature (515)..(515): n is a, c, g, or t
  misc_feature (533)..(533): n is a, c, g, or t

SEQ ID NO: 382640 - DNA, 1727 bp, Homo Sapiens; identical to SEQ ID NO: 350041
  misc_feature (1299)..(1409): n is a, c, g, or t
  misc_feature (1534)..(1543): n is a, c, g, or t

SEQ ID NO: 382641 - DNA, 1817 bp, Homo Sapiens; identical to SEQ ID NO: 350042

SEQ ID NO: 382642 - DNA, 910 bp, Homo Sapiens; identical to SEQ ID NO: 350043

SEQ ID NO: 382643 - DNA, 1103 bp, Homo Sapiens; identical to SEQ ID NO: 350044

SEQ ID NO: 382644 - DNA, 2042 bp, Homo Sapiens; identical to SEQ ID NO: 350048
  misc_feature (547)..(596): n is a, c, g, or t
  misc_feature (1702)..(1722): n is a, c, g, or t

SEQ ID NO: 382645 - DNA, 1401 bp, Homo Sapiens; identical to SEQ ID NO: 350049
  misc_feature (422)..(499): n is a, c, g, or t

SEQ ID NO: 382646 - DNA, 1939 bp, Homo Sapiens; identical to SEQ ID NO: 350051
  misc_feature (1543)..(1544): n is a, c, g, or t
  misc_feature (1546)..(1546): n is a, c, g, or t
  misc_feature (1922)..(1922): n is a, c, g, or t

SEQ ID NO: 382647 - DNA, 542 bp, Homo Sapiens; identical to SEQ ID NO: 350052
  misc_feature (16)..(16): n is a, c, g, or t
  misc_feature (36)..(36): n is a, c, g, or t
  misc_feature (54)..(54): n is a, c, g, or t
  misc_feature (99)..(99): n is a, c, g, or t
  misc_feature (314)..(314): n is a, c, g, or t

SEQ ID NO: 382648 - DNA, 438 bp, Homo Sapiens; identical to SEQ ID NO: 350054
  misc_feature (236)..(252): n is a, c, g, or t

SEQ ID NO: 382649 - DNA, 1560 bp, Homo Sapiens; identical to SEQ ID NO: 350055
  misc_feature (528)..(538): n is a, c, g, or t
  misc_feature (630)..(630): n is a, c, g, or t

SEQ ID NO: 382650 - DNA, 512 bp, Homo Sapiens; identical to SEQ ID NO: 350056

SEQ ID NO: 382651 - DNA, 966 bp, Homo Sapiens; identical to SEQ ID NO: 350059
  misc_feature (849)..(849): n is a, c, g, or t
  misc_feature (900)..(900): n is a, c, g, or t
  misc_feature (932)..(932): n is a, c, g, or t
  misc_feature (945)..(945): n is a, c, g, or t

SEQ ID NO: 382652 - DNA, 926 bp, Homo Sapiens; identical to SEQ ID NO: 350060

SEQ ID NO: 382653 - DNA, 965 bp, Homo Sapiens; identical to SEQ ID NO: 350061
  misc_feature (454)..(809): n is a, c, g, or t

SEQ ID NO: 382654 - DNA, 449 bp, Homo Sapiens; identical to SEQ ID NO: 350062
  misc_feature (22)..(22): n is a, c, g, or t
  misc_feature (28)..(28): n is a, c, g, or t
  misc_feature (41)..(41): n is a, c, g, or t
  misc_feature (48)..(48): n is a, c, g, or t
  misc_feature (66)..(66): n is a, c, g, or t
  misc_feature (87)..(87): n is a, c, g, or t
  misc_feature (150)..(150): n is a, c, g, or t

SEQ ID NO: 382655 - DNA, 998 bp, Homo Sapiens; identical to SEQ ID NO: 350063
  misc_feature (5)..(5): n is a, c, g, or t
  misc_feature (7)..(7): n is a, c, g, or t
  misc_feature (29)..(29): n is a, c, g, or t
  misc_feature (45)..(45): n is a, c, g, or t
  misc_feature (69)..(69): n is a, c, g, or t
  misc_feature (78)..(78): n is a, c, g, or t
  misc_feature (90)..(90): n is a, c, g, or t
  misc_feature (94)..(94): n is a, c, g, or t
  misc_feature (98)..(98): n is a, c, g, or t
  misc_feature (101)..(101): n is a, c, g, or t
  misc_feature (117)..(117): n is a, c, g, or t
  misc_feature (122)..(122): n is a, c, g, or t
  misc_feature (139)..(139): n is a, c, g, or t
  misc_feature (198)..(198): n is a, c, g, or t
  misc_feature (203)..(203): n is a, c, g, or t
  misc_feature (241)..(241): n is a, c, g, or t
  misc_feature (245)..(245): n is a, c, g, or t
  misc_feature (248)..(248): n is a, c, g, or t
  misc_feature (267)..(267): n is a, c, g, or t
  misc_feature (276)..(276): n is a, c, g, or t
  misc_feature (322)..(322): n is a, c, g, or t
  misc_feature (352)..(352): n is a, c, g, or t
  misc_feature (368)..(368): n is a, c, g, or t

SEQ ID NO: 382656 - DNA, 749 bp, Homo Sapiens; identical to SEQ ID NO: 350064
  misc_feature (49)..(49): n is a, c, g, or t
  misc_feature (60)..(60): n is a, c, g, or t
  misc_feature (287)..(333): n is a, c, g, or t

SEQ ID NO: 382657 - DNA, 1181 bp, Homo Sapiens; identical to SEQ ID NO: 350065
  misc_feature (54)..(91): n is a, c, g, or t
  misc_feature (221)..(245): n is a, c, g, or t

SEQ ID NO: 382658 - DNA, 472 bp, Homo Sapiens; identical to SEQ ID NO: 350066

SEQ ID NO: 382659 - DNA, 1616 bp, Homo Sapiens; identical to SEQ ID NO: 350067
  misc_feature (1555)..(1555): n is a, c, g, or t

SEQ ID NO: 382660 - DNA, 570 bp, Homo Sapiens; identical to SEQ ID NO: 350069

SEQ ID NO: 382661 - DNA, 1910 bp, Homo Sapiens; identical to SEQ ID NO: 350070

SEQ ID NO: 382662 - DNA, 1056 bp, Homo Sapiens; identical to SEQ ID NO: 350075

SEQ ID NO: 382663 - DNA, 361 bp, Homo Sapiens; identical to SEQ ID NO: 350076

SEQ ID NO: 382664 - DNA, 926 bp, Homo Sapiens; identical to SEQ ID NO: 350080
  misc_feature (836)..(836): n is a, c, g, or t
  misc_feature (844)..(844): n is a, c, g, or t
  misc_feature (852)..(852): n is a, c, g, or t
  misc_feature (861)..(861): n is a, c, g, or t
  misc_feature (868)..(868): n is a, c, g, or t
  misc_feature (871)..(871): n is a, c, g, or t
  misc_feature (873)..(873): n is a, c, g, or t
  misc_feature (880)..(880): n is a, c, g, or t
  misc_feature (887)..(887): n is a, c, g, or t
  misc_feature (891)..(891): n is a, c, g, or t
  misc_feature (895)..(895): n is a, c, g, or t
  misc_feature (904)..(904): n is a, c, g, or t
  misc_feature (907)..(909): n is a, c, g, or t
  misc_feature (917)..(917): n is a, c, g, or t

SEQ ID NO: 382665 - DNA, 2019 bp, Homo Sapiens; identical to SEQ ID NO: 350081
  misc_feature (42)..(42): n is a, c, g, or t
  misc_feature (1138)..(1138): n is a, c, g, or t

SEQ ID NO: 382666 - DNA, 1627 bp, Homo Sapiens; identical to SEQ ID NO: 350082
  misc_feature (157)..(157): n is a, c, g, or t
  misc_feature (317)..(336): n is a, c, g, or t
  misc_feature (1135)..(1251): n is a, c, g, or t

SEQ ID NO: 382667 - DNA, 1674 bp, Homo Sapiens; identical to SEQ ID NO: 350083
  misc_feature (21)..(22): n is a, c, g, or t
  misc_feature (521)..(540): n is a, c, g, or t
  misc_feature (879)..(899): n is a, c, g, or t
  misc_feature (1505)..(1541): n is a, c, g, or t

SEQ ID NO: 382668 - DNA, 709 bp, Homo Sapiens; identical to SEQ ID NO: 350084
  misc_feature (78)..(93): n is a, c, g, or t
  misc_feature (138)..(138): n is a, c, g, or t

SEQ ID NO: 382669 - DNA, 972 bp, Homo Sapiens; identical to SEQ ID NO: 350087

SEQ ID NO: 382670 - DNA, 1931 bp, Homo Sapiens; identical to SEQ ID NO: 350088
  misc_feature (1063)..(1063): n is a, c, g, or t
  misc_feature (1085)..(1085): n is a, c, g, or t
  misc_feature (1143)..(1143): n is a, c, g, or t
  misc_feature (1161)..(1161): n is a, c, g, or t
  misc_feature (1188)..(1188): n is a, c, g, or t
  misc_feature (1265)..(1265): n is a, c, g, or t
  misc_feature (1304)..(1304): n is a, c, g, or t
  misc_feature (1405)..(1405): n is a, c, g, or t
  misc_feature (1422)..(1422): n is a, c, g, or t
  misc_feature (1426)..(1426): n is a, c, g, or t
  misc_feature (1553)..(1553): n is a, c, g, or t
  misc_feature (1557)..(1557): n is a, c, g, or t
  misc_feature (1728)..(1728): n is a, c, g, or t
  misc_feature (1788)..(1788): n is a, c, g, or t
  misc_feature (1897)..(1897): n is a, c, g, or t

SEQ ID NO: 382671 - DNA, 1177 bp, Homo Sapiens; identical to SEQ ID NO: 350089
  misc_feature (341)..(387): n is a, c, g, or t
  misc_feature (906)..(907): n is a, c, g, or t
  misc_feature (940)..(942): n is a, c, g, or t
  misc_feature (1019)..(1020): n is a, c, g, or t
  misc_feature (1039)..(1039): n is a, c, g, or t
  misc_feature (1042)..(1042): n is a, c, g, or t
  misc_feature (1047)..(1047): n is a, c, g, or t
  misc_feature (1056)..(1056): n is a, c, g, or t
  misc_feature (1108)..(1108): n is a, c, g, or t

SEQ ID NO: 382672 - DNA, 1114 bp, Homo Sapiens; identical to SEQ ID NO: 350090
  misc_feature (934)..(934): n is a, c, g, or t
  misc_feature (1013)..(1013): n is a, c, g, or t
  misc_feature (1024)..(1024): n is a, c, g, or t
  misc_feature (1056)..(1056): n is a, c, g, or t
  misc_feature (1064)..(1064): n is a, c, g, or t
  misc_feature (1067)..(1067): n is a, c, g, or t
  misc_feature (1091)..(1091): n is a, c, g, or t

SEQ ID NO: 382673 - DNA, 911 bp, Homo Sapiens; identical to SEQ ID NO: 350091
  misc_feature (798)..(798): n is a, c, g, or t

SEQ ID NO: 382674 - DNA, 1433 bp, Homo Sapiens; identical to SEQ ID NO: 350096

SEQ ID NO: 382675 - DNA, 902 bp, Homo Sapiens; identical to SEQ ID NO: 350097
  misc_feature (320)..(320): n is a, c, g, or t
  misc_feature (826)..(862): n is a, c, g, or t

SEQ ID NO: 382676 - DNA, 1036 bp, Homo Sapiens; identical to SEQ ID NO: 350103

SEQ ID NO: 382677 - DNA, 963 bp, Homo Sapiens; identical to SEQ ID NO: 350104

SEQ ID NO: 382678 - DNA, 2039 bp, Homo Sapiens; identical to SEQ ID NO: 350105
  misc_feature (1536)..(1556): n is a, c, g, or t
  misc_feature (1968)..(1998): n is a, c, g, or t

SEQ ID NO: 382679 - DNA, 1100 bp, Homo Sapiens; identical to SEQ ID NO: 350106

SEQ ID NO: 382680 - DNA, 238 bp, Homo Sapiens; identical to SEQ ID NO: 350108

SEQ ID NO: 382681 - DNA, 1497 bp, Homo Sapiens; identical to SEQ ID NO: 350109
  misc_feature (58)..(106): n is a, c, g, or t

SEQ ID NO: 382682 - DNA, 397 bp, Homo Sapiens; identical to SEQ ID NO: 350110
  misc_feature (79)..(79): n is a, c, g, or t
  misc_feature (165)..(165): n is a, c, g, or t

SEQ ID NO: 382683 - DNA, 1000 bp, Homo Sapiens; identical to SEQ ID NO: 350111
  misc_feature (20)..(20): n is a, c, g, or t
  misc_feature (24)..(24): n is a, c, g, or t
  misc_feature (27)..(28): n is a, c, g, or t
  misc_feature (32)..(32): n is a, c, g, or t
  misc_feature (34)..(34): n is a, c, g, or t
  misc_feature (38)..(39): n is a, c, g, or t
  misc_feature (42)..(42): n is a, c, g, or t
  misc_feature (50)..(52): n is a, c, g, or t
  misc_feature (55)..(55): n is a, c, g, or t
  misc_feature (68)..(68): n is a, c, g, or t
  misc_feature (71)..(71): n is a, c, g, or t
  misc_feature (73)..(73): n is a, c, g, or t
  misc_feature (77)..(77): n is a, c, g, or t
  misc_feature (81)..(81): n is a, c, g, or t
  misc_feature (88)..(88): n is a, c, g, or t
  misc_feature (107)..(108): n is a, c, g, or t
  misc_feature (110)..(110): n is a, c, g, or t
  misc_feature (113)..(113): n is a, c, g, or t
  misc_feature (116)..(116): n is a, c, g, or t
  misc_feature (123)..(123): n is a, c, g, or t
  misc_feature (148)..(148): n is a, c, g, or t
  misc_feature (158)..(158): n is a, c, g, or t
  misc_feature (160)..(160): n is a, c, g, or t
  misc_feature (163)..(164): n is a, c, g, or t
  misc_feature (169)..(169): n is a, c, g, or t
  misc_feature (171)..(171): n is a, c, g, or t
  misc_feature (173)..(173): n is a, c, g, or t
  misc_feature (176)..(176): n is a, c, g, or t
  misc_feature (181)..(181): n is a, c, g, or t
  misc_feature (236)..(236): n is a, c, g, or t
  misc_feature (255)..(255): n is a, c, g, or t

SEQ ID NO: 382684 - DNA, 1247 bp, Homo Sapiens; identical to SEQ ID NO: 350112
  misc_feature (671)..(680): n is a, c, g, or t

SEQ ID NO: 382685 - DNA, 1877 bp, Homo Sapiens; identical to SEQ ID NO: 350113

SEQ ID NO: 382686 - DNA, 1163 bp, Homo Sapiens; identical to SEQ ID NO: 350114
  misc_feature (879)..(879): n is a, c, g, or t
  misc_feature (929)..(929): n is a, c, g, or t
  misc_feature (1011)..(1011): n is a, c, g, or t
  misc_feature (1052)..(1052): n is a, c, g, or t
  misc_feature (1118)..(1118): n is a, c, g, or t

SEQ ID NO: 382687 - DNA, 379 bp, Homo Sapiens; identical to SEQ ID NO: 350115

SEQ ID NO: 382688 - DNA, 1319 bp, Homo Sapiens; identical to SEQ ID NO: 350116
  misc_feature (1005)..(1124): n is a, c, g, or t

SEQ ID NO: 382689 - DNA, 431 bp, Homo Sapiens; identical to SEQ ID NO: 350117

SEQ ID NO: 382690 - DNA, 1015 bp, Homo Sapiens; identical to SEQ ID NO: 350118
  misc_feature (765)..(784): n is a, c, g, or t

SEQ ID NO: 382691 - DNA, 818 bp, Homo Sapiens; identical to SEQ ID NO: 15367
  misc_feature (676)..(722): n is a, c, g, or t
  misc_feature (770)..(770): n is a, c, g, or t

SEQ ID NO: 382692 - DNA, 831 bp, Homo Sapiens; identical to SEQ ID NO: 350120
  misc_feature (624)..(624): n is a, c, g, or t
  misc_feature (626)..(627): n is a, c, g, or t
  misc_feature (733)..(749): n is a, c, g, or t
  misc_feature (810)..(810): n is a, c, g, or t

SEQ ID NO: 382693 - DNA, 1312 bp, Homo Sapiens; identical to SEQ ID NO: 350122
  misc_feature (742)..(742): n is a, c, g, or t
  misc_feature (744)..(744): n is a, c, g, or t
  misc_feature (746)..(786): n is a, c, g, or t
  misc_feature (847)..(856): n is a, c, g, or t
  misc_feature (997)..(1007): n is a, c, g, or t
  misc_feature (1061)..(1070): n is a, c, g, or t
  misc_feature (1192)..(1227): n is a, c, g, or t
  misc_feature (1243)..(1254): n is a, c, g, or t

SEQ ID NO: 382694 - DNA, 789 bp, Homo Sapiens; identical to SEQ ID NO: 350123
  misc_feature (675)..(702): n is a, c, g, or t
  misc_feature (708)..(708): n is a, c, g, or t
  misc_feature (767)..(767): n is a, c, g, or t

SEQ ID NO: 382695 - DNA, 1386 bp, Homo Sapiens; identical to SEQ ID NO: 350125

SEQ ID NO: 382696 - DNA, 1464 bp, Homo Sapiens; identical to SEQ ID NO: 350126

SEQ ID NO: 382697 - DNA, 1359 bp, Homo Sapiens; identical to SEQ ID NO: 350127
  misc_feature (53)..(53): n is a, c, g, or t

SEQ ID NO: 382698 - DNA, 630 bp, Homo Sapiens; identical to SEQ ID NO: 350128

SEQ ID NO: 382699 - DNA, 920 bp, Homo Sapiens; identical to SEQ ID NO: 350129

SEQ ID NO: 382700 - DNA, 840 bp, Homo Sapiens; identical to SEQ ID NO: 350130

SEQ ID NO: 382701 - DNA, 2355 bp, Homo Sapiens; identical to SEQ ID NO: 350131
  misc_feature (1409)..(1481): n is a, c, g, or t
  misc_feature (1665)..(1682): n is a, c, g, or t
  misc_feature (1961)..(1961): n is a, c, g, or t
  misc_feature (2213)..(2239): n is a, c, g, or t
  misc_feature (2297)..(2297): n is a, c, g, or t

SEQ ID NO: 382702 - DNA, 925 bp, Homo Sapiens; identical to SEQ ID NO: 350132

SEQ ID NO: 382703 - DNA, 1859 bp, Homo Sapiens; identical to SEQ ID NO: 350133

SEQ ID NO: 382704 - DNA, 460 bp, Homo Sapiens; identical to SEQ ID NO: 350134

SEQ ID NO: 382705 - DNA, 600 bp, Homo Sapiens; identical to SEQ ID NO: 350135
  misc_feature (49)..(50): n is a, c, g, or t
  misc_feature (556)..(556): n is a, c, g, or t
  misc_feature (561)..(561): n is a, c, g, or t
  misc_feature (580)..(580): n is a, c, g, or t

SEQ ID NO: 382706 - DNA, 1933 bp, Homo Sapiens; identical to SEQ ID NO: 350138
  misc_feature (1208)..(1208): n is a, c, g, or t

SEQ ID NO: 382707 - DNA, 922 bp, Homo Sapiens; identical to SEQ ID NO: 350139
  misc_feature (13)..(13): n is a, c, g, or t
  misc_feature (23)..(23): n is a, c, g, or t
  misc_feature (30)..(30): n is a, c, g, or t
  misc_feature (33)..(33): n is a, c, g, or t
  misc_feature (61)..(61): n is a, c, g, or t
  misc_feature (63)..(63): n is a, c, g, or t
  misc_feature (69)..(69): n is a, c, g, or t
  misc_feature (74)..(74): n is a, c, g, or t
  misc_feature (76)..(76): n is a, c, g, or t
  misc_feature (87)..(90): n is a, c, g, or t
  misc_feature (92)..(93): n is a, c, g, or t

SEQ ID NO: 382708 - DNA, 1938 bp, Homo Sapiens; identical to SEQ ID NO: 350140

SEQ ID NO: 382709 - DNA, 871 bp, Homo Sapiens; identical to SEQ ID NO: 350141
  misc_feature (675)..(699): n is a, c, g, or t

SEQ ID NO: 382710 - DNA, 697 bp, Homo Sapiens; identical to SEQ ID NO: 350142

SEQ ID NO: 382711 - DNA, 546 bp, Homo Sapiens; identical to SEQ ID NO: 350143

SEQ ID NO: 382712 - DNA, 434 bp, Homo Sapiens; identical to SEQ ID NO: 350144
  misc_feature (13)..(13): n is a, c, g, or t
  misc_feature (21)..(21): n is a, c, g, or t
  misc_feature (84)..(120): n is a, c, g, or t
  misc_feature (348)..(348): n is a, c, g, or t

SEQ ID NO: 382713 - DNA, 1095 bp, Homo Sapiens; identical to SEQ ID NO: 350145
  misc_feature (3)..(3): n is a, c, g, or t
  misc_feature (6)..(6): n is a, c, g, or t
  misc_feature (8)..(8): n is a, c, g, or t
  misc_feature (18)..(18): n is a, c, g, or t
  misc_feature (22)..(22): n is a, c, g, or t
  misc_feature (24)..(24): n is a, c, g, or t
  misc_feature (31)..(31): n is a, c, g, or t
  misc_feature (95)..(95): n is a, c, g, or t

SEQ ID NO: 382714 - DNA, 2514 bp, Homo Sapiens; identical to SEQ ID NO: 350146
  misc_feature (2443)..(2443): n is a, c, g, or t
  misc_feature (2482)..(2482): n is a, c, g, or t
  misc_feature (2489)..(2489): n is a, c, g, or t

SEQ ID NO: 382715 - DNA, 495 bp, Homo Sapiens; identical to SEQ ID NO: 350147

SEQ ID NO: 382716 - DNA, 517 bp, Homo Sapiens; identical to SEQ ID NO: 350152
  misc_feature (398)..(452): n is a, c, g, or t

SEQ ID NO: 382717 - DNA, 2893 bp, Homo Sapiens; identical to SEQ ID NO: 350153
  misc_feature (1583)..(1583): n is a, c, g, or t
  misc_feature (2653)..(2662): n is a, c, g, or t

SEQ ID NO: 382718 - DNA, 3489 bp, Homo Sapiens; identical to SEQ ID NO: 350155
  misc_feature (2419)..(2601): n is a, c, g, or t

SEQ ID NO: 382719 - DNA, 528 bp, Homo Sapiens; identical to SEQ ID NO: 350156
  misc_feature (501)..(501): n is a, c, g, or t

SEQ ID NO: 382720 - DNA, 661 bp, Homo Sapiens; identical to SEQ ID NO: 350157
  misc_feature (49)..(49): n is a, c, g, or t
  misc_feature (67)..(67): n is a, c, g, or t
  misc_feature (78)..(78): n is a, c, g, or t
  misc_feature (324)..(324): n is a, c, g, or t
  misc_feature (616)..(616): n is a, c, g, or t
  misc_feature (619)..(619): n is a, c, g, or t

SEQ ID NO: 382721 - DNA, 396 bp, Homo Sapiens; identical to SEQ ID NO: 350158
  misc_feature (355)..(355): n is a, c, g, or t
  misc_feature (370)..(370): n is a, c, g, or t
  misc_feature (384)..(384): n is a, c, g, or t

SEQ ID NO: 382722 - DNA, 2563 bp, Homo Sapiens; identical to SEQ ID NO: 350159

SEQ ID NO: 382723 - DNA, 1332 bp, Homo Sapiens; identical to SEQ ID NO: 350160
  misc_feature (1258)..(1266): n is a, c, g, or t

SEQ ID NO: 382724 - DNA, 475 bp, Homo Sapiens; identical to SEQ ID NO: 350163

SEQ ID NO: 382725 - DNA, 798 bp, Homo Sapiens; identical to SEQ ID NO: 350164

SEQ ID NO: 382726 - DNA, 999 bp, Homo Sapiens; identical to SEQ ID NO: 350166
  misc_feature (420)..(483): n is a, c, g, or t

SEQ ID NO: 382727 - DNA, 2823 bp, Homo Sapiens; identical to SEQ ID NO: 350167
  misc_feature (72)..(142): n is a, c, g, or t

SEQ ID NO: 382728 - DNA, 900 bp, Homo Sapiens; identical to SEQ ID NO: 350168
  misc_feature (837)..(837): n is a, c, g, or t
  misc_feature (843)..(843): n is a, c, g, or t
  misc_feature (860)..(860): n is a, c, g, or t

SEQ ID NO: 382729 - DNA, 854 bp, Homo Sapiens; identical to SEQ ID NO: 350169

SEQ ID NO: 382730 - DNA, 812 bp, Homo Sapiens; identical to SEQ ID NO: 350171

SEQ ID NO: 382731 - DNA, 1207 bp, Homo Sapiens; identical to SEQ ID NO: 350172
  misc_feature (687)..(789): n is a, c, g, or t

SEQ ID NO: 382732 - DNA, 2299 bp, Homo Sapiens; identical to SEQ ID NO: 350173
  misc_feature (132)..(147): n is a, c, g, or t

SEQ ID NO: 382733 - DNA, 1690 bp, Homo Sapiens; identical to SEQ ID NO: 350174

SEQ ID NO: 382734 - DNA, 340 bp, Homo Sapiens; identical to SEQ ID NO: 350175

SEQ ID NO: 382735 - DNA, 2291 bp, Homo Sapiens; identical to SEQ ID NO: 350181
  misc_feature (2205)..(2205): n is a, c, g, or t
  misc_feature (2261)..(2261): n is a, c, g, or t
  misc_feature (2263)..(2263): n is a, c, g, or t

SEQ ID NO: 382736 - DNA, 1245 bp, Homo Sapiens; identical to SEQ ID NO: 350182

SEQ ID NO: 382737 - DNA, 1069 bp, Homo Sapiens; identical to SEQ ID NO: 350183
  misc_feature (977)..(988): n is a, c, g, or t

SEQ ID NO: 382738 - DNA, 969 bp, Homo Sapiens; identical to SEQ ID NO: 350186

SEQ ID NO: 382739 - DNA, 1488 bp, Homo Sapiens; identical to SEQ ID NO: 350187
  misc_feature (1348)..(1404): n is a, c, g, or t

SEQ ID NO: 382740 - DNA, 899 bp, Homo Sapiens; identical to SEQ ID NO: 350188
  misc_feature (45)..(45): n is a, c, g, or t
  misc_feature (53)..(53): n is a, c, g, or t
  misc_feature (79)..(80): n is a, c, g, or t

SEQ ID NO: 382741 - DNA, 1077 bp, Homo Sapiens; identical to SEQ ID NO: 350189
  misc_feature (834)..(834): n is a, c, g, or t
  misc_feature (858)..(858): n is a, c, g, or t
  misc_feature (941)..(941): n is a, c, g, or t
  misc_feature (970)..(970): n is a, c, g, or t
  misc_feature (976)..(976): n is a, c, g, or t
  misc_feature (997)..(998): n is a, c, g, or t
  misc_feature (1001)..(1001): n is a, c, g, or t
  misc_feature (1004)..(1004): n is a, c, g, or t
  misc_feature (1008)..(1008): n is a, c, g, or t
  misc_feature (1012)..(1012): n is a, c, g, or t
  misc_feature (1022)..(1022): n is a, c, g, or t
  misc_feature (1025)..(1027): n is a, c, g, or t
  misc_feature (1036)..(1036): n is a, c, g, or t
  misc_feature (1050)..(1050): n is a, c, g, or t
  misc_feature (1063)..(1063): n is a, c, g, or t
  misc_feature (1065)..(1065): n is a, c, g, or t

SEQ ID NO: 382742 - DNA, 1473 bp, Homo Sapiens; identical to SEQ ID NO: 350190
  misc_feature (23)..(23): n is a, c, g, or t
  misc_feature (28)..(28): n is a, c, g, or t
  misc_feature (475)..(498): n is a, c, g, or t
  misc_feature (1274)..(1274): n is a, c, g, or t
  misc_feature (1385)..(1418): n is a, c, g, or t

SEQ ID NO: 382743 - DNA, 2440 bp, Homo Sapiens; identical to SEQ ID NO: 350191
  misc_feature (13)..(13): n is a, c, g, or t
  misc_feature (23)..(23): n is a, c, g, or t
  misc_feature (1096)..(1104): n is a, c, g, or t
  misc_feature (1115)..(1115): n is a, c, g, or t
  misc_feature (1310)..(1347): n is a, c, g, or t
  misc_feature (1695)..(1724): n is a, c, g, or t
  misc_feature (2123)..(2123): n is a, c, g, or t

SEQ ID NO: 382744 - DNA, 1023 bp, Homo Sapiens; identical to SEQ ID NO: 350192
  misc_feature (13)..(13): n is a, c, g, or t
  misc_feature (39)..(39): n is a, c, g, or t
  misc_feature (67)..(67): n is a, c, g, or t
  misc_feature (84)..(84): n is a, c, g, or t
  misc_feature (100)..(100): n is a, c, g, or t
  misc_feature (259)..(259): n is a, c, g, or t

SEQ ID NO: 382745 - DNA, 1092 bp, Homo Sapiens; identical to SEQ ID NO: 350193
  misc_feature (4)..(4): n is a, c, g, or t
  misc_feature (135)..(135): n is a, c, g, or t
  misc_feature (156)..(156): n is a, c, g, or t

SEQ ID NO: 382746 - DNA, 951 bp, Homo Sapiens; identical to SEQ ID NO: 350194

SEQ ID NO: 382747 - DNA, 800 bp, Homo Sapiens; identical to SEQ ID NO: 350195

SEQ ID NO: 382748 - DNA, 1842 bp, Homo Sapiens; identical to SEQ ID NO: 350196
  misc_feature (155)..(155): n is a, c, g, or t

SEQ ID NO: 382749 - DNA, 850 bp, Homo Sapiens; identical to SEQ ID NO: 350197
  misc_feature (699)..(699): n is a, c, g, or t

SEQ ID NO: 382750 - DNA, 1068 bp, Homo Sapiens; identical to SEQ ID NO: 350198
  misc_feature (1014)..(1014): n is a, c, g, or t

SEQ ID NO: 382751 - DNA, 1524 bp, Homo Sapiens; identical to SEQ ID NO: 350199
  misc_feature (441)..(441): n is a, c, g, or t
  misc_feature (598)..(717): n is a, c, g, or t

SEQ ID NO: 382752 - DNA, 1829 bp, Homo Sapiens; identical to SEQ ID NO: 350200
  misc_feature (1408)..(1534): n is a, c, g, or t
  misc_feature (1655)..(1655): n is a, c, g, or t

SEQ ID NO: 382753 - DNA, 1285 bp, Homo Sapiens; identical to SEQ ID NO: 350201
  misc_feature (987)..(987): n is a, c, g, or t

SEQ ID NO: 382754 - DNA, 1466 bp, Homo Sapiens; identical to SEQ ID NO: 350202

SEQ ID NO: 382755 - DNA, 1412 bp, Homo Sapiens; identical to SEQ ID NO: 350205
  misc_feature (1208)..(1228): n is a, c, g, or t

SEQ ID NO: 382756 - DNA, 930 bp, Homo Sapiens; identical to SEQ ID NO: 350206
  misc_feature (9)..(9): n is a, c, g, or t
  misc_feature (17)..(17): n is a, c, g, or t
  misc_feature (39)..(39): n is a, c, g, or t
  misc_feature (91)..(91): n is a, c, g, or t
  misc_feature (749)..(749): n is a, c, g, or t

SEQ ID NO: 382757 - DNA, 772 bp, Homo Sapiens; identical to SEQ ID NO: 350207

SEQ ID NO: 382758 - DNA, 906 bp, Homo Sapiens; identical to SEQ ID NO: 350208

SEQ ID NO: 382759 - DNA, 983 bp, Homo Sapiens; identical to SEQ ID NO: 350209

SEQ ID NO: 382760 - DNA, 2486 bp, Homo Sapiens; identical to SEQ ID NO: 350210
  misc_feature (53)..(53): n is a, c, g, or t
  misc_feature (136)..(136): n is a, c, g, or t
  misc_feature (212)..(212): n is a, c, g, or t
  misc_feature (268)..(268): n is a, c, g, or t
  misc_feature (392)..(392): n is a, c, g, or t

SEQ ID NO: 382761 - DNA, 418 bp, Homo Sapiens; identical to SEQ ID NO: 350211
  misc_feature (26)..(26): n is a, c, g, or t
  misc_feature (52)..(52): n is a, c, g, or t

SEQ ID NO: 382762 - DNA, 1737 bp, Homo Sapiens; identical to SEQ ID NO: 350212

SEQ ID NO: 382763 - DNA, 1297 bp, Homo Sapiens; identical to SEQ ID NO: 350213
  misc_feature (1097)..(1097): n is a, c, g, or t
  misc_feature (1117)..(1117): n is a, c, g, or t
  misc_feature (1129)..(1129): n is a, c, g, or t
  misc_feature (1177)..(1177): n is a, c, g, or t
  misc_feature (1228)..(1228): n is a, c, g, or t
  misc_feature (1238)..(1238): n is a, c, g, or t
  misc_feature (1256)..(1256): n is a, c, g, or t
  misc_feature (1258)..(1258): n is a, c, g, or t
  misc_feature (1286)..(1286): n is a, c, g, or t
  misc_feature (1290)..(1290): n is a, c, g, or t

SEQ ID NO: 382764 - DNA, 1562 bp, Homo Sapiens; identical to SEQ ID NO: 350214

SEQ ID NO: 382765 - DNA, 1766 bp, Homo Sapiens; identical to SEQ ID NO: 350215
  misc_feature (700)..(701): n is a, c, g, or t
  misc_feature (712)..(714): n is a, c, g, or t
  misc_feature (1536)..(1537): n is a, c, g, or t
  misc_feature (1542)..(1551): n is a, c, g, or t

SEQ ID NO: 382766 - DNA, 783 bp, Homo Sapiens; identical to SEQ ID NO: 350216

SEQ ID NO: 382767 - DNA, 1034 bp, Homo Sapiens; identical to SEQ ID NO: 350217
  misc_feature (901)..(977): n is a, c, g, or t

SEQ ID NO: 382768 - DNA, 1492 bp, Homo Sapiens; identical to SEQ ID NO: 350218

SEQ ID NO: 382769 - DNA, 1717 bp, Homo Sapiens; identical to SEQ ID NO: 350219
  misc_feature (893)..(893): n is a, c, g, or t

SEQ ID NO: 382770 - DNA, 1217 bp, Homo Sapiens; identical to SEQ ID NO: 350221
  misc_feature (188)..(188): n is a, c, g, or t
  misc_feature (372)..(372): n is a, c, g, or t
  misc_feature (374)..(376): n is a, c, g, or t
  misc_feature (386)..(386): n is a, c, g, or t
  misc_feature (436)..(436): n is a, c, g, or t
  misc_feature (483)..(483): n is a, c, g, or t
  misc_feature (490)..(493): n is a, c, g, or t
  misc_feature (519)..(519): n is a, c, g, or t
  misc_feature (523)..(525): n is a, c, g, or t
  misc_feature (527)..(527): n is a, c, g, or t

SEQ ID NO: 382771 - DNA, 881 bp, Homo Sapiens; identical to SEQ ID NO: 350222
  misc_feature (509)..(554): n is a, c, g, or t
  misc_feature (560)..(560): n is a, c, g, or t
  misc_feature (599)..(599): n is a, c, g, or t
  misc_feature (757)..(763): n is a, c, g, or t
  misc_feature (766)..(766): n is a, c, g, or t
  misc_feature (769)..(769): n is a, c, g, or t
  misc_feature (784)..(784): n is a, c, g, or t
  misc_feature (790)..(790): n is a, c, g, or t
  misc_feature (796)..(796): n is a, c, g, or t
  misc_feature (800)..(800): n is a, c, g, or t
  misc_feature (804)..(804): n is a, c, g, or t
  misc_feature (809)..(809): n is a, c, g, or t
  misc_feature (812)..(812): n is a, c, g, or t

SEQ ID NO: 382772 - DNA, 1383 bp, Homo Sapiens; identical to SEQ ID NO: 350223

SEQ ID NO: 382773 - DNA, 1025 bp, Homo Sapiens; identical to SEQ ID NO: 350224

SEQ ID NO: 382774 - DNA, 777 bp, Homo Sapiens; identical to SEQ ID NO: 350225
  misc_feature (143)..(143): n is a, c, g, or t
  misc_feature (555)..(555): n is a, c, g, or t
  misc_feature (703)..(703): n is a, c, g, or t
  misc_feature (767)..(767): n is a, c, g, or t

SEQ ID NO: 382775 - DNA, 512 bp, Homo Sapiens; identical to SEQ ID NO: 350226
  misc_feature (31)..(31): n is a, c, g, or t
  misc_feature (57)..(57): n is a, c, g, or t

SEQ ID NO: 382776 - DNA, 1643 bp, Homo Sapiens; identical to SEQ ID NO: 350227

SEQ ID NO: 382777 - DNA, 902 bp, Homo Sapiens; identical to SEQ ID NO: 350228

SEQ ID NO: 382778 - DNA, 500 bp, Homo Sapiens; identical to SEQ ID NO: 350230

SEQ ID NO: 382779 - DNA, 2143 bp, Homo Sapiens; identical to SEQ ID NO: 350231

SEQ ID NO: 382780 - DNA, 1851 bp, Homo Sapiens; identical to SEQ ID NO: 350234
  misc_feature (11)..(11): n is a, c, g, or t
  misc_feature (17)..(17): n is a, c, g, or t
  misc_feature (19)..(19): n is a, c, g, or t
  misc_feature (36)..(37): n is a, c, g, or t
  misc_feature (816)..(816): n is a, c, g, or t

SEQ ID NO: 382781 - DNA, 2123 bp, Homo Sapiens; identical to SEQ ID NO: 350235

SEQ ID NO: 382782 - DNA, 471 bp, Homo Sapiens; identical to SEQ ID NO: 350236
  misc_feature (37)..(37): n is a, c, g, or t
  misc_feature (77)..(77): n is a, c, g, or t

SEQ ID NO: 382783 - DNA, 1829 bp, Homo Sapiens; identical to SEQ ID NO: 350237
  misc_feature (1806)..(1806): n is a, c, g, or t
  misc_feature (1813)..(1813): n is a, c, g, or t
  misc_feature (1823)..(1823): n is a, c, g, or t

SEQ ID NO: 382784 - DNA, 888 bp, Homo Sapiens; identical to SEQ ID NO: 350238
  misc_feature (43)..(43): n is a, c, g, or t

SEQ ID NO: 382785 - DNA, 700 bp, Homo Sapiens; identical to SEQ ID NO: 350241

SEQ ID NO: 382786 - DNA, 1134 bp, Homo Sapiens; identical to SEQ ID NO: 350242
  misc_feature (10)..(10): n is a, c, g, or t
  misc_feature (13)..(13): n is a, c, g, or t
  misc_feature (21)..(21): n is a, c, g, or t
  misc_feature (29)..(29): n is a, c, g, or t
  misc_feature (51)..(51): n is a, c, g, or t
  misc_feature (55)..(55): n is a, c, g, or t
  misc_feature (57)..(57): n is a, c, g, or t
  misc_feature (61)..(61): n is a, c, g, or t
  misc_feature (73)..(73): n is a, c, g, or t
  misc_feature (75)..(75): n is a, c, g, or t
  misc_feature (78)..(78): n is a, c, g, or t
  misc_feature (91)..(91): n is a, c, g, or t
  misc_feature (108)..(108): n is a, c, g, or t
  misc_feature (111)..(111): n is a, c, g, or t
  misc_feature (134)..(134): n is a, c, g, or t
  misc_feature (154)..(154): n is a, c, g, or t
  misc_feature (166)..(166): n is a, c, g, or t
  misc_feature (168)..(168): n is a, c, g, or t
  misc_feature (172)..(172): n is a, c, g, or t
  misc_feature (181)..(181): n is a, c, g, or t

SEQ ID NO: 382787 - DNA, 1014 bp, Homo Sapiens; identical to SEQ ID NO: 350243

SEQ ID NO: 382788 - DNA, 1214 bp, Homo Sapiens; identical to SEQ ID NO: 350244
  misc_feature (140)..(140): n is a, c, g, or t
  misc_feature (586)..(638): n is a, c, g, or t

SEQ ID NO: 382789 - DNA, 1131 bp, Homo Sapiens; identical to SEQ ID NO: 350245

SEQ ID NO: 382790 - DNA, 1044 bp, Homo Sapiens; identical to SEQ ID NO: 350246
  misc_feature (13)..(13): n is a, c, g, or t
  misc_feature (20)..(20): n is a, c, g, or t
  misc_feature (23)..(23): n is a, c, g, or t
  misc_feature (37)..(37): n is a, c, g, or t
  misc_feature (45)..(45): n is a, c, g, or t
  misc_feature (72)..(72): n is a, c, g, or t
  misc_feature (77)..(77): n is a, c, g, or t
  misc_feature (83)..(83): n is a, c, g, or t
  misc_feature (85)..(85): n is a, c, g, or t
  misc_feature (98)..(98): n is a, c, g, or t
  misc_feature (105)..(105): n is a, c, g, or t
  misc_feature (147)..(147): n is a, c, g, or t
  misc_feature (151)..(151): n is a, c, g, or t
  misc_feature (158)..(158): n is a, c, g, or t
  misc_feature (996)..(996): n is a, c, g, or t

SEQ ID NO: 382791 - DNA, 1048 bp, Homo Sapiens; identical to SEQ ID NO: 350247
  misc_feature (943)..(943): n is a, c, g, or t
  misc_feature (946)..(946): n is a, c, g, or t
  misc_feature (956)..(956): n is a, c, g, or t
  misc_feature (958)..(958): n is a, c, g, or t
  misc_feature (970)..(970): n is a, c, g, or t
  misc_feature (978)..(978): n is a, c, g, or t
  misc_feature (984)..(984): n is a, c, g, or t
  misc_feature (989)..(989): n is a, c, g, or t
  misc_feature (998)..(998): n is a, c, g, or t
  misc_feature (1009)..(1010): n is a, c, g, or t
  misc_feature (1012)..(1012): n is a, c, g, or t
  misc_feature (1014)..(1014): n is a, c, g, or t
  misc_feature (1022)..(1024): n is a, c, g, or t

SEQ ID NO: 382792 - DNA, 1017 bp, Homo Sapiens; identical to SEQ ID NO: 350248
  misc_feature (49)..(49): n is a, c, g, or t
  misc_feature (234)..(234): n is a, c, g, or t
  misc_feature (903)..(903): n is a, c, g, or t
  misc_feature (906)..(906): n is a, c, g, or t
  misc_feature (930)..(930): n is a, c, g, or t
  misc_feature (938)..(938): n is a, c, g, or t
  misc_feature (940)..(940): n is a, c, g, or t
  misc_feature (945)..(945): n is a, c, g, or t
  misc_feature (947)..(947): n is a, c, g, or t
  misc_feature (951)..(951): n is a, c, g, or t
  misc_feature (972)..(972): n is a, c, g, or t
  misc_feature (975)..(975): n is a, c, g, or t
  misc_feature (979)..(979): n is a, c, g, or t
  misc_feature (981)..(981): n is a, c, g, or t
  misc_feature (985)..(985): n is a, c, g, or t
  misc_feature (987)..(987): n is a, c, g, or t
  misc_feature (991)..(991): n is a, c, g, or t
  misc_feature (1011)..(1011): n is a, c, g, or t

SEQ ID NO: 382793 - DNA, 1149 bp, Homo Sapiens; identical to SEQ ID NO: 350249

SEQ ID NO: 382794 - DNA, 1128 bp, Homo Sapiens; identical to SEQ ID NO: 350250
  misc_feature (47)..(83): n is a, c, g, or t
  misc_feature (1005)..(1005): n is a, c, g, or t
  misc_feature (1047)..(1047): n is a, c, g, or t
  misc_feature (1067)..(1067): n is a, c, g, or t

SEQ ID NO: 382795 - DNA, 1404 bp, Homo Sapiens; identical to SEQ ID NO: 350251

SEQ ID NO: 382796 - DNA, 526 bp, Homo Sapiens; identical to SEQ ID NO: 350252
  misc_feature (514)..(514): n is a, c, g, or t

SEQ ID NO: 382797 - DNA, 389 bp, Homo Sapiens; identical to SEQ ID NO: 350253

SEQ ID NO: 382798 - DNA, 1458 bp, Homo Sapiens; identical to SEQ ID NO: 350257
  misc_feature (18)..(18): n is a, c, g, or t
  misc_feature (25)..(25): n is a, c, g, or t
  misc_feature (46)..(46): n is a, c, g, or t
  misc_feature (68)..(68): n is a, c, g, or t
  misc_feature (80)..(80): n is a, c, g, or t
  misc_feature (147)..(147): n is a, c, g, or t
  misc_feature (214)..(214): n is a, c, g, or t

SEQ ID NO: 382799 - DNA, 925 bp, Homo Sapiens; identical to SEQ ID NO: 350258

SEQ ID NO: 382800 - DNA, 1104 bp, Homo Sapiens; identical to SEQ ID NO: 350259
  misc_feature (996)..(996): n is a, c, g, or t
  misc_feature (1001)..(1001): n is a, c, g, or t
  misc_feature (1016)..(1016): n is a, c, g, or t
  misc_feature (1030)..(1030): n is a, c, g, or t
  misc_feature (1041)..(1041): n is a, c, g, or t
  misc_feature (1049)..(1049): n is a, c, g, or t
  misc_feature (1051)..(1051): n is a, c, g, or t
  misc_feature (1059)..(1059): n is a, c, g, or t
  misc_feature (1064)..(1064): n is a, c, g, or t
  misc_feature (1074)..(1074): n is a, c, g, or t

SEQ ID NO: 382801 - DNA, 1144 bp, Homo Sapiens; identical to SEQ ID NO: 350260
  misc_feature (9)..(9): n is a, c, g, or t
  misc_feature (18)..(18): n is a, c, g, or t
  misc_feature (22)..(22): n is a, c, g, or t
  misc_feature (38)..(41): n is a, c, g, or t
  misc_feature (47)..(47): n is a, c, g, or t

SEQ ID NO: 382802 - DNA, 1364 bp, Homo Sapiens; identical to SEQ ID NO: 350261
  misc_feature (28)..(28): n is a, c, g, or t
  misc_feature (42)..(43): n is a, c, g, or t
  misc_feature (66)..(69): n is a, c, g, or t
  misc_feature (71)..(73): n is a, c, g, or t
  misc_feature (76)..(76): n is a, c, g, or t
  misc_feature (83)..(83): n is a, c, g, or t
  misc_feature (89)..(89): n is a, c, g, or t
  misc_feature (92)..(92): n is a, c, g, or t
  misc_feature (97)..(97): n is a, c, g, or t
  misc_feature (101)..(101): n is a, c, g, or t
  misc_feature (103)..(103): n is a, c, g, or t
  misc_feature (110)..(111): n is a, c, g, or t
  misc_feature (116)..(116): n is a, c, g, or t
  misc_feature (123)..(124): n is a, c, g, or t
  misc_feature (139)..(140): n is a, c, g, or t
  misc_feature (158)..(158): n is a, c, g, or t
  misc_feature (163)..(163): n is a, c, g, or t
  misc_feature (165)..(165): n is a, c, g, or t
  misc_feature (171)..(171): n is a, c, g, or t
  misc_feature (198)..(199): n is a, c, g, or t
  misc_feature (203)..(205): n is a, c, g, or t
  misc_feature (209)..(211): n is a, c, g, or t
  misc_feature (218)..(218): n is a, c, g, or t
  misc_feature (220)..(223): n is a, c, g, or t
  misc_feature (226)..(226): n is a, c, g, or t
  misc_feature (228)..(228): n is a, c, g, or t
  misc_feature (231)..(231): n is a, c, g, or t
  misc_feature (234)..(234): n is a, c, g, or t
  misc_feature (239)..(239): n is a, c, g, or t
  misc_feature (241)..(242): n is a, c, g, or t
  misc_feature (249)..(249): n is a, c, g, or t
  misc_feature (251)..(255): n is a, c, g, or t
  misc_feature (260)..(260): n is a, c, g, or t
  misc_feature (262)..(264): n is a, c, g, or t
  misc_feature (270)..(270): n is a, c, g, or t
  misc_feature (272)..(272): n is a, c, g, or t
  misc_feature (277)..(277): n is a, c, g, or t
  misc_feature (283)..(283): n is a, c, g, or t
  misc_feature (287)..(288): n is a, c, g, or t
  misc_feature (295)..(295): n is a, c, g, or t
  misc_feature (301)..(301): n is a, c, g, or t
  misc_feature (304)..(304): n is a, c, g, or t
  misc_feature (308)..(308): n is a, c, g, or t
  misc_feature (321)..(321): n is a, c, g, or t
  misc_feature (781)..(781): n is a, c, g, or t
  misc_feature (787)..(787): n is a, c, g, or t
  misc_feature (798)..(798): n is a, c, g, or t
  misc_feature (800)..(800): n is a, c, g, or t
  misc_feature (860)..(860): n is a, c, g, or t
  misc_feature (941)..(941): n is a, c, g, or t
  misc_feature (1012)..(1012): n is a, c, g, or t
  misc_feature (1017)..(1017): n is a, c, g, or t
  misc_feature (1041)..(1041): n is a, c, g, or t
  misc_feature (1087)..(1087): n is a, c, g, or t
  misc_feature (1096)..(1096): n is a, c, g, or t
  misc_feature (1163)..(1163): n is a, c, g, or t
  misc_feature (1166)..(1166): n is a, c, g, or t
  misc_feature (1170)..(1171): n is a, c, g, or t
  misc_feature (1178)..(1178): n is a, c, g, or t
  misc_feature (1295)..(1295): n is a, c, g, or t
  misc_feature (1313)..(1313): n is a, c, g, or t
  misc_feature (1344)..(1344): n is a, c, g, or t

SEQ ID NO: 382803 - DNA, 1953 bp, Homo Sapiens; identical to SEQ ID NO: 350262
  misc_feature (1125)..(1125): n is a, c, g, or t
  misc_feature (1855)..(1911): n is a, c, g, or t

SEQ ID NO: 382804 - DNA, 459 bp, Homo Sapiens; identical to SEQ ID NO: 350263

SEQ ID NO: 382805 - DNA, 1175 bp, Homo Sapiens; identical to SEQ ID NO: 350266

SEQ ID NO: 382806 - DNA, 1192 bp, Homo Sapiens; identical to SEQ ID NO: 350267

SEQ ID NO: 382807 - DNA, 1105 bp, Homo Sapiens; identical to SEQ ID NO: 350268

SEQ ID NO: 382808 - DNA, 761 bp, Homo Sapiens; identical to SEQ ID NO: 350271

SEQ ID NO: 382809 - DNA, 1429 bp, Homo Sapiens; identical to SEQ ID NO: 350272

SEQ ID NO: 382810 - DNA, 1296 bp, Homo Sapiens; identical to SEQ ID NO: 350273

SEQ ID NO: 382811 - DNA, 1387 bp, Homo Sapiens; identical to SEQ ID NO: 350274
  misc_feature (1346)..(1346): n is a, c, g, or t

SEQ ID NO: 382812 - DNA, 931 bp, Homo Sapiens; identical to SEQ ID NO: 350275
  misc_feature (29)..(29): n is a, c, g, or t

SEQ ID NO: 382813 - DNA, 716 bp, Homo Sapiens; identical to SEQ ID NO: 350276

SEQ ID NO: 382814 - DNA, 547 bp, Homo Sapiens; identical to SEQ ID NO: 350277

SEQ ID NO: 382815 - DNA, 689 bp, Homo Sapiens; identical to SEQ ID NO: 350278
  misc_feature (22)..(22): n is a, c, g, or t
  misc_feature (33)..(33): n is a, c, g, or t
  misc_feature (56)..(56): n is a, c, g, or t
  misc_feature (89)..(89): n is a, c, g, or t

SEQ ID NO: 382816 - DNA, 752 bp, Homo Sapiens; identical to SEQ ID NO: 350279

SEQ ID NO: 382817 - DNA, 3239 bp, Homo Sapiens; identical to SEQ ID NO: 350280
  misc_feature (47)..(83): n is a, c, g, or t
  misc_feature (2843)..(2843): n is a, c, g, or t
  misc_feature (3120)..(3120): n is a, c, g, or t

SEQ ID NO: 382818 - DNA, 930 bp, Homo Sapiens; identical to SEQ ID NO: 350281
  misc_feature (10)..(10): n is a, c, g, or t
  misc_feature (28)..(28): n is a, c, g, or t
  misc_feature (33)..(33): n is a, c, g, or t
  misc_feature (170)..(170): n is a, c, g, or t
  misc_feature (411)..(412): n is a, c, g, or t
  misc_feature (523)..(523): n is a, c, g, or t
  misc_feature (546)..(546): n is a, c, g, or t
  misc_feature (548)..(548): n is a, c, g, or t
  misc_feature (817)..(825): n is a, c, g, or t

SEQ ID NO: 382819 - DNA, 1271 bp, Homo Sapiens; identical to SEQ ID NO: 350282
  misc_feature (114)..(122): n is a, c, g, or t
  misc_feature (284)..(284): n is a, c, g, or t
  misc_feature (377)..(377): n is a, c, g, or t
  misc_feature (516)..(516): n is a, c, g, or t
  misc_feature (524)..(524): n is a, c, g, or t
  misc_feature (597)..(597): n is a, c, g, or t

SEQ ID NO: 382820 - DNA, 907 bp, Homo Sapiens; identical to SEQ ID NO: 350283

SEQ ID NO: 382821 - DNA, 1836 bp, Homo Sapiens; identical to SEQ ID NO: 350286
  misc_feature (54)..(54): n is a, c, g, or t
  misc_feature (78)..(80): n is a, c, g, or t
  misc_feature (84)..(137): n is a, c, g, or t
  misc_feature (162)..(162): n is a, c, g, or t
  misc_feature (193)..(193): n is a, c, g, or t

SEQ ID NO: 382822 - DNA, 1152 bp, Homo Sapiens; identical to SEQ ID NO: 350287
  misc_feature (15)..(15): n is a, c, g, or t
  misc_feature (1040)..(1040): n is a, c, g, or t
  misc_feature (1057)..(1057): n is a, c, g, or t
  misc_feature (1121)..(1121): n is a, c, g, or t
  misc_feature (1129)..(1130): n is a, c, g, or t
  misc_feature (1134)..(1134): n is a, c, g, or t
  misc_feature (1142)..(1142): n is a, c, g, or t

SEQ ID NO: 382823 - DNA, 1114 bp, Homo Sapiens; identical to SEQ ID NO: 350291
  misc_feature (1)..(1): n is a, c, g, or t
  misc_feature (3)..(3): n is a, c, g, or t
  misc_feature (9)..(9): n is a, c, g, or t
  misc_feature (11)..(11): n is a, c, g, or t
  misc_feature (19)..(19): n is a, c, g, or t
  misc_feature (25)..(25): n is a, c, g, or t
  misc_feature (33)..(33): n is a, c, g, or t
  misc_feature (47)..(47): n is a, c, g, or t
  misc_feature (50)..(51): n is a, c, g, or t
  misc_feature (53)..(53): n is a, c, g, or t
  misc_feature (58)..(58): n is a, c, g, or t
  misc_feature (63)..(63): n is a, c, g, or t
  misc_feature (67)..(67): n is a, c, g, or t
  misc_feature (70)..(70): n is a, c, g, or t
  misc_feature (79)..(79): n is a, c, g, or t
  misc_feature (83)..(83): n is a, c, g, or t
  misc_feature (87)..(87): n is a, c, g, or t
  misc_feature (102)..(102): n is a, c, g, or t
  misc_feature (104)..(105): n is a, c, g, or t
  misc_feature (201)..(201): n is a, c, g, or t

SEQ ID NO: 382824 - DNA, 2419 bp, Homo Sapiens; identical to SEQ ID NO: 350292

SEQ ID NO: 382825 - DNA, 646 bp, Homo Sapiens; identical to SEQ ID NO: 350293

SEQ ID NO: 382826 - DNA, 832 bp, Homo Sapiens; identical to SEQ ID NO: 350296

SEQ ID NO: 382827 - DNA, 921 bp, Homo Sapiens; identical to SEQ ID NO: 350297
  misc_feature (313)..(313): n is a, c, g, or t
  misc_feature (335)..(335): n is a, c, g, or t
  misc_feature (350)..(350): n is a, c, g, or t

SEQ ID NO: 382828 - DNA, 1693 bp, Homo Sapiens; identical to SEQ ID NO: 350298
  misc_feature (1634)..(1634): n is a, c, g, or t
  misc_feature (1641)..(1641): n is a, c, g, or t

SEQ ID NO: 382829 - DNA, 452 bp, Homo Sapiens; identical to SEQ ID NO: 350299

SEQ ID NO: 382830 - DNA, 1017 bp, Homo Sapiens; identical to SEQ ID NO: 350300

SEQ ID NO: 382831 - DNA, 1271 bp, Homo Sapiens; identical to SEQ ID NO: 350301

SEQ ID NO: 382832 - DNA, 2189 bp, Homo Sapiens; identical to SEQ ID NO: 350302

SEQ ID NO: 382833 - DNA, 495 bp, Homo Sapiens; identical to SEQ ID NO: 350303

SEQ ID NO: 382834 - DNA, 846 bp, Homo Sapiens; identical to SEQ ID NO: 350304

SEQ ID NO: 382835 - DNA, 1611 bp, Homo Sapiens; identical to SEQ ID NO: 350305
  misc_feature (1349)..(1349): n is a, c, g, or t

SEQ ID NO: 382836 - DNA, 2493 bp, Homo Sapiens; identical to SEQ ID NO: 350306
  misc_feature (208)..(269): n is a, c, g, or t

SEQ ID NO: 382837 - DNA, 788 bp, Homo Sapiens; identical to SEQ ID NO: 350307

SEQ ID NO: 382838 - DNA, 1499 bp, Homo Sapiens; identical to SEQ ID NO: 350308

SEQ ID NO: 382839 - DNA, 1295 bp, Homo Sapiens; identical to SEQ ID NO: 350310
  misc_feature (1138)..(1138): n is a, c, g, or t
  misc_feature (1148)..(1148): n is a, c, g, or t
  misc_feature (1152)..(1152): n is a, c, g, or t
  misc_feature (1157)..(1157): n is a, c, g, or t
  misc_feature (1159)..(1159): n is a, c, g, or t
  misc_feature (1187)..(1187): n is a, c, g, or t
  misc_feature (1190)..(1190): n is a, c, g, or t
  misc_feature (1201)..(1201): n is a, c, g, or t
  misc_feature (1204)..(1204): n is a, c, g, or t
  misc_feature (1206)..(1206): n is a, c, g, or t
  misc_feature (1212)..(1212): n is a, c, g, or t
  misc_feature (1217)..(1217): n is a, c, g, or t
  misc_feature (1225)..(1226): n is a, c, g, or t
  misc_feature (1228)..(1228): n is a, c, g, or t
  misc_feature (1241)..(1241): n is a, c, g, or t
  misc_feature (1246)..(1246): n is a, c, g, or t
  misc_feature (1249)..(1249): n is a, c, g, or t
  misc_feature (1252)..(1252): n is a, c, g, or t
  misc_feature (1254)..(1254): n is a, c, g, or t
  misc_feature (1256)..(1257): n is a, c, g, or t
  misc_feature (1266)..(1266): n is a, c, g, or t
  misc_feature (1277)..(1277): n is a, c, g, or t
  misc_feature (1281)..(1281): n is a, c, g, or t
  misc_feature (1285)..(1285): n is a, c, g, or t

SEQ ID NO: 382840 - DNA, 1582 bp, Homo Sapiens; identical to SEQ ID NO: 350311

SEQ ID NO: 382841 - DNA, 1440 bp, Homo Sapiens; identical to SEQ ID NO: 350312
  misc_feature (346)..(346): n is a, c, g, or t

SEQ ID NO: 382842 - DNA, 1054 bp, Homo Sapiens; identical to SEQ ID NO: 350313

SEQ ID NO: 382843 - DNA, 1000 bp, Homo Sapiens; identical to SEQ ID NO: 350314

SEQ ID NO: 382844 - DNA, 2715 bp, Homo Sapiens; identical to SEQ ID NO: 350315
  misc_feature (32)..(32): n is a, c, g, or t
  misc_feature (57)..(57): n is a, c, g, or t

SEQ ID NO: 382845 - DNA, 821 bp, Homo Sapiens; identical to SEQ ID NO: 350316
  misc_feature (556)..(570): n is a, c, g, or t

SEQ ID NO: 382846 - DNA, 393 bp, Homo Sapiens; identical to SEQ ID NO: 350317
  misc_feature (299)..(299): n is a, c, g, or t
  misc_feature (383)..(383): n is a, c, g, or t

SEQ ID NO: 382847 - DNA, 2005 bp, Homo Sapiens; identical to SEQ ID NO: 350318
  misc_feature (869)..(869): n is a, c, g, or t
  misc_feature (1887)..(1888): n is a, c, g, or t
  misc_feature (1940)..(1940): n is a, c, g, or t
  misc_feature (1948)..(1948): n is a, c, g, or t
  misc_feature (1950)..(1950): n is a, c, g, or t
  misc_feature (1952)..(1952): n is a, c, g, or t
  misc_feature (1960)..(1960): n is a, c, g, or t
  misc_feature (1962)..(1963): n is a, c, g, or t
  misc_feature (1980)..(1980): n is a, c, g, or t
  misc_feature (1984)..(1984): n is a, c, g, or t
  misc_feature (1996)..(1996): n is a, c, g, or t

SEQ ID NO: 382848 - DNA, 1409 bp, Homo Sapiens; identical to SEQ ID NO: 350319

SEQ ID NO: 382849 - DNA, 1197 bp, Homo Sapiens; identical to SEQ ID NO: 350320
  misc_feature (1045)..(1053): n is a, c, g, or t
  misc_feature (1092)..(1100): n is a, c, g, or t
  misc_feature (1134)..(1142): n is a, c, g, or t

SEQ ID NO: 382850 - DNA, 1350 bp, Homo Sapiens; identical to SEQ ID NO: 350323
  misc_feature (811)..(848): n is a, c, g, or t

SEQ ID NO: 382851 - DNA, 969 bp, Homo Sapiens; identical to SEQ ID NO: 350324
  misc_feature (83)..(84): n is a, c, g, or t

SEQ ID NO: 382852 - DNA, 1142 bp, Homo Sapiens; identical to SEQ ID NO: 350325
  misc_feature (973)..(973): n is a, c, g, or t
  misc_feature (989)..(989): n is a, c, g, or t
  misc_feature (1027)..(1027): n is a, c, g, or t
  misc_feature (1077)..(1077): n is a, c, g, or t
  misc_feature (1079)..(1079): n is a, c, g, or t
  misc_feature (1089)..(1089): n is a, c, g, or t
  misc_feature (1091)..(1091): n is a, c, g, or t
  misc_feature (1093)..(1093): n is a, c, g, or t
  misc_feature (1100)..(1100): n is a, c, g, or t
  misc_feature (1104)..(1104): n is a, c, g, or t
  misc_feature (1108)..(1108): n is a, c, g, or t
  misc_feature (1110)..(1110): n is a, c, g, or t
  misc_feature (1130)..(1130): n is a, c, g, or t

SEQ ID NO: 382853 - DNA, 1063 bp, Homo Sapiens; identical to SEQ ID NO: 350326
  misc_feature (11)..(11): n is a, c, g, or t
  misc_feature (15)..(15): n is a, c, g, or t
  misc_feature (43)..(43): n is a, c, g, or t
  misc_feature (49)..(49): n is a, c, g, or t
  misc_feature (71)..(71): n is a, c, g, or t
  misc_feature (965)..(965): n is a, c, g, or t
  misc_feature (974)..(974): n is a, c, g, or t
  misc_feature (978)..(978): n is a, c, g, or t
  misc_feature (981)..(981): n is a, c, g, or t
  misc_feature (984)..(984): n is a, c, g, or t
  misc_feature (995)..(995): n is a, c, g, or t
  misc_feature (1002)..(1002): n is a, c, g, or t
  misc_feature (1022)..(1023): n is a, c, g, or t
  misc_feature (1025)..(1025): n is a, c, g, or t
  misc_feature (1027)..(1027): n is a, c, g, or t
  misc_feature (1040)..(1040): n is a, c, g, or t
  misc_feature (1045)..(1045): n is a, c, g, or t

SEQ ID NO: 382854 - DNA, 662 bp, Homo Sapiens; identical to SEQ ID NO: 350328

SEQ ID NO: 382855 - DNA, 584 bp, Homo Sapiens; identical to SEQ ID NO: 350329

SEQ ID NO: 382856 - DNA, 1063 bp, Homo Sapiens; identical to SEQ ID NO: 350331

SEQ ID NO: 382857 - DNA, 503 bp, Homo Sapiens; identical to SEQ ID NO: 350332
  misc_feature (67)..(67): n is a, c, g, or t
  misc_feature (375)..(375): n is a, c, g, or t
  misc_feature (484)..(484): n is a, c, g, or t

SEQ ID NO: 382858 - DNA, 988 bp, Homo Sapiens; identical to SEQ ID NO: 350333

SEQ ID NO: 382859 - DNA, 1717 bp, Homo Sapiens; identical to SEQ ID NO: 350334
  misc_feature (658)..(658): n is a, c, g, or t
  misc_feature (737)..(737): n is a, c, g, or t
  misc_feature (1683)..(1683): n is a, c, g, or t

SEQ ID NO: 382860 - DNA, 793 bp, Homo Sapiens; identical to SEQ ID NO: 350335

SEQ ID NO: 382861 - DNA, 1171 bp, Homo Sapiens; identical to SEQ ID NO: 350336

SEQ ID NO: 382862 - DNA, 958 bp, Homo Sapiens; identical to SEQ ID NO: 350337

SEQ ID NO: 382863 - DNA, 995 bp, Homo Sapiens; identical to SEQ ID NO: 350338

SEQ ID NO: 382864 - DNA, 1051 bp, Homo Sapiens; identical to SEQ ID NO: 350339
  misc_feature (438)..(438): n is a, c, g, or t

SEQ ID NO: 382865 - DNA, 932 bp, Homo Sapiens; identical to SEQ ID NO: 350340

SEQ ID NO: 382866 - DNA, 1080 bp, Homo Sapiens; identical to SEQ ID NO: 350341

SEQ ID NO: 382867 - DNA, 420 bp, Homo Sapiens; identical to SEQ ID NO: 350342

SEQ ID NO: 382868 - DNA, 721 bp, Homo Sapiens; identical to SEQ ID NO: 350344

SEQ ID NO: 382869 - DNA, 1065 bp, Homo Sapiens; identical to SEQ ID NO: 350345
  misc_feature (19)..(19): n is a, c, g, or t
  misc_feature (26)..(26): n is a, c, g, or t
  misc_feature (29)..(29): n is a, c, g, or t
  misc_feature (46)..(47): n is a, c, g, or t
  misc_feature (51)..(51): n is a, c, g, or t
  misc_feature (53)..(53): n is a, c, g, or t
  misc_feature (55)..(55): n is a, c, g, or t
  misc_feature (58)..(58): n is a, c, g, or t
  misc_feature (63)..(63): n is a, c, g, or t
  misc_feature (70)..(70): n is a, c, g, or t
  misc_feature (75)..(75): n is a, c, g, or t
  misc_feature (90)..(194): n is a, c, g, or t
  misc_feature (722)..(723): n is a, c, g, or t
  misc_feature (997)..(997): n is a, c, g, or t

SEQ ID NO: 382870 - DNA, 543 bp, Homo Sapiens; identical to SEQ ID NO: 350346

SEQ ID NO: 382871 - DNA, 1683 bp, Homo Sapiens; identical to SEQ ID NO: 350347
  misc_feature (22)..(22): n is a, c, g, or t
  misc_feature (55)..(55): n is a, c, g, or t
  misc_feature (152)..(152): n is a, c, g, or t

SEQ ID NO: 382872 - DNA, 1611 bp, Homo Sapiens; identical to SEQ ID NO: 350349
  misc_feature (44)..(52): n is a, c, g, or t

SEQ ID NO: 382873 - DNA, 2344 bp, Homo Sapiens; identical to SEQ ID NO: 350350
  misc_feature (2262)..(2262): n is a, c, g, or t
  misc_feature (2273)..(2273): n is a, c, g, or t
  misc_feature (2287)..(2287): n is a, c, g, or t
  misc_feature (2289)..(2289): n is a, c, g, or t
  misc_feature (2304)..(2304): n is a, c, g, or t
  misc_feature (2308)..(2308): n is a, c, g, or t
  misc_feature (2311)..(2311): n is a, c, g, or t
  misc_feature (2313)..(2313): n is a, c, g, or t
  misc_feature (2318)..(2318): n is a, c, g, or t
  misc_feature (2325)..(2325): n is a, c, g, or t
  misc_feature (2327)..(2327): n is a, c, g, or t
  misc_feature (2329)..(2329): n is a, c, g, or t
  misc_feature (2336)..(2336): n is a, c, g, or t

SEQ ID NO: 382874 - DNA, 1007 bp, Homo Sapiens; identical to SEQ ID NO: 350352
  misc_feature (16)..(16): n is a, c, g, or t
  misc_feature (19)..(19): n is a, c, g, or t
  misc_feature (38)..(38): n is a, c, g, or t

SEQ ID NO: 382875 - DNA, 409 bp, Homo Sapiens; identical to SEQ ID NO: 350353
  misc_feature (12)..(12): n is a, c, g, or t
  misc_feature (35)..(35): n is a, c, g, or t
  misc_feature (49)..(49): n is a, c, g, or t
  misc_feature (75)..(75): n is a, c, g, or t
  misc_feature (87)..(87): n is a, c, g, or t
  misc_feature (98)..(98): n is a, c, g, or t
  misc_feature (194)..(194): n is a, c, g, or t
  misc_feature (246)..(246): n is a, c, g, or t

SEQ ID NO: 382876 - DNA, 1898 bp, Homo Sapiens; identical to SEQ ID NO: 350355
  misc_feature (69)..(69): n is a, c, g, or t
  misc_feature (85)..(122): n is a, c, g, or t
  misc_feature (129)..(129): n is a, c, g, or t
  misc_feature (550)..(550): n is a, c, g, or t
  misc_feature (1158)..(1158): n is a, c, g, or t

SEQ ID NO: 382877 - DNA, 685 bp, Homo Sapiens; identical to SEQ ID NO: 350356
  misc_feature (54)..(54): n is a, c, g, or t
  misc_feature (555)..(588): n is a, c, g, or t
  misc_feature (595)..(595): n is a, c, g, or t
  misc_feature (614)..(614): n is a, c, g, or t
  misc_feature (649)..(649): n is a, c, g, or t
  misc_feature (654)..(654): n is a, c, g, or t

SEQ ID NO: 382878 - DNA, 1156 bp, Homo Sapiens; identical to SEQ ID NO: 350357
  misc_feature (9)..(9): n is a, c, g, or t
  misc_feature (19)..(19): n is a, c, g, or t
  misc_feature (23)..(24): n is a, c, g, or t
  misc_feature (45)..(45): n is a, c, g, or t
  misc_feature (48)..(48): n is a, c, g, or t
  misc_feature (50)..(50): n is a, c, g, or t
  misc_feature (52)..(52): n is a, c, g, or t
  misc_feature (421)..(711): n is a, c, g, or t
  misc_feature (714)..(714): n is a, c, g, or t

SEQ ID NO: 382879 - DNA, 2111 bp, Homo Sapiens; identical to SEQ ID NO: 350358
  misc_feature (1720)..(2009): n is a, c, g, or t
  misc_feature (2067)..(2067): n is a, c, g, or t

SEQ ID NO: 382880 - DNA, 676 bp, Homo Sapiens; identical to SEQ ID NO: 350359
  misc_feature (349)..(392): n is a, c, g, or t

SEQ ID NO: 382881 - DNA, 971 bp, Homo Sapiens; identical to SEQ ID NO: 350360
  misc_feature (35)..(35): n is a, c, g, or t
  misc_feature (50)..(86): n is a, c, g, or t

SEQ ID NO: 382882 - DNA, 1600 bp, Homo Sapiens; identical to SEQ ID NO: 350362
  misc_feature (1073)..(1073): n is a, c, g, or t
  misc_feature (1424)..(1424): n is a, c, g, or t
  misc_feature (1551)..(1551): n is a, c, g, or t
  misc_feature (1566)..(1566): n is a, c, g, or t
  misc_feature (1588)..(1588): n is a, c, g, or t

SEQ ID NO: 382883 - DNA, 2656 bp, Homo Sapiens; identical to SEQ ID NO: 350363
  misc_feature (2452)..(2452): n is a, c, g, or t

SEQ ID NO: 382884 - DNA, 1026 bp, Homo Sapiens; identical to SEQ ID NO: 350364

SEQ ID NO: 382885 - DNA, 1020 bp, Homo Sapiens; identical to SEQ ID NO: 350365
  misc_feature (792)..(792): n is a, c, g, or t

SEQ ID NO: 382886 - DNA, 901 bp, Homo Sapiens; identical to SEQ ID NO: 350366
  misc_feature (436)..(447): n is a, c, g, or t
  misc_feature (688)..(688): n is a, c, g, or t

SEQ ID NO: 382887 - DNA, 1881 bp, Homo Sapiens; identical to SEQ ID NO: 350367
  misc_feature (1657)..(1657): n is a, c, g, or t

SEQ ID NO: 382888 - DNA, 847 bp, Homo Sapiens; identical to SEQ ID NO: 350368

SEQ ID NO: 382889 - DNA, 870 bp, Homo Sapiens; identical to SEQ ID NO: 350369

SEQ ID NO: 382890 - DNA, 1595 bp, Homo Sapiens; identical to SEQ ID NO: 350370
  misc_feature (1042)..(1042): n is a, c, g, or t
  misc_feature (1046)..(1046): n is a, c, g, or t
  misc_feature (1121)..(1121): n is a, c, g, or t
  misc_feature (1128)..(1128): n is a, c, g, or t
  misc_feature (1136)..(1136): n is a, c, g, or t
  misc_feature (1145)..(1145): n is a, c, g, or t
  misc_feature (1228)..(1228): n is a, c, g, or t
  misc_feature (1314)..(1314): n is a, c, g, or t
  misc_feature (1324)..(1324): n is a, c, g, or t
  misc_feature (1344)..(1344): n is a, c, g, or t
  misc_feature (1396)..(1396): n is a, c, g, or t
  misc_feature (1402)..(1402): n is a, c, g, or t
  misc_feature (1462)..(1462): n is a, c, g, or t
  misc_feature (1506)..(1506): n is a, c, g, or t
  misc_feature (1514)..(1514): n is a, c, g, or t
  misc_feature (1557)..(1557): n is a, c, g, or t
  misc_feature (1574)..(1574): n is a, c, g, or t
  misc_feature (1576)..(1576): n is a, c, g, or t
  misc_feature (1585)..(1585): n is a, c, g, or t

SEQ ID NO: 382891 - DNA, 1440 bp, Homo Sapiens; identical to SEQ ID NO: 350371

SEQ ID NO: 382892 - DNA, 940 bp, Homo Sapiens; identical to SEQ ID NO: 350372

SEQ ID NO: 382893 - DNA, 964 bp, Homo Sapiens; identical to SEQ ID NO: 350373
  misc_feature (931)..(931): n is a, c, g, or t

SEQ ID NO: 382894 - DNA, 859 bp, Homo Sapiens; identical to SEQ ID NO: 350374
  misc_feature (761)..(761): n is a, c, g, or t

SEQ ID NO: 382895 - DNA, 1401 bp, Homo Sapiens; identical to SEQ ID NO: 350376
  misc_feature (1320)..(1320): n is a, c, g, or t

SEQ ID NO: 382896 - DNA, 778 bp, Homo Sapiens; identical to SEQ ID NO: 350377

SEQ ID NO: 382897 - DNA, 1194 bp, Homo Sapiens; identical to SEQ ID NO: 350380
  misc_feature (836)..(836): n is a, c, g, or t
  misc_feature (1003)..(1003): n is a, c, g, or t
  misc_feature (1059)..(1059): n is a, c, g, or t

SEQ ID NO: 382898 - DNA, 841 bp, Homo Sapiens; identical to SEQ ID NO: 350381

SEQ ID NO: 382899 - DNA, 1806 bp, Homo Sapiens; identical to SEQ ID NO: 350382

SEQ ID NO: 382900 - DNA, 2752 bp, Homo Sapiens; identical to SEQ ID NO: 350383

SEQ ID NO: 382901 - DNA, 472 bp, Homo Sapiens; identical to SEQ ID NO: 350384
  misc_feature (247)..(247): n is a, c, g, or t
  misc_feature (425)..(425): n is a, c, g, or t
  misc_feature (432)..(432): n is a, c, g, or t
  misc_feature (435)..(437): n is a, c, g, or t

SEQ ID NO: 382902 - DNA, 926 bp, Homo Sapiens; identical to SEQ ID NO: 350386
  misc_feature (73)..(121): n is a, c, g, or t

SEQ ID NO: 382903 - DNA, 1415 bp, Homo Sapiens; identical to SEQ ID NO: 350387
  misc_feature (1096)..(1141): n is a, c, g, or t

SEQ ID NO: 382904 - DNA, 1138 bp, Homo Sapiens; identical to SEQ ID NO: 350394

SEQ ID NO: 382905 - DNA, 1030 bp, Homo Sapiens; identical to SEQ ID NO: 350395

SEQ ID NO: 382906 - DNA, 2235 bp, Homo Sapiens; identical to SEQ ID NO: 350397
  misc_feature (168)..(256): n is a, c, g, or t
  misc_feature (569)..(590): n is a, c, g, or t

SEQ ID NO: 382907 - DNA, 390 bp, Homo Sapiens; identical to SEQ ID NO: 350398

SEQ ID NO: 382908 - DNA, 844 bp, Homo Sapiens; identical to SEQ ID NO: 350400

SEQ ID NO: 382909 - DNA, 1853 bp, Homo Sapiens; identical to SEQ ID NO: 350401

SEQ ID NO: 382910 - DNA, 1803 bp, Homo Sapiens; identical to SEQ ID NO: 350407
  misc_feature (119)..(119): n is a, c, g, or t

SEQ ID NO: 382911 - DNA, 993 bp, Homo Sapiens; identical to SEQ ID NO: 350408
  misc_feature (675)..(675): n is a, c, g, or t

SEQ ID NO: 382912 - DNA, 1108 bp, Homo Sapiens; identical to SEQ ID NO: 350409
  misc_feature (650)..(650): n is a, c, g, or t

SEQ ID NO: 382913 - DNA, 989 bp, Homo Sapiens; identical to SEQ ID NO: 350410
  misc_feature (13)..(13): n is a, c, g, or t
  misc_feature (21)..(21): n is a, c, g, or t
  misc_feature (32)..(32): n is a, c, g, or t

SEQ ID NO: 382914 - DNA, 911 bp, Homo Sapiens; identical to SEQ ID NO: 350411

SEQ ID NO: 382915 - DNA, 918 bp, Homo Sapiens; identical to SEQ ID NO: 350412
  misc_feature (50)..(86): n is a, c, g, or t

SEQ ID NO: 382916 - DNA, 1517 bp, Homo Sapiens; identical to SEQ ID NO: 350413
  misc_feature (56)..(92): n is a, c, g, or t

SEQ ID NO: 382917 - DNA, 1809 bp, Homo Sapiens; identical to SEQ ID NO: 350414

SEQ ID NO: 382918 - DNA, 1594 bp, Homo Sapiens; identical to SEQ ID NO: 350415
  misc_feature (66)..(66): n is a, c, g, or t

SEQ ID NO: 382919 - DNA, 925 bp, Homo Sapiens; identical to SEQ ID NO: 350416
  misc_feature (870)..(878): n is a, c, g, or t

SEQ ID NO: 382920 - DNA, 492 bp, Homo Sapiens; identical to SEQ ID NO: 350417
  misc_feature (27)..(27): n is a, c, g, or t
  misc_feature (32)..(32): n is a, c, g, or t
  misc_feature (148)..(148): n is a, c, g, or t

SEQ ID NO: 382921 - DNA, 800 bp, Homo Sapiens; identical to SEQ ID NO: 350420

SEQ ID NO: 382922 - DNA, 1137 bp, Homo Sapiens; identical to SEQ ID NO: 350421

SEQ ID NO: 382923 - DNA, 2205 bp, Homo Sapiens; identical to SEQ ID NO: 350422

SEQ ID NO: 382924 - DNA, 1006 bp, Homo Sapiens; identical to SEQ ID NO: 350423
  misc_feature (923)..(923): n is a, c, g, or t
  misc_feature (928)..(928): n is a, c, g, or t
  misc_feature (938)..(938): n is a, c, g, or t
  misc_feature (959)..(959): n is a, c, g, or t
  misc_feature (972)..(972): n is a, c, g, or t
  misc_feature (991)..(991): n is a, c, g, or t
  misc_feature (996)..(996): n is a, c, g, or t

SEQ ID NO: 382925 - DNA, 1412 bp, Homo Sapiens; identical to SEQ ID NO: 350424

SEQ ID NO: 382926 - DNA, 2005 bp, Homo Sapiens; identical to SEQ ID NO: 350425
  misc_feature (75)..(138): n is a, c, g, or t
  misc_feature (236)..(270): n is a, c, g, or t
  misc_feature (590)..(640): n is a, c, g, or t
  misc_feature (1978)..(1978): n is a, c, g, or t

SEQ ID NO: 382927 - DNA, 584 bp, Homo Sapiens; identical to SEQ ID NO: 350426
  misc_feature (119)..(167): n is a, c, g, or t
  misc_feature (451)..(529): n is a, c, g, or t

SEQ ID NO: 382928 - DNA, 742 bp, Homo Sapiens; identical to SEQ ID NO: 350429
  misc_feature (497)..(531): n is a, c, g, or t
  misc_feature (558)..(558): n is a, c, g, or t
  misc_feature (570)..(570): n is a, c, g, or t
  misc_feature (572)..(572): n is a, c, g, or t
  misc_feature (596)..(596): n is a, c, g, or t
  misc_feature (652)..(652): n is a, c, g, or t
  misc_feature (704)..(704): n is a, c, g, or t

SEQ ID NO: 382929 - DNA, 1736 bp, Homo Sapiens; identical to SEQ ID NO: 350430
  misc_feature (545)..(545): n is a, c, g, or t

SEQ ID NO: 382930 - DNA, 1628 bp, Homo Sapiens; identical to SEQ ID NO: 350434
  misc_feature (1353)..(1354): n is a, c, g, or t

SEQ ID NO: 382931 - DNA, 936 bp, Homo Sapiens; identical to SEQ ID NO: 350435
  misc_feature (176)..(176): n is a, c, g, or t

SEQ ID NO: 382932 - DNA, 1297 bp, Homo Sapiens; identical to SEQ ID NO: 350440
  misc_feature (262)..(262): n is a, c, g, or t

SEQ ID NO: 382933 - DNA, 454 bp, Homo Sapiens; identical to SEQ ID NO: 350441

SEQ ID NO: 382934 - DNA, 2229 bp, Homo Sapiens; identical to SEQ ID NO: 350442

SEQ ID NO: 382935 - DNA, 840 bp, Homo Sapiens; identical to SEQ ID NO: 350443
  misc_feature (418)..(418): n is a, c, g, or t

SEQ ID NO: 382936 - DNA, 424 bp, Homo Sapiens; identical to SEQ ID NO: 350444

SEQ ID NO: 382937 - DNA, 1307 bp, Homo Sapiens; identical to SEQ ID NO: 350448
  misc_feature (132)..(190): n is a, c, g, or t
  misc_feature (1117)..(1117): n is a, c, g, or t
  misc_feature (1241)..(1241): n is a, c, g, or t
  misc_feature (1293)..(1293): n is a, c, g, or t

SEQ ID NO: 382938 - DNA, 1112 bp, Homo Sapiens; identical to SEQ ID NO: 350449
  misc_feature (10)..(10): n is a, c, g, or t
  misc_feature (14)..(14): n is a, c, g, or t
  misc_feature (19)..(19): n is a, c, g, or t
  misc_feature (22)..(22): n is a, c, g, or t
  misc_feature (29)..(29): n is a, c, g, or t
  misc_feature (36)..(36): n is a, c, g, or t
  misc_feature (50)..(50): n is a, c, g, or t
  misc_feature (55)..(55): n is a, c, g, or t
  misc_feature (60)..(60): n is a, c, g, or t
  misc_feature (78)..(78): n is a, c, g, or t
  misc_feature (81)..(81): n is a, c, g, or t
  misc_feature (83)..(83): n is a, c, g, or t
  misc_feature (100)..(101): n is a, c, g, or t
  misc_feature (105)..(105): n is a, c, g, or t
  misc_feature (115)..(115): n is a, c, g, or t
  misc_feature (117)..(117): n is a, c, g, or t
  misc_feature (122)..(122): n is a, c, g, or t
  misc_feature (135)..(135): n is a, c, g, or t
  misc_feature (153)..(153): n is a, c, g, or t
  misc_feature (289)..(289): n is a, c, g, or t
  misc_feature (317)..(373): n is a, c, g, or t

SEQ ID NO: 382939 - DNA, 563 bp, Homo Sapiens; identical to SEQ ID NO: 350451

SEQ ID NO: 382940 - DNA, 1094 bp, Homo Sapiens; identical to SEQ ID NO: 350452

SEQ ID NO: 382941 - DNA, 2629 bp, Homo Sapiens; identical to SEQ ID NO: 350459
  misc_feature (1664)..(1673): n is a, c, g, or t

SEQ ID NO: 382942 - DNA, 1119 bp, Homo Sapiens; identical to SEQ ID NO: 350460

SEQ ID NO: 382943 - DNA, 675 bp, Homo Sapiens; identical to SEQ ID NO: 350462

SEQ ID NO: 382944 - DNA, 1179 bp, Homo Sapiens; identical to SEQ ID NO: 350463

SEQ ID NO: 382945 - DNA, 2429 bp, Homo Sapiens; identical to SEQ ID NO: 350464

SEQ ID NO: 382946 - DNA, 336 bp, Homo Sapiens; identical to SEQ ID NO: 350465
  misc_feature (22)..(22): n is a, c, g, or t
  misc_feature (45)..(45): n is a, c, g, or t
  misc_feature (56)..(56): n is a, c, g, or t
  misc_feature (132)..(132): n is a, c, g, or t

SEQ ID NO: 382947 - DNA, 1200 bp, Homo Sapiens; identical to SEQ ID NO: 350468

SEQ ID NO: 382948 - DNA, 881 bp, Homo Sapiens; identical to SEQ ID NO: 350469

SEQ ID NO: 382949 - DNA, 1123 bp, Homo Sapiens; identical to SEQ ID NO: 350470

SEQ ID NO: 382950 - DNA, 1080 bp, Homo Sapiens; identical to SEQ ID NO: 350471

SEQ ID NO: 382951 - DNA, 266 bp, Homo Sapiens; identical to SEQ ID NO: 350472

SEQ ID NO: 382952 - DNA, 1832 bp, Homo Sapiens; identical to SEQ ID NO: 350473
  misc_feature (68)..(209): n is a, c, g, or t

SEQ ID NO: 382953 - DNA, 484 bp, Homo Sapiens; identical to SEQ ID NO: 350474

SEQ ID NO: 382954 - DNA, 751 bp, Homo Sapiens; identical to SEQ ID NO: 350477
  misc_feature (139)..(200): n is a, c, g, or t

SEQ ID NO: 382955 - DNA, 1773 bp, Homo Sapiens; identical to SEQ ID NO: 350478
  misc_feature (415)..(415): n is a, c, g, or t
  misc_feature (443)..(443): n is a, c, g, or t
  misc_feature (449)..(449): n is a, c, g, or t
  misc_feature (451)..(451): n is a, c, g, or t
  misc_feature (455)..(455): n is a, c, g, or t
  misc_feature (467)..(467): n is a, c, g, or t
  misc_feature (475)..(475): n is a, c, g, or t

SEQ ID NO: 382956 - DNA, 2750 bp, Homo Sapiens; identical to SEQ ID NO: 350479
  misc_feature (126)..(126): n is a, c, g, or t
  misc_feature (669)..(669): n is a, c, g, or t
  misc_feature (744)..(744): n is a, c, g, or t
  misc_feature (771)..(771): n is a, c, g, or t
  misc_feature (900)..(900): n is a, c, g, or t
  misc_feature (903)..(904): n is a, c, g, or t
  misc_feature (907)..(907): n is a, c, g, or t
  misc_feature (909)..(909): n is a, c, g, or t
  misc_feature (913)..(913): n is a, c, g, or t
  misc_feature (2171)..(2184): n is a, c, g, or t
  misc_feature (2206)..(2217): n is a, c, g, or t
  misc_feature (2501)..(2514): n is a, c, g, or t

SEQ ID NO: 382957 - DNA, 1060 bp, Homo Sapiens; identical to SEQ ID NO: 261649

SEQ ID NO: 382958 - DNA, 1572 bp, Homo Sapiens; identical to SEQ ID NO: 350481

SEQ ID NO: 382959 - DNA, 817 bp, Homo Sapiens; identical to SEQ ID NO: 350482

SEQ ID NO: 382960 - DNA, 1098 bp, Homo Sapiens; identical to SEQ ID NO: 350487
  misc_feature (109)..(109): n is a, c, g, or t

SEQ ID NO: 382961 - DNA, 3023 bp, Homo Sapiens; identical to SEQ ID NO: 350488
  misc_feature (1433)..(1433): n is a, c, g, or t
  misc_feature (1472)..(1507): n is a, c, g, or t
  misc_feature (3006)..(3006): n is a, c, g, or t

SEQ ID NO: 382962 - DNA, 1979 bp, Homo Sapiens; identical to SEQ ID NO: 350489

SEQ ID NO: 382963 - DNA, 513 bp, Homo Sapiens; identical to SEQ ID NO: 350490
  misc_feature (48)..(48): n is a, c, g, or t
  misc_feature (59)..(59): n is a, c, g, or t
  misc_feature (73)..(73): n is a, c, g, or t
  misc_feature (110)..(110): n is a, c, g, or t
  misc_feature (166)..(166): n is a, c, g, or t
  misc_feature (240)..(240): n is a, c, g, or t
  misc_feature (453)..(453): n is a, c, g, or t
  misc_feature (457)..(457): n is a, c, g, or t

SEQ ID NO: 382964 - DNA, 3595 bp, Homo Sapiens; identical to SEQ ID NO: 350492
  misc_feature (3251)..(3251): n is a, c, g, or t
  misc_feature (3253)..(3276): n is a, c, g, or t
  misc_feature (3296)..(3296): n is a, c, g, or t
  misc_feature (3325)..(3325): n is a, c, g, or t
  misc_feature (3416)..(3434): n is a, c, g, or t
  misc_feature (3466)..(3477): n is a, c, g, or t

SEQ ID NO: 382965 - DNA, 624 bp, Homo Sapiens; identical to SEQ ID NO: 264783

SEQ ID NO: 382966 - DNA, 498 bp, Homo Sapiens; identical to SEQ ID NO: 350494
  misc_feature (178)..(178): n is a, c, g, or t
  misc_feature (318)..(318): n is a, c, g, or t

SEQ ID NO: 382967 - DNA, 1210 bp, Homo Sapiens; identical to SEQ ID NO: 350496

SEQ ID NO: 382968 - DNA, 1304 bp, Homo Sapiens; identical to SEQ ID NO: 350497

SEQ ID NO: 382969 - DNA, 854 bp, Homo Sapiens; identical to SEQ ID NO: 350501
  misc_feature (221)..(221): n is a, c, g, or t
  misc_feature (360)..(360): n is a, c, g, or t
  misc_feature (571)..(571): n is a, c, g, or t
  misc_feature (712)..(712): n is a, c, g, or t
  misc_feature (780)..(780): n is a, c, g, or t
  misc_feature (796)..(796): n is a, c, g, or t
  misc_feature (808)..(808): n is a, c, g, or t
  misc_feature (815)..(815): n is a, c, g, or t
  misc_feature (838)..(838): n is a, c, g, or t

SEQ ID NO: 382970 - DNA, 2591 bp, Homo Sapiens; identical to SEQ ID NO: 350502
  misc_feature (25)..(25): n is a, c, g, or t
  misc_feature (27)..(27): n is a, c, g, or t
  misc_feature (1934)..(1934): n is a, c, g, or t
  misc_feature (1944)..(1944): n is a, c, g, or t
  misc_feature (1963)..(1963): n is a, c, g, or t
  misc_feature (1965)..(1965): n is a, c, g, or t
  misc_feature (2193)..(2209): n is a, c, g, or t

SEQ ID NO: 382971 - DNA, 1265 bp, Homo Sapiens; identical to SEQ ID NO: 350503
  misc_feature (13)..(13): n is a, c, g, or t
  misc_feature (51)..(51): n is a, c, g, or t
  misc_feature (104)..(104): n is a, c, g, or t
  misc_feature (160)..(160): n is a, c, g, or t

SEQ ID NO: 382972 - DNA, 1048 bp, Homo Sapiens; identical to SEQ ID NO: 350504

SEQ ID NO: 382973 - DNA, 2003 bp, Homo Sapiens; identical to SEQ ID NO: 350505

SEQ ID NO: 382974 - DNA, 1587 bp, Homo Sapiens; identical to SEQ ID NO: 350506

SEQ ID NO: 382975 - DNA, 1098 bp, Homo Sapiens; identical to SEQ ID NO: 350507

SEQ ID NO: 382976 - DNA, 1727 bp, Homo Sapiens; identical to SEQ ID NO: 350509

SEQ ID NO: 382977 - DNA, 831 bp, Homo Sapiens; identical to SEQ ID NO: 350510

SEQ ID NO: 382978 - DNA, 1966 bp, Homo Sapiens; identical to SEQ ID NO: 350511
  misc_feature (42)..(78): n is a, c, g, or t
  misc_feature (1876)..(1891): n is a, c, g, or t

SEQ ID NO: 382979 - DNA, 2048 bp, Homo Sapiens; identical to SEQ ID NO: 350514
  misc_feature (400)..(400): n is a, c, g, or t

SEQ ID NO: 382980 - DNA, 670 bp, Homo Sapiens; identical to SEQ ID NO: 350515

SEQ ID NO: 382981 - DNA, 1593 bp, Homo Sapiens; identical to SEQ ID NO: 350516
  misc_feature (338)..(338): n is a, c, g, or t
  misc_feature (1492)..(1492): n is a, c, g, or t
  misc_feature (1506)..(1506): n is a, c, g, or t
  misc_feature (1573)..(1573): n is a, c, g, or t

SEQ ID NO: 382982 - DNA, 1009 bp, Homo Sapiens; identical to SEQ ID NO: 350517

SEQ ID NO: 382983 - DNA, 1096 bp, Homo Sapiens; identical to SEQ ID NO: 350520
  misc_feature (218)..(218): n is a, c, g, or t

SEQ ID NO: 382984 - DNA, 1995 bp, Homo Sapiens; identical to SEQ ID NO: 350521
  misc_feature (1359)..(1359): n is a, c, g, or t

SEQ ID NO: 382985 - DNA, 2005 bp, Homo Sapiens; identical to SEQ ID NO: 350522
  misc_feature (709)..(831): n is a, c, g, or t
  misc_feature (1671)..(1671): n is a, c, g, or t
  misc_feature (1716)..(1716): n is a, c, g, or t
  misc_feature (1822)..(1822): n is a, c, g, or t
  misc_feature (1824)..(1824): n is a, c, g, or t
  misc_feature (1847)..(1847): n is a, c, g, or t
  misc_feature (1888)..(1888): n is a, c, g, or t
  misc_feature (1890)..(1890): n is a, c, g, or t

SEQ ID NO: 382986 - DNA, 890 bp, Homo Sapiens; identical to SEQ ID NO: 350523
  misc_feature (136)..(136): n is a, c, g, or t
  misc_feature (138)..(139): n is a, c, g, or t
  misc_feature (143)..(144): n is a, c, g, or t

SEQ ID NO: 382987 - DNA, 1395 bp, Homo Sapiens; identical to SEQ ID NO: 350524
  misc_feature (1253)..(1253): n is a, c, g, or t

SEQ ID NO: 382988 - DNA, 451 bp, Homo Sapiens; identical to SEQ ID NO: 350525

SEQ ID NO: 382989 - DNA, 583 bp, Homo Sapiens; identical to SEQ ID NO: 350526

SEQ ID NO: 382990 - DNA, 863 bp, Homo Sapiens; identical to SEQ ID NO: 350527

SEQ ID NO: 382991 - DNA, 802 bp, Homo Sapiens; identical to SEQ ID NO: 350528

SEQ ID NO: 382992 - DNA, 915 bp, Homo Sapiens; identical to SEQ ID NO: 350529

SEQ ID NO: 382993 - DNA, 970 bp, Homo Sapiens; identical to SEQ ID NO: 350530

SEQ ID NO: 382994 - DNA, 815 bp, Homo Sapiens; identical to SEQ ID NO: 350531
  misc_feature (627)..(627): n is a, c, g, or t
  misc_feature (726)..(726): n is a, c, g, or t
  misc_feature (781)..(781): n is a, c, g, or t
  misc_feature (786)..(786): n is a, c, g, or t
  misc_feature (793)..(793): n is a, c, g, or t

SEQ ID NO: 382995 - DNA, 919 bp, Homo Sapiens; identical to SEQ ID NO: 350532

SEQ ID NO: 382996 - DNA, 1259 bp, Homo Sapiens; identical to SEQ ID NO: 350533

SEQ ID NO: 382997 - DNA, 602 bp, Homo Sapiens; identical to SEQ ID NO: 350534
  misc_feature (139)..(139): n is a, c, g, or t
  misc_feature (146)..(146): n is a, c, g, or t

SEQ ID NO: 382998 - DNA, 1314 bp, Homo Sapiens; identical to SEQ ID NO: 350535

SEQ ID NO: 382999 - DNA, 453 bp, Homo Sapiens; identical to SEQ ID NO: 350536
  misc_feature (298)..(298): n is a, c, g, or t
  misc_feature (391)..(391): n is a, c, g, or t
  misc_feature (426)..(426): n is a, c, g, or t

SEQ ID NO: 383000 - DNA, 2652 bp, Homo Sapiens; identical to SEQ ID NO: 350538
  misc_feature (2606)..(2606): n is a, c, g, or t

SEQ ID NO: 383001 - DNA, 905 bp, Homo Sapiens; identical to SEQ ID NO: 350539

SEQ ID NO: 383002 - DNA, 859 bp, Homo Sapiens; identical to SEQ ID NO: 350540

SEQ ID NO: 383003 - DNA, 2559 bp, Homo Sapiens; identical to SEQ ID NO: 350543
  misc_feature (51)..(87): n is a, c, g, or t
  misc_feature (1964)..(2010): n is a, c, g, or t
  misc_feature (2249)..(2259): n is a, c, g, or t

SEQ ID NO: 383004 - DNA, 665 bp, Homo Sapiens; identical to SEQ ID NO: 350544
  misc_feature (631)..(631): n is a, c, g, or t

SEQ ID NO: 383005 - DNA, 402 bp, Homo Sapiens; identical to SEQ ID NO: 350545

SEQ ID NO: 383006 - DNA, 1611 bp, Homo Sapiens; identical to SEQ ID NO: 350547
  misc_feature (1467)..(1467): n is a, c, g, or t
  misc_feature (1512)..(1512): n is a, c, g, or t
  misc_feature (1523)..(1523): n is a, c, g, or t
  misc_feature (1555)..(1555): n is a, c, g, or t
  misc_feature (1561)..(1561): n is a, c, g, or t
  misc_feature (1564)..(1564): n is a, c, g, or t
  misc_feature (1586)..(1586): n is a, c, g, or t

SEQ ID NO: 383007 - DNA, 1671 bp, Homo Sapiens; identical to SEQ ID NO: 350548
  misc_feature (8)..(8): n is a, c, g, or t
  misc_feature (21)..(21): n is a, c, g, or t
  misc_feature (24)..(24): n is a, c, g, or t
  misc_feature (31)..(31): n is a, c, g, or t
  misc_feature (47)..(47): n is a, c, g, or t
  misc_feature (70)..(70): n is a, c, g, or t
  misc_feature (72)..(72): n is a, c, g, or t
  misc_feature (95)..(95): n is a, c, g, or t
  misc_feature (102)..(102): n is a, c, g, or t
  misc_feature (130)..(130): n is a, c, g, or t
  misc_feature (133)..(133): n is a, c, g, or t
  misc_feature (1541)..(1541): n is a, c, g, or t
  misc_feature (1594)..(1608): n is a, c, g, or t

SEQ ID NO: 383008 - DNA, 1009 bp, Homo Sapiens; identical to SEQ ID NO: 350549
  misc_feature (15)..(15): n is a, c, g, or t
  misc_feature (36)..(36): n is a, c, g, or t
  misc_feature (41)..(42): n is a, c, g, or t
  misc_feature (51)..(51): n is a, c, g, or t
  misc_feature (54)..(54): n is a, c, g, or t
  misc_feature (56)..(56): n is a, c, g, or t
  misc_feature (67)..(68): n is a, c, g, or t
  misc_feature (72)..(72): n is a, c, g, or t
  misc_feature (78)..(78): n is a, c, g, or t
  misc_feature (94)..(94): n is a, c, g, or t
  misc_feature (99)..(99): n is a, c, g, or t
  misc_feature (103)..(103): n is a, c, g, or t
  misc_feature (114)..(115): n is a, c, g, or t

SEQ ID NO: 383009 - DNA, 1260 bp, Homo Sapiens; identical to SEQ ID NO: 350550

SEQ ID NO: 383010 - DNA, 1380 bp, Homo Sapiens; identical to SEQ ID NO: 350556
  misc_feature (212)..(223): n is a, c, g, or t
  misc_feature (430)..(440): n is a, c, g, or t
  misc_feature (487)..(533): n is a, c, g, or t
  misc_feature (651)..(673): n is a, c, g, or t

SEQ ID NO: 383011 - DNA, 899 bp, Homo Sapiens; identical to SEQ ID NO: 350557
  misc_feature (702)..(705): n is a, c, g, or t
  misc_feature (708)..(708): n is a, c, g, or t

SEQ ID NO: 383012 - DNA, 794 bp, Homo Sapiens; identical to SEQ ID NO: 350560

SEQ ID NO: 383013 - DNA, 584 bp, Homo Sapiens; identical to SEQ ID NO: 350561
  misc_feature (494)..(494): n is a, c, g, or t
  misc_feature (542)..(542): n is a, c, g, or t
  misc_feature (560)..(560): n is a, c, g, or t

SEQ ID NO: 383014 - DNA, 1010 bp, Homo Sapiens; identical to SEQ ID NO: 350562
  misc_feature (408)..(519): n is a, c, g, or t
  misc_feature (567)..(588): n is a, c, g, or t
  misc_feature (603)..(604): n is a, c, g, or t
  misc_feature (606)..(609): n is a, c, g, or t
  misc_feature (611)..(618): n is a, c, g, or t
  misc_feature (620)..(621): n is a, c, g, or t
  misc_feature (623)..(625): n is a, c, g, or t
  misc_feature (627)..(631): n is a, c, g, or t
  misc_feature (633)..(633): n is a, c, g, or t
  misc_feature (636)..(642): n is a, c, g, or t
  misc_feature (644)..(644): n is a, c, g, or t
  misc_feature (646)..(647): n is a, c, g, or t
  misc_feature (652)..(673): n is a, c, g, or t
  misc_feature (700)..(700): n is a, c, g, or t
  misc_feature (704)..(704): n is a, c, g, or t

SEQ ID NO: 383015 - DNA, 1688 bp, Homo Sapiens; identical to SEQ ID NO: 350563
  misc_feature (1603)..(1603): n is a, c, g, or t

SEQ ID NO: 383016 - DNA, 860 bp, Homo Sapiens; identical to SEQ ID NO: 350564

SEQ ID NO: 383017 - DNA, 1024 bp, Homo Sapiens; identical to SEQ ID NO: 350565
  misc_feature (882)..(882): n is a, c, g, or t
  misc_feature (983)..(984): n is a, c, g, or t

SEQ ID NO: 383018 - DNA, 1609 bp, Homo Sapiens; identical to SEQ ID NO: 350566

SEQ ID NO: 383019 - DNA, 2251 bp, Homo Sapiens; identical to SEQ ID NO: 350567
  misc_feature (2115)..(2115): n is a, c, g, or t
  misc_feature (2217)..(2217): n is a, c, g, or t

SEQ ID NO: 383020 - DNA, 3224 bp, Homo Sapiens; identical to SEQ ID NO: 350568
  misc_feature (1169)..(1169): n is a, c, g, or t
  misc_feature (2126)..(2139): n is a, c, g, or t

SEQ ID NO: 383021 - DNA, 845 bp, Homo Sapiens; identical to SEQ ID NO: 350569
  misc_feature (11)..(11): n is a, c, g, or t
  misc_feature (37)..(37): n is a, c, g, or t
  misc_feature (509)..(522): n is a, c, g, or t

SEQ ID NO: 383022 - DNA, 471 bp, Homo Sapiens; identical to SEQ ID NO: 350570

SEQ ID NO: 383023 - DNA, 788 bp, Homo Sapiens; identical to SEQ ID NO: 350571
  misc_feature (150)..(193): n is a, c, g, or t

SEQ ID NO: 383024 - DNA, 2804 bp, Homo Sapiens; identical to SEQ ID NO: 350572
  misc_feature (509)..(517): n is a, c, g, or t
  misc_feature (1066)..(1074): n is a, c, g, or t

SEQ ID NO: 383025 - DNA, 1360 bp, Homo Sapiens; identical to SEQ ID NO: 350576

SEQ ID NO: 383026 - DNA, 1088 bp, Homo Sapiens; identical to SEQ ID NO: 350577
  misc_feature (883)..(883): n is a, c, g, or t
  misc_feature (890)..(890): n is a, c, g, or t
  misc_feature (893)..(893): n is a, c, g, or t
  misc_feature (896)..(896): n is a, c, g, or t
  misc_feature (929)..(929): n is a, c, g, or t
  misc_feature (936)..(936): n is a, c, g, or t
  misc_feature (949)..(949): n is a, c, g, or t
  misc_feature (964)..(964): n is a, c, g, or t
  misc_feature (966)..(966): n is a, c, g, or t
  misc_feature (991)..(991): n is a, c, g, or t
  misc_feature (993)..(993): n is a, c, g, or t
  misc_feature (1006)..(1006): n is a, c, g, or t
  misc_feature (1020)..(1021): n is a, c, g, or t
  misc_feature (1031)..(1032): n is a, c, g, or t
  misc_feature (1034)..(1034): n is a, c, g, or t
  misc_feature (1040)..(1040): n is a, c, g, or t
  misc_feature (1045)..(1046): n is a, c, g, or t
  misc_feature (1050)..(1051): n is a, c, g, or t
  misc_feature (1053)..(1053): n is a, c, g, or t
  misc_feature (1056)..(1056): n is a, c, g, or t
  misc_feature (1058)..(1058): n is a, c, g, or t
  misc_feature (1062)..(1063): n is a, c, g, or t
  misc_feature (1071)..(1071): n is a, c, g, or t
  misc_feature (1075)..(1075): n is a, c, g, or t
  misc_feature (1080)..(1080): n is a, c, g, or t

SEQ ID NO: 383027 - DNA, 1068 bp, Homo Sapiens; identical to SEQ ID NO: 350580

SEQ ID NO: 383028 - DNA, 1076 bp, Homo Sapiens; identical to SEQ ID NO: 350581
  misc_feature (279)..(347): n is a, c, g, or t

SEQ ID NO: 383029 - DNA, 1047 bp, Homo Sapiens; identical to SEQ ID NO: 350582
  misc_feature (952)..(954): n is a, c, g, or t
  misc_feature (957)..(958): n is a, c, g, or t
  misc_feature (960)..(969): n is a, c, g, or t
  misc_feature (971)..(973): n is a, c, g, or t
  misc_feature (975)..(975): n is a, c, g, or t

SEQ ID NO: 383030 - DNA, 1677 bp, Homo Sapiens; identical to SEQ ID NO: 350588
  misc_feature (133)..(133): n is a, c, g, or t
  misc_feature (1408)..(1408): n is a, c, g, or t
  misc_feature (1534)..(1534): n is a, c, g, or t

SEQ ID NO: 383031 - DNA, 613 bp, Homo Sapiens; identical to SEQ ID NO: 350589

SEQ ID NO: 383032 - DNA, 511 bp, Homo Sapiens; identical to SEQ ID NO: 350590
  misc_feature (55)..(55): n is a, c, g, or t
  misc_feature (65)..(65): n is a, c, g, or t
  misc_feature (182)..(182): n is a, c, g, or t

SEQ ID NO: 383033 - DNA, 1065 bp, Homo Sapiens; identical to SEQ ID NO: 350592
  misc_feature (4)..(4): n is a, c, g, or t
  misc_feature (11)..(12): n is a, c, g, or t
  misc_feature (16)..(16): n is a, c, g, or t
  misc_feature (27)..(27): n is a, c, g, or t
  misc_feature (35)..(36): n is a, c, g, or t
  misc_feature (39)..(39): n is a, c, g, or t
  misc_feature (41)..(41): n is a, c, g, or t
  misc_feature (49)..(49): n is a, c, g, or t
  misc_feature (59)..(59): n is a, c, g, or t
  misc_feature (66)..(66): n is a, c, g, or t
  misc_feature (75)..(76): n is a, c, g, or t
  misc_feature (81)..(82): n is a, c, g, or t
  misc_feature (88)..(88): n is a, c, g, or t
  misc_feature (91)..(91): n is a, c, g, or t
  misc_feature (96)..(96): n is a, c, g, or t
  misc_feature (105)..(105): n is a, c, g, or t
  misc_feature (108)..(108): n is a, c, g, or t
  misc_feature (115)..(115): n is a, c, g, or t
  misc_feature (119)..(119): n is a, c, g, or t
  misc_feature (129)..(129): n is a, c, g, or t
  misc_feature (136)..(136): n is a, c, g, or t
  misc_feature (148)..(148): n is a, c, g, or t
  misc_feature (151)..(151): n is a, c, g, or t
  misc_feature (165)..(165): n is a, c, g, or t
  misc_feature (168)..(168): n is a, c, g, or t
  misc_feature (176)..(176): n is a, c, g, or t
  misc_feature (196)..(196): n is a, c, g, or t
  misc_feature (492)..(492): n is a, c, g, or t

SEQ ID NO: 383034 - DNA, 2100 bp, Homo Sapiens; identical to SEQ ID NO: 350593
  misc_feature (1899)..(1899): n is a, c, g, or t
  misc_feature (2046)..(2055): n is a, c, g, or t

SEQ ID NO: 383035 - DNA, 671 bp, Homo Sapiens; identical to SEQ ID NO: 350594

SEQ ID NO: 383036 - DNA, 449 bp, Homo Sapiens; identical to SEQ ID NO: 350595
  misc_feature (405)..(405): n is a, c, g, or t
  misc_feature (414)..(414): n is a, c, g, or t

SEQ ID NO: 383037 - DNA, 450 bp, Homo Sapiens; identical to SEQ ID NO: 350599

SEQ ID NO: 383038 - DNA, 1542 bp, Homo Sapiens; identical to SEQ ID NO: 350600

SEQ ID NO: 383039 - DNA, 2200 bp, Homo Sapiens; identical to SEQ ID NO: 350601
  misc_feature (1928)..(2023): n is a, c, g, or t

SEQ ID NO: 383040 - DNA, 840 bp, Homo Sapiens; identical to SEQ ID NO: 350606

SEQ ID NO: 383041 - DNA, 1039 bp, Homo Sapiens; identical to SEQ ID NO: 350607
  misc_feature (642)..(642): n is a, c, g, or t
  misc_feature (907)..(932): n is a, c, g, or t

SEQ ID NO: 383042 - DNA, 1851 bp, Homo Sapiens; identical to SEQ ID NO: 350608
  misc_feature (558)..(558): n is a, c, g, or t
  misc_feature (561)..(561): n is a, c, g, or t
  misc_feature (564)..(564): n is a, c, g, or t

SEQ ID NO: 383043 - DNA, 1154 bp, Homo Sapiens; identical to SEQ ID NO: 350609
  misc_feature (749)..(752): n is a, c, g, or t

SEQ ID NO: 383044 - DNA, 458 bp, Homo Sapiens; identical to SEQ ID NO: 350610

SEQ ID NO: 383045 - DNA, 473 bp, Homo Sapiens; identical to SEQ ID NO: 350611
  misc_feature (358)..(408): n is a, c, g, or t

SEQ ID NO: 383046 - DNA, 701 bp, Homo Sapiens; identical to SEQ ID NO: 350612
  misc_feature (227)..(227): n is a, c, g, or t
  misc_feature (261)..(261): n is a, c, g, or t

SEQ ID NO: 383047 - DNA, 1016 bp, Homo Sapiens; identical to SEQ ID NO: 350613
  misc_feature (880)..(881): n is a, c, g, or t
  misc_feature (964)..(972): n is a, c, g, or t

SEQ ID NO: 383048 - DNA, 1591 bp, Homo Sapiens; identical to SEQ ID NO: 350614
  misc_feature (28)..(28): n is a, c, g, or t
  misc_feature (74)..(75): n is a, c, g, or t
  misc_feature (84)..(120): n is a, c, g, or t

SEQ ID NO: 383049 - DNA, 1181 bp, Homo Sapiens; identical to SEQ ID NO: 350616

SEQ ID NO: 383050 - DNA, 1241 bp, Homo Sapiens; identical to SEQ ID NO: 350617
  misc_feature (1024)..(1024): n is a, c, g, or t

SEQ ID NO: 383051 - DNA, 1026 bp, Homo Sapiens; identical to SEQ ID NO: 350618

SEQ ID NO: 383052 - DNA, 1084 bp, Homo Sapiens; identical to SEQ ID NO: 350619
  misc_feature (705)..(705): n is a, c, g, or t
  misc_feature (831)..(831): n is a, c, g, or t
  misc_feature (841)..(841): n is a, c, g, or t
  misc_feature (849)..(849): n is a, c, g, or t
  misc_feature (960)..(960): n is a, c, g, or t
  misc_feature (1021)..(1021): n is a, c, g, or t
  misc_feature (1029)..(1029): n is a, c, g, or t
  misc_feature (1055)..(1055): n is a, c, g, or t

SEQ ID NO: 383053 - DNA, 1364 bp, Homo Sapiens; identical to SEQ ID NO: 350620
  misc_feature (1034)..(1042): n is a, c, g, or t

SEQ ID NO: 383054 - DNA, 1112 bp, Homo Sapiens; identical to SEQ ID NO: 350621
  misc_feature (971)..(971): n is a, c, g, or t
  misc_feature (983)..(983): n is a, c, g, or t
  misc_feature (994)..(994): n is a, c, g, or t
  misc_feature (1003)..(1003): n is a, c, g, or t
  misc_feature (1019)..(1019): n is a, c, g, or t
  misc_feature (1024)..(1024): n is a, c, g, or t
  misc_feature (1041)..(1041): n is a, c, g, or t
  misc_feature (1044)..(1044): n is a, c, g, or t
  misc_feature (1056)..(1056): n is a, c, g, or t
  misc_feature (1060)..(1060): n is a, c, g, or t
  misc_feature (1069)..(1069): n is a, c, g, or t
  misc_feature (1071)..(1071): n is a, c, g, or t
  misc_feature (1075)..(1075): n is a, c, g, or t
  misc_feature (1088)..(1088): n is a, c, g, or t
  misc_feature (1091)..(1091): n is a, c, g, or t
  misc_feature (1097)..(1097): n is a, c, g, or t
  misc_feature (1100)..(1100): n is a, c, g, or t
  misc_feature (1103)..(1103): n is a, c, g, or t
  misc_feature (1109)..(1109): n is a, c, g, or t

SEQ ID NO: 383055 - DNA, 1589 bp, Homo Sapiens; identical to SEQ ID NO: 350622
  misc_feature (921)..(921): n is a, c, g, or t
  misc_feature (932)..(932): n is a, c, g, or t
  misc_feature (959)..(959): n is a, c, g, or t
  misc_feature (1199)..(1199): n is a, c, g, or t
  misc_feature (1227)..(1227): n is a, c, g, or t
  misc_feature (1366)..(1366): n is a, c, g, or t
  misc_feature (1439)..(1439): n is a, c, g, or t
  misc_feature (1487)..(1487): n is a, c, g, or t
  misc_feature (1489)..(1489): n is a, c, g, or t

SEQ ID NO: 383056 - DNA, 754 bp, Homo Sapiens; identical to SEQ ID NO: 350625
  misc_feature (18)..(18): n is a, c, g, or t
  misc_feature (52)..(52): n is a, c, g, or t

SEQ ID NO: 383057 - DNA, 787 bp, Homo Sapiens; identical to SEQ ID NO: 350626

SEQ ID NO: 383058 - DNA, 1467 bp, Homo Sapiens; identical to SEQ ID NO: 350627
  misc_feature (22)..(22): n is a, c, g, or t
  misc_feature (50)..(50): n is a, c, g, or t

SEQ ID NO: 383059 - DNA, 1140 bp, Homo Sapiens; identical to SEQ ID NO: 350628
  misc_feature (19)..(19): n is a, c, g, or t
  misc_feature (921)..(921): n is a, c, g, or t
  misc_feature (989)..(989): n is a, c, g, or t
  misc_feature (1031)..(1031): n is a, c, g, or t
  misc_feature (1041)..(1041): n is a, c, g, or t
  misc_feature (1048)..(1048): n is a, c, g, or t
  misc_feature (1057)..(1057): n is a, c, g, or t
  misc_feature (1070)..(1070): n is a, c, g, or t
  misc_feature (1072)..(1072): n is a, c, g, or t
  misc_feature (1077)..(1077): n is a, c, g, or t
  misc_feature (1080)..(1080): n is a, c, g, or t
  misc_feature (1093)..(1093): n is a, c, g, or t
  misc_feature (1099)..(1100): n is a, c, g, or t
  misc_feature (1103)..(1103): n is a, c, g, or t
  misc_feature (1116)..(1116): n is a, c, g, or t
  misc_feature (1123)..(1123): n is a, c, g, or t
  misc_feature (1131)..(1131): n is a, c, g, or t

SEQ ID NO: 383060 - DNA, 1512 bp, Homo Sapiens; identical to SEQ ID NO: 350629
  misc_feature (15)..(15): n is a, c, g, or t

SEQ ID NO: 383061 - DNA, 925 bp, Homo Sapiens; identical to SEQ ID NO: 15808

SEQ ID NO: 383062 - DNA, 759 bp, Homo Sapiens; identical to SEQ ID NO: 350632

SEQ ID NO: 383063 - DNA, 1661 bp, Homo Sapiens; identical to SEQ ID NO: 350635
  misc_feature (647)..(647): n is a, c, g, or t
  misc_feature (750)..(750): n is a, c, g, or t
  misc_feature (1164)..(1176): n is a, c, g, or t
  misc_feature (1503)..(1503): n is a, c, g, or t

SEQ ID NO: 383064 - DNA, 533 bp, Homo Sapiens; identical to SEQ ID NO: 350636
  misc_feature (17)..(17): n is a, c, g, or t
  misc_feature (46)..(46): n is a, c, g, or t

SEQ ID NO: 383065 - DNA, 797 bp, Homo Sapiens; identical to SEQ ID NO: 350639
  misc_feature (534)..(554): n is a, c, g, or t
  misc_feature (694)..(731): n is a, c, g, or t

SEQ ID NO: 383066 - DNA, 1417 bp, Homo Sapiens; identical to SEQ ID NO: 350640

SEQ ID NO: 383067 - DNA, 1202 bp, Homo Sapiens; identical to SEQ ID NO: 350641
  misc_feature (59)..(78): n is a, c, g, or t
  misc_feature (111)..(124): n is a, c, g, or t

SEQ ID NO: 383068 - DNA, 843 bp, Homo Sapiens; identical to SEQ ID NO: 350642
  misc_feature (49)..(49): n is a, c, g, or t
  misc_feature (115)..(115): n is a, c, g, or t

SEQ ID NO: 383069 - DNA, 672 bp, Homo Sapiens; identical to SEQ ID NO: 350643
  misc_feature (542)..(542): n is a, c, g, or t
  misc_feature (570)..(570): n is a, c, g, or t

SEQ ID NO: 383070 - DNA, 1269 bp, Homo Sapiens; identical to SEQ ID NO: 350644
  misc_feature (878)..(887): n is a, c, g, or t
  misc_feature (894)..(894): n is a, c, g, or t

SEQ ID NO: 383071 - DNA, 382 bp, Homo Sapiens; identical to SEQ ID NO: 350645
  misc_feature (160)..(175): n is a, c, g, or t

SEQ ID NO: 383072 - DNA, 1696 bp, Homo Sapiens; identical to SEQ ID NO: 350646
  misc_feature (1284)..(1292): n is a, c, g, or t

SEQ ID NO: 383073 - DNA, 417 bp, Homo Sapiens; identical to SEQ ID NO: 350647
  misc_feature (41)..(49): n is a, c, g, or t

SEQ ID NO: 383074 - DNA, 2580 bp, Homo Sapiens; identical to SEQ ID NO: 350656
  misc_feature (2031)..(2108): n is a, c, g, or t

SEQ ID NO: 383075 - DNA, 822 bp, Homo Sapiens; identical to SEQ ID NO: 350657

SEQ ID NO: 383076 - DNA, 1544 bp, Homo Sapiens; identical to SEQ ID NO: 350662
  misc_feature (58)..(94): n is a, c, g, or t
  misc_feature (1261)..(1326): n is a, c, g, or t

SEQ ID NO: 383077 - DNA, 1094 bp, Homo Sapiens; identical to SEQ ID NO: 350663
  misc_feature (785)..(785): n is a, c, g, or t

SEQ ID NO: 383078 - DNA, 725 bp, Homo Sapiens; identical to SEQ ID NO: 350668
  misc_feature (44)..(44): n is a, c, g, or t

SEQ ID NO: 383079 - DNA, 1597 bp, Homo Sapiens; identical to SEQ ID NO: 350669
  misc_feature (1453)..(1453): n is a, c, g, or t
  misc_feature (1462)..(1463): n is a, c, g, or t
  misc_feature (1534)..(1534): n is a, c, g, or t
  misc_feature (1567)..(1567): n is a, c, g, or t

SEQ ID NO: 383080 - DNA, 994 bp, Homo Sapiens; identical to SEQ ID NO: 350670
  misc_feature (723)..(723): n is a, c, g, or t
  misc_feature (808)..(808): n is a, c, g, or t
  misc_feature (862)..(862): n is a, c, g, or t
  misc_feature (870)..(870): n is a, c, g, or t
  misc_feature (893)..(893): n is a, c, g, or t
  misc_feature (905)..(905): n is a, c, g, or t
  misc_feature (910)..(910): n is a, c, g, or t
  misc_feature (937)..(937): n is a, c, g, or t
  misc_feature (942)..(942): n is a, c, g, or t

SEQ ID NO: 383081 - DNA, 1353 bp, Homo Sapiens; identical to SEQ ID NO: 350671
  misc_feature (6)..(6): n is a, c, g, or t
  misc_feature (14)..(14): n is a, c, g, or t
  misc_feature (17)..(17): n is a, c, g, or t
  misc_feature (21)..(21): n is a, c, g, or t
  misc_feature (23)..(23): n is a, c, g, or t
  misc_feature (29)..(29): n is a, c, g, or t
  misc_feature (37)..(37): n is a, c, g, or t
  misc_feature (45)..(45): n is a, c, g, or t
  misc_feature (58)..(58): n is a, c, g, or t
  misc_feature (63)..(63): n is a, c, g, or t
  misc_feature (67)..(67): n is a, c, g, or t
  misc_feature (79)..(79): n is a, c, g, or t
  misc_feature (87)..(87): n is a, c, g, or t
  misc_feature (95)..(95): n is a, c, g, or t
  misc_feature (111)..(111): n is a, c, g, or t
  misc_feature (116)..(116): n is a, c, g, or t
  misc_feature (1097)..(1098): n is a, c, g, or t
  misc_feature (1101)..(1102): n is a, c, g, or t
  misc_feature (1104)..(1104): n is a, c, g, or t
  misc_feature (1107)..(1107): n is a, c, g, or t
  misc_feature (1115)..(1116): n is a, c, g, or t
  misc_feature (1121)..(1121): n is a, c, g, or t
  misc_feature (1141)..(1149): n is a, c, g, or t

SEQ ID NO: 383082 - DNA, 754 bp, Homo Sapiens; identical to SEQ ID NO: 350673
  misc_feature (141)..(154): n is a, c, g, or t

SEQ ID NO: 383083 - DNA, 922 bp, Homo Sapiens; identical to SEQ ID NO: 350674
  misc_feature (801)..(815): n is a, c, g, or t

SEQ ID NO: 383084 - DNA, 2298 bp, Homo Sapiens; identical to SEQ ID NO: 350680
  misc_feature (1577)..(1610): n is a, c, g, or t
  misc_feature (1615)..(1620): n is a, c, g, or t
  misc_feature (1969)..(2043): n is a, c, g, or t
  misc_feature (2096)..(2112): n is a, c, g, or t

SEQ ID NO: 383085 - DNA, 785 bp, Homo Sapiens; identical to SEQ ID NO: 350681

SEQ ID NO: 383086 - DNA, 2286 bp, Homo Sapiens; identical to SEQ ID NO: 350682
  misc_feature (1664)..(1678): n is a, c, g, or t

SEQ ID NO: 383087 - DNA, 1774 bp, Homo Sapiens; identical to SEQ ID NO: 350683
  misc_feature (493)..(508): n is a, c, g, or t
  misc_feature (877)..(877): n is a, c, g, or t
  misc_feature (879)..(959): n is a, c, g, or t
  misc_feature (1144)..(1180): n is a, c, g, or t
  misc_feature (1242)..(1252): n is a, c, g, or t
  misc_feature (1398)..(1398): n is a, c, g, or t
  misc_feature (1662)..(1662): n is a, c, g, or t
  misc_feature (1730)..(1730): n is a, c, g, or t

SEQ ID NO: 383088 - DNA, 418 bp, Homo Sapiens; identical to SEQ ID NO: 350684
  misc_feature (237)..(237): n is a, c, g, or t

SEQ ID NO: 383089 - DNA, 1195 bp, Homo Sapiens; identical to SEQ ID NO: 350685

SEQ ID NO: 383090 - DNA, 442 bp, Homo Sapiens; identical to SEQ ID NO: 350686

SEQ ID NO: 383091 - DNA, 1184 bp, Homo Sapiens; identical to SEQ ID NO: 350687

SEQ ID NO: 383092 - DNA, 1823 bp, Homo Sapiens; identical to SEQ ID NO: 350688
  misc_feature (169)..(169): n is a, c, g, or t
  misc_feature (1363)..(1476): n is a, c, g, or t
  misc_feature (1660)..(1660): n is a, c, g, or t

SEQ ID NO: 383093 - DNA, 1769 bp, Homo Sapiens; identical to SEQ ID NO: 350689
  misc_feature (127)..(137): n is a, c, g, or t

SEQ ID NO: 383094 - DNA, 1139 bp, Homo Sapiens; identical to SEQ ID NO: 350690
  misc_feature (325)..(492): n is a, c, g, or t
  misc_feature (983)..(983): n is a, c, g, or t
  misc_feature (1005)..(1005): n is a, c, g, or t

SEQ ID NO: 383095 - DNA, 722 bp, Homo Sapiens; identical to SEQ ID NO: 350691
  misc_feature (321)..(321): n is a, c, g, or t

SEQ ID NO: 383096 - DNA, 416 bp, Homo Sapiens; identical to SEQ ID NO: 350692

SEQ ID NO: 383097 - DNA, 559 bp, Homo Sapiens; identical to SEQ ID NO: 350693

SEQ ID NO: 383098 - DNA, 882 bp, Homo Sapiens; identical to SEQ ID NO: 350694
  misc_feature (700)..(700): n is a, c, g, or t

SEQ ID NO: 383099 - DNA, 568 bp, Homo Sapiens; identical to SEQ ID NO: 350695

SEQ ID NO: 383100 - DNA, 1039 bp, Homo Sapiens; identical to SEQ ID NO: 350697
  misc_feature (917)..(917): n is a, c, g, or t
  misc_feature (923)..(923): n is a, c, g, or t
  misc_feature (961)..(961): n is a, c, g, or t
  misc_feature (972)..(972): n is a, c, g, or t
  misc_feature (987)..(987): n is a, c, g, or t
  misc_feature (999)..(999): n is a, c, g, or t
  misc_feature (1002)..(1004): n is a, c, g, or t
  misc_feature (1013)..(1014): n is a, c, g, or t
  misc_feature (1020)..(1020): n is a, c, g, or t

SEQ ID NO: 383101 - DNA, 1688 bp, Homo Sapiens; identical to SEQ ID NO: 350698
  misc_feature (1397)..(1422): n is a, c, g, or t

SEQ ID NO: 383102 - DNA, 845 bp, Homo Sapiens; identical to SEQ ID NO: 350699

SEQ ID NO: 383103 - DNA, 1646 bp, Homo Sapiens; identical to SEQ ID NO: 350700
  misc_feature (23)..(23): n is a, c, g, or t
  misc_feature (1422)..(1435): n is a, c, g, or t
  misc_feature (1564)..(1600): n is a, c, g, or t

SEQ ID NO: 383104 - DNA, 575 bp, Homo Sapiens; identical to SEQ ID NO: 350701

SEQ ID NO: 383105 - DNA, 608 bp, Homo Sapiens; identical to SEQ ID NO: 350702
  misc_feature (232)..(232): n is a, c, g, or t

SEQ ID NO: 383106 - DNA, 574 bp, Homo Sapiens; identical to SEQ ID NO: 350703

SEQ ID NO: 383107 - DNA, 716 bp, Homo Sapiens; identical to SEQ ID NO: 350704

SEQ ID NO: 383108 - DNA, 696 bp, Homo Sapiens; identical to SEQ ID NO: 350705

SEQ ID NO: 383109 - DNA, 1167 bp, Homo Sapiens; identical to SEQ ID NO: 350706

SEQ ID NO: 383110 - DNA, 1258 bp, Homo Sapiens; identical to SEQ ID NO: 350709
  misc_feature (7)..(7): n is a, c, g, or t

SEQ ID NO: 383111 - DNA, 2047 bp, Homo Sapiens; identical to SEQ ID NO: 350710
  misc_feature (1109)..(1359): n is a, c, g, or t
  misc_feature (1361)..(1382): n is a, c, g, or t
  misc_feature (1677)..(1877): n is a, c, g, or t
  misc_feature (1972)..(1977): n is a, c, g, or t
  misc_feature (1980)..(1981): n is a, c, g, or t
  misc_feature (2010)..(2011): n is a, c, g, or t

SEQ ID NO: 383112 - DNA, 1647 bp, Homo Sapiens; identical to SEQ ID NO: 350712
  misc_feature (25)..(26): n is a, c, g, or t
  misc_feature (1639)..(1639): n is a, c, g, or t

SEQ ID NO: 383113 - DNA, 1379 bp, Homo Sapiens; identical to SEQ ID NO: 350713

SEQ ID NO: 383114 - DNA, 3314 bp, Homo Sapiens; identical to SEQ ID NO: 350715

SEQ ID NO: 383115 - DNA, 977 bp, Homo Sapiens; identical to SEQ ID NO: 350716
  misc_feature (219)..(219): n is a, c, g, or t

SEQ ID NO: 383116 - DNA, 491 bp, Homo Sapiens; identical to SEQ ID NO: 350717
  misc_feature (28)..(28): n is a, c, g, or t

SEQ ID NO: 383117 - DNA, 1866 bp, Homo Sapiens; identical to SEQ ID NO: 350718

SEQ ID NO: 383118 - DNA, 848 bp, Homo Sapiens; identical to SEQ ID NO: 350719

SEQ ID NO: 383119 - DNA, 1459 bp, Homo Sapiens; identical to SEQ ID NO: 350720

SEQ ID NO: 383120 - DNA, 900 bp, Homo Sapiens; identical to SEQ ID NO: 350721
  misc_feature (53)..(89): n is a, c, g, or t

SEQ ID NO: 383121 - DNA, 2014 bp, Homo Sapiens; identical to SEQ ID NO: 350722
  misc_feature (1980)..(1980): n is a, c, g, or t

SEQ ID NO: 383122 - DNA, 1235 bp, Homo Sapiens; identical to SEQ ID NO: 350723
  misc_feature (2)..(2): n is a, c, g, or t
  misc_feature (6)..(7): n is a, c, g, or t
  misc_feature (16)..(16): n is a, c, g, or t
  misc_feature (30)..(30): n is a, c, g, or t
  misc_feature (32)..(32): n is a, c, g, or t
  misc_feature (38)..(38): n is a, c, g, or t
  misc_feature (41)..(41): n is a, c, g, or t
  misc_feature (43)..(43): n is a, c, g, or t
  misc_feature (54)..(54): n is a, c, g, or t
  misc_feature (57)..(58): n is a, c, g, or t
  misc_feature (63)..(64): n is a, c, g, or t
  misc_feature (68)..(68): n is a, c, g, or t
  misc_feature (80)..(82): n is a, c, g, or t
  misc_feature (85)..(86): n is a, c, g, or t
  misc_feature (88)..(88): n is a, c, g, or t
  misc_feature (91)..(91): n is a, c, g, or t
  misc_feature (93)..(93): n is a, c, g, or t
  misc_feature (96)..(96): n is a, c, g, or t
  misc_feature (104)..(105): n is a, c, g, or t
  misc_feature (109)..(110): n is a, c, g, or t
  misc_feature (116)..(116): n is a, c, g, or t
  misc_feature (120)..(120): n is a, c, g, or t
  misc_feature (122)..(123): n is a, c, g, or t
  misc_feature (127)..(128): n is a, c, g, or t
  misc_feature (131)..(132): n is a, c, g, or t
  misc_feature (134)..(134): n is a, c, g, or t
  misc_feature (136)..(136): n is a, c, g, or t
  misc_feature (141)..(141): n is a, c, g, or t
  misc_feature (158)..(158): n is a, c, g, or t
  misc_feature (160)..(160): n is a, c, g, or t
  misc_feature (162)..(162): n is a, c, g, or t
  misc_feature (164)..(164): n is a, c, g, or t
  misc_feature (175)..(175): n is a, c, g, or t
  misc_feature (179)..(179): n is a, c, g, or t
  misc_feature (190)..(190): n is a, c, g, or t
  misc_feature (193)..(193): n is a, c, g, or t
  misc_feature (217)..(217): n is a, c, g, or t
  misc_feature (223)..(223): n is a, c, g, or t

SEQ ID NO: 383123 - DNA, 1754 bp, Homo Sapiens; identical to SEQ ID NO: 350726
  misc_feature (1295)..(1313): n is a, c, g, or t
  misc_feature (1322)..(1360): n is a, c, g, or t
  misc_feature (1408)..(1480): n is a, c, g, or t

SEQ ID NO: 383124 - DNA, 472 bp, Homo Sapiens; identical to SEQ ID NO: 350727
  misc_feature (19)..(19): n is a, c, g, or t
  misc_feature (58)..(58): n is a, c, g, or t

SEQ ID NO: 383125 - DNA, 1521 bp, Homo Sapiens; identical to SEQ ID NO: 350730
  misc_feature (874)..(951): n is a, c, g, or t
  misc_feature (1267)..(1281): n is a, c, g, or t

SEQ ID NO: 383126 - DNA, 445 bp, Homo Sapiens; identical to SEQ ID NO: 350731
  misc_feature (14)..(14): n is a, c, g, or t
  misc_feature (46)..(46): n is a, c, g, or t
  misc_feature (198)..(207): n is a, c, g, or t
  misc_feature (209)..(209): n is a, c, g, or t
  misc_feature (213)..(213): n is a, c, g, or t

SEQ ID NO: 383127 - DNA, 2094 bp, Homo Sapiens; identical to SEQ ID NO: 350732
  misc_feature (1598)..(1693): n is a, c, g, or t

SEQ ID NO: 383128 - DNA, 776 bp, Homo Sapiens; identical to SEQ ID NO: 350733

SEQ ID NO: 383129 - DNA, 1196 bp, Homo Sapiens; identical to SEQ ID NO: 350734
  misc_feature (1136)..(1146): n is a, c, g, or t

SEQ ID NO: 383130 - DNA, 231 bp, Homo Sapiens; identical to SEQ ID NO: 350735

SEQ ID NO: 383131 - DNA, 463 bp, Homo Sapiens; identical to SEQ ID NO: 350736
  misc_feature (127)..(127): n is a, c, g, or t

SEQ ID NO: 383132 - DNA, 1237 bp, Homo Sapiens; identical to SEQ ID NO: 350738
  misc_feature (828)..(1001): n is a, c, g, or t

SEQ ID NO: 383133 - DNA, 988 bp, Homo Sapiens; identical to SEQ ID NO: 350739
  misc_feature (232)..(424): n is a, c, g, or t
  misc_feature (973)..(973): n is a, c, g, or t

SEQ ID NO: 383134 - DNA, 1106 bp, Homo Sapiens; identical to SEQ ID NO: 350740
  misc_feature (461)..(653): n is a, c, g, or t
  misc_feature (954)..(972): n is a, c, g, or t

SEQ ID NO: 383135 - DNA, 1658 bp, Homo Sapiens; identical to SEQ ID NO: 350741
  misc_feature (1506)..(1506): n is a, c, g, or t

SEQ ID NO: 383136 - DNA, 939 bp, Homo Sapiens; identical to SEQ ID NO: 350742
  misc_feature (27)..(27): n is a, c, g, or t
  misc_feature (75)..(75): n is a, c, g, or t
  misc_feature (80)..(80): n is a, c, g, or t
  misc_feature (90)..(90): n is a, c, g, or t
  misc_feature (362)..(362): n is a, c, g, or t
  misc_feature (461)..(461): n is a, c, g, or t
  misc_feature (469)..(469): n is a, c, g, or t
  misc_feature (471)..(471): n is a, c, g, or t
  misc_feature (476)..(493): n is a, c, g, or t
  misc_feature (612)..(668): n is a, c, g, or t
  misc_feature (691)..(691): n is a, c, g, or t
  misc_feature (729)..(729): n is a, c, g, or t
  misc_feature (781)..(781): n is a, c, g, or t
  misc_feature (783)..(783): n is a, c, g, or t

SEQ ID NO: 383137 - DNA, 2698 bp, Homo Sapiens; identical to SEQ ID NO: 350743
  misc_feature (1689)..(1689): n is a, c, g, or t

SEQ ID NO: 383138 - DNA, 466 bp, Homo Sapiens; identical to SEQ ID NO: 350744
  misc_feature (19)..(19): n is a, c, g, or t
  misc_feature (287)..(287): n is a, c, g, or t

SEQ ID NO: 383139 - DNA, 1311 bp, Homo Sapiens; identical to SEQ ID NO: 350745

SEQ ID NO: 383140 - DNA, 1825 bp, Homo Sapiens; identical to SEQ ID NO: 350746

SEQ ID NO: 383141 - DNA, 1067 bp, Homo Sapiens; identical to SEQ ID NO: 350747

SEQ ID NO: 383142 - DNA, 829 bp, Homo Sapiens; identical to SEQ ID NO: 350748

SEQ ID NO: 383143 - DNA, 840 bp, Homo Sapiens; identical to SEQ ID NO: 350749

SEQ ID NO: 383144 - DNA, 1243 bp, Homo Sapiens; identical to SEQ ID NO: 350750
  misc_feature (1000)..(1009): n is a, c, g, or t
  misc_feature (1127)..(1130): n is a, c, g, or t
  misc_feature (1132)..(1132): n is a, c, g, or t
  misc_feature (1134)..(1134): n is a, c, g, or t
  misc_feature (1136)..(1136): n is a, c, g, or t
  misc_feature (1143)..(1143): n is a, c, g, or t
  misc_feature (1158)..(1158): n is a, c, g, or t
  misc_feature (1162)..(1162): n is a, c, g, or t
  misc_feature (1167)..(1167): n is a, c, g, or t

SEQ ID NO: 383145 - DNA, 1166 bp, Homo Sapiens; identical to SEQ ID NO: 350751

SEQ ID NO: 383146 - DNA, 1034 bp, Homo Sapiens; identical to SEQ ID NO: 350752
  misc_feature (137)..(158): n is a, c, g, or t
  misc_feature (829)..(829): n is a, c, g, or t

SEQ ID NO: 383147 - DNA, 1050 bp, Homo Sapiens; identical to SEQ ID NO: 350753
  misc_feature (50)..(86): n is a, c, g, or t
  misc_feature (446)..(498): n is a, c, g, or t
  misc_feature (671)..(733): n is a, c, g, or t

SEQ ID NO: 383148 - DNA, 815 bp, Homo Sapiens; identical to SEQ ID NO: 350754

SEQ ID NO: 383149 - DNA, 740 bp, Homo Sapiens; identical to SEQ ID NO: 350755
  misc_feature (274)..(327): n is a, c, g, or t
  misc_feature (513)..(571): n is a, c, g, or t

SEQ ID NO: 383150 - DNA, 1404 bp, Homo Sapiens; identical to SEQ ID NO: 350756

SEQ ID NO: 383151 - DNA, 410 bp, Homo Sapiens; identical to SEQ ID NO: 350757

SEQ ID NO: 383152 - DNA, 610 bp, Homo Sapiens; identical to SEQ ID NO: 350759

SEQ ID NO: 383153 - DNA, 2855 bp, Homo Sapiens; identical to SEQ ID NO: 350760

SEQ ID NO: 383154 - DNA, 1013 bp, Homo Sapiens; identical to SEQ ID NO: 350761

SEQ ID NO: 383155 - DNA, 913 bp, Homo Sapiens; identical to SEQ ID NO: 350766
  misc_feature (693)..(730): n is a, c, g, or t

SEQ ID NO: 383156 - DNA, 1195 bp, Homo Sapiens; identical to SEQ ID NO: 350767
  misc_feature (653)..(665): n is a, c, g, or t
  misc_feature (879)..(889): n is a, c, g, or t
  misc_feature (913)..(921): n is a, c, g, or t

SEQ ID NO: 383157 - DNA, 1458 bp, Homo Sapiens; identical to SEQ ID NO: 350768
  misc_feature (828)..(828): n is a, c, g, or t

SEQ ID NO: 383158 - DNA, 408 bp, Homo Sapiens; identical to SEQ ID NO: 350769
  misc_feature (12)..(12): n is a, c, g, or t
  misc_feature (389)..(389): n is a, c, g, or t

SEQ ID NO: 383159 - DNA, 954 bp, Homo Sapiens; identical to SEQ ID NO: 350770

SEQ ID NO: 383160 - DNA, 501 bp, Homo Sapiens; identical to SEQ ID NO: 350771

SEQ ID NO: 383161 - DNA, 894 bp, Homo Sapiens; identical to SEQ ID NO: 350772
  misc_feature (48)..(84): n is a, c, g, or t

SEQ ID NO: 383162 - DNA, 983 bp, Homo Sapiens; identical to SEQ ID NO: 350773

SEQ ID NO: 383163 - DNA, 1946 bp, Homo Sapiens; identical to SEQ ID NO: 350775
  misc_feature (983)..(983): n is a, c, g, or t
  misc_feature (1843)..(1859): n is a, c, g, or t

SEQ ID NO: 383164 - DNA, 628 bp, Homo Sapiens; identical to SEQ ID NO: 350776

SEQ ID NO: 383165 - DNA, 1144 bp, Homo Sapiens; identical to SEQ ID NO: 350781

SEQ ID NO: 383166 - DNA, 1355 bp, Homo Sapiens; identical to SEQ ID NO: 350782
  misc_feature (1158)..(1169): n is a, c, g, or t
  misc_feature (1254)..(1264): n is a, c, g, or t

SEQ ID NO: 383167 - DNA, 1214 bp, Homo Sapiens; identical to SEQ ID NO: 350783

SEQ ID NO: 383168 - DNA, 972 bp, Homo Sapiens; identical to SEQ ID NO: 350788
  misc_feature (547)..(547): n is a, c, g, or t

SEQ ID NO: 383169 - DNA, 1036 bp, Homo Sapiens; identical to SEQ ID NO: 350789

SEQ ID NO: 383170 - DNA, 598 bp, Homo Sapiens; identical to SEQ ID NO: 48189

SEQ ID NO: 383171 - DNA, 1487 bp, Homo Sapiens; identical to SEQ ID NO: 350791

SEQ ID NO: 383172 - DNA, 845 bp, Homo Sapiens; identical to SEQ ID NO: 350792

SEQ ID NO: 383173 - DNA, 1559 bp, Homo Sapiens; identical to SEQ ID NO: 350794
  misc_feature (60)..(60): n is a, c, g, or t
  misc_feature (89)..(89): n is a, c, g, or t
  misc_feature (108)..(108): n is a, c, g, or t
  misc_feature (135)..(135): n is a, c, g, or t
  misc_feature (138)..(138): n is a, c, g, or t
  misc_feature (147)..(147): n is a, c, g, or t

SEQ ID NO: 383174 - DNA, 923 bp, Homo Sapiens; identical to SEQ ID NO: 350795

SEQ ID NO: 383175 - DNA, 1211 bp, Homo Sapiens; identical to SEQ ID NO: 350796
  misc_feature (673)..(682): n is a, c, g, or t
  misc_feature (706)..(716): n is a, c, g, or t
  misc_feature (826)..(835): n is a, c, g, or t
  misc_feature (889)..(968): n is a, c, g, or t

SEQ ID NO: 383176 - DNA, 977 bp, Homo Sapiens; identical to SEQ ID NO: 350797

SEQ ID NO: 383177 - DNA, 869 bp, Homo Sapiens; identical to SEQ ID NO: 350798

SEQ ID NO: 383178 - DNA, 1309 bp, Homo Sapiens; identical to SEQ ID NO: 350799

SEQ ID NO: 383179 - DNA, 1045 bp, Homo Sapiens; identical to SEQ ID NO: 350800

SEQ ID NO: 383180 - DNA, 1691 bp, Homo Sapiens; identical to SEQ ID NO: 350807
  misc_feature (1511)..(1511): n is a, c, g, or t
  misc_feature (1572)..(1572): n is a, c, g, or t

SEQ ID NO: 383181 - DNA, 1056 bp, Homo Sapiens; identical to SEQ ID NO: 350808
  misc_feature (751)..(751): n is a, c, g, or t
  misc_feature (928)..(928): n is a, c, g, or t
  misc_feature (931)..(977): n is a, c, g, or t

SEQ ID NO: 383182 - DNA, 1182 bp, Homo Sapiens; identical to SEQ ID NO: 350809
  misc_feature (788)..(788): n is a, c, g, or t
  misc_feature (828)..(828): n is a, c, g, or t
  misc_feature (919)..(919): n is a, c, g, or t
  misc_feature (1015)..(1015): n is a, c, g, or t

SEQ ID NO: 383183 - DNA, 1138 bp, Homo Sapiens; identical to SEQ ID NO: 350810

SEQ ID NO: 383184 - DNA, 1192 bp, Homo Sapiens; identical to SEQ ID NO: 350811
  misc_feature (50)..(81): n is a, c, g, or t
  misc_feature (1047)..(1047): n is a, c, g, or t
  misc_feature (1151)..(1151): n is a, c, g, or t
  misc_feature (1177)..(1177): n is a, c, g, or t

SEQ ID NO: 383185 - DNA, 2251 bp, Homo Sapiens; identical to SEQ ID NO: 350813

SEQ ID NO: 383186 - DNA, 2731 bp, Homo Sapiens; identical to SEQ ID NO: 350814
  misc_feature (1473)..(1473): n is a, c, g, or t
  misc_feature (1843)..(1843): n is a, c, g, or t

SEQ ID NO: 383187 - DNA, 649 bp, Homo Sapiens; identical to SEQ ID NO: 350815

SEQ ID NO: 383188 - DNA, 748 bp, Homo Sapiens; identical to SEQ ID NO: 350816

SEQ ID NO: 383189 - DNA, 678 bp, Homo Sapiens; identical to SEQ ID NO: 350823

SEQ ID NO: 383190 - DNA, 445 bp, Homo Sapiens; identical to SEQ ID NO: 350824

SEQ ID NO: 383191 - DNA, 754 bp, Homo Sapiens; identical to SEQ ID NO: 350828

SEQ ID NO: 383192 - DNA, 475 bp, Homo Sapiens; identical to SEQ ID NO: 350829
  misc_feature (437)..(437): n is a, c, g, or t
  misc_feature (443)..(443): n is a, c, g, or t

SEQ ID NO: 383193 - DNA, 1485 bp, Homo Sapiens; identical to SEQ ID NO: 350830
  misc_feature (1288)..(1348): n is a, c, g, or t
  misc_feature (1367)..(1413): n is a, c, g, or t

SEQ ID NO: 383194 - DNA, 2328 bp, Homo Sapiens; identical to SEQ ID NO: 350832
  misc_feature (8)..(8): n is a, c, g, or t
  misc_feature (19)..(19): n is a, c, g, or t
  misc_feature (28)..(28): n is a, c, g, or t
  misc_feature (31)..(31): n is a, c, g, or t
  misc_feature (39)..(39): n is a, c, g, or t
  misc_feature (41)..(42): n is a, c, g, or t
  misc_feature (49)..(58): n is a, c, g, or t
  misc_feature (64)..(64): n is a, c, g, or t
  misc_feature (70)..(71): n is a, c, g, or t
  misc_feature (73)..(74): n is a, c, g, or t
  misc_feature (76)..(76): n is a, c, g, or t
  misc_feature (81)..(81): n is a, c, g, or t
  misc_feature (86)..(86): n is a, c, g, or t
  misc_feature (124)..(124): n is a, c, g, or t
  misc_feature (126)..(126): n is a, c, g, or t
  misc_feature (132)..(133): n is a, c, g, or t
  misc_feature (146)..(146): n is a, c, g, or t
  misc_feature (152)..(171): n is a, c, g, or t
  misc_feature (209)..(254): n is a, c, g, or t
  misc_feature (283)..(283): n is a, c, g, or t
  misc_feature (321)..(352): n is a, c, g, or t
  misc_feature (2301)..(2301): n is a, c, g, or t

SEQ ID NO: 383195 - DNA, 1028 bp, Homo Sapiens; identical to SEQ ID NO: 350833
  misc_feature (772)..(772): n is a, c, g, or t
  misc_feature (798)..(798): n is a, c, g, or t
  misc_feature (809)..(809): n is a, c, g, or t
  misc_feature (849)..(849): n is a, c, g, or t
  misc_feature (876)..(876): n is a, c, g, or t
  misc_feature (908)..(908): n is a, c, g, or t
  misc_feature (912)..(912): n is a, c, g, or t
  misc_feature (922)..(922): n is a, c, g, or t
  misc_feature (931)..(931): n is a, c, g, or t
  misc_feature (958)..(958): n is a, c, g, or t
  misc_feature (965)..(966): n is a, c, g, or t
  misc_feature (988)..(988): n is a, c, g, or t
  misc_feature (1009)..(1009): n is a, c, g, or t
  misc_feature (1012)..(1012): n is a, c, g, or t

SEQ ID NO: 383196 - DNA, 965 bp, Homo Sapiens; identical to SEQ ID NO: 350834
  misc_feature (924)..(924): n is a, c, g, or t
  misc_feature (926)..(926): n is a, c, g, or t
  misc_feature (945)..(945): n is a, c, g, or t

SEQ ID NO: 383197 - DNA, 1616 bp, Homo Sapiens; identical to SEQ ID NO: 350835

SEQ ID NO: 383198 - DNA, 1883 bp, Homo Sapiens; identical to SEQ ID NO: 350836
  misc_feature (1686)..(1712): n is a, c, g, or t

SEQ ID NO: 383199 - DNA, 1448 bp, Homo Sapiens; identical to SEQ ID NO: 350841
  misc_feature (1297)..(1352): n is a, c, g, or t

SEQ ID NO: 383200 - DNA, 769 bp, Homo Sapiens; identical to SEQ ID NO: 350842
  misc_feature (617)..(672): n is a, c, g, or t

SEQ ID NO: 383201 - DNA, 1600 bp, Homo Sapiens; identical to SEQ ID NO: 350843
  misc_feature (1306)..(1365): n is a, c, g, or t

SEQ ID NO: 383202 - DNA, 556 bp, Homo Sapiens; identical to SEQ ID NO: 350844

SEQ ID NO: 383203 - DNA, 2682 bp, Homo Sapiens; identical to SEQ ID NO: 350847
  misc_feature (2583)..(2583): n is a, c, g, or t

SEQ ID NO: 383204 - DNA, 535 bp, Homo Sapiens; identical to SEQ ID NO: 350848
  misc_feature (122)..(122): n is a, c, g, or t
  misc_feature (258)..(383): n is a, c, g, or t
  misc_feature (417)..(439): n is a, c, g, or t

SEQ ID NO: 383205 - DNA, 3094 bp, Homo Sapiens; identical to SEQ ID NO: 350850
  misc_feature (1160)..(1185): n is a, c, g, or t
  misc_feature (2423)..(2533): n is a, c, g, or t
  misc_feature (2544)..(2559): n is a, c, g, or t
  misc_feature (2588)..(2630): n is a, c, g, or t
  misc_feature (2709)..(2719): n is a, c, g, or t
  misc_feature (2730)..(2793): n is a, c, g, or t
  misc_feature (2853)..(2862): n is a, c, g, or t
  misc_feature (2894)..(2912): n is a, c, g, or t
  misc_feature (2922)..(2931): n is a, c, g, or t
  misc_feature (2954)..(2968): n is a, c, g, or t
  misc_feature (2997)..(2997): n is a, c, g, or t

SEQ ID NO: 383206 - DNA, 462 bp, Homo Sapiens; identical to SEQ ID NO: 350851
  misc_feature (229)..(254): n is a, c, g, or t
  misc_feature (378)..(378): n is a, c, g, or t

SEQ ID NO: 383207 - DNA, 884 bp, Homo Sapiens; identical to SEQ ID NO: 350853

SEQ ID NO: 383208 - DNA, 928 bp, Homo Sapiens; identical to SEQ ID NO: 350854
  misc_feature (849)..(885): n is a, c, g, or t

SEQ ID NO: 383209 - DNA, 854 bp, Homo Sapiens; identical to SEQ ID NO: 350856

SEQ ID NO: 383210 - DNA, 1019 bp, Homo Sapiens; identical to SEQ ID NO: 350857
  misc_feature (1002)..(1002): n is a, c, g, or t

SEQ ID NO: 383211 - DNA, 1251 bp, Homo Sapiens; identical to SEQ ID NO: 350858

SEQ ID NO: 383212 - DNA, 1686 bp, Homo Sapiens; identical to SEQ ID NO: 350860
  misc_feature (1427)..(1475): n is a, c, g, or t
  misc_feature (1490)..(1493): n is a, c, g, or t
  misc_feature (1557)..(1573): n is a, c, g, or t

SEQ ID NO: 383213 - DNA, 891 bp, Homo Sapiens; identical to SEQ ID NO: 350861

SEQ ID NO: 383214 - DNA, 1267 bp, Homo Sapiens; identical to SEQ ID NO: 350862

SEQ ID NO: 383215 - DNA, 1259 bp, Homo Sapiens; identical to SEQ ID NO: 350863

SEQ ID NO: 383216 - DNA, 1318 bp, Homo Sapiens; identical to SEQ ID NO: 350864
  misc_feature (606)..(626): n is a, c, g, or t
  misc_feature (662)..(696): n is a, c, g, or t
  misc_feature (1125)..(1125): n is a, c, g, or t

SEQ ID NO: 383217 - DNA, 831 bp, Homo Sapiens; identical to SEQ ID NO: 350865

SEQ ID NO: 383218 - DNA, 966 bp, Homo Sapiens; identical to SEQ ID NO: 350866
  misc_feature (767)..(801): n is a, c, g, or t

SEQ ID NO: 383219 - DNA, 1414 bp, Homo Sapiens; identical to SEQ ID NO: 350867

SEQ ID NO: 383220 - DNA, 1352 bp, Homo Sapiens; identical to SEQ ID NO: 350868
  misc_feature (93)..(128): n is a, c, g, or t

SEQ ID NO: 383221 - DNA, 1230 bp, Homo Sapiens; identical to SEQ ID NO: 350869

SEQ ID NO: 383222 - DNA, 1195 bp, Homo Sapiens; identical to SEQ ID NO: 350871
  misc_feature (838)..(838): n is a, c, g, or t
  misc_feature (951)..(951): n is a, c, g, or t
  misc_feature (1117)..(1117): n is a, c, g, or t

SEQ ID NO: 383223 - DNA, 1029 bp, Homo Sapiens; identical to SEQ ID NO: 350872
  misc_feature (782)..(782): n is a, c, g, or t

SEQ ID NO: 383224 - DNA, 804 bp, Homo Sapiens; identical to SEQ ID NO: 350875

SEQ ID NO: 383225 - DNA, 1717 bp, Homo Sapiens; identical to SEQ ID NO: 350876

SEQ ID NO: 383226 - DNA, 800 bp, Homo Sapiens; identical to SEQ ID NO: 350877

SEQ ID NO: 383227 - DNA, 1083 bp, Homo Sapiens; identical to SEQ ID NO: 350880

SEQ ID NO: 383228 - DNA, 443 bp, Homo Sapiens; identical to SEQ ID NO: 350881
  misc_feature (30)..(30): n is a, c, g, or t

SEQ ID NO: 383229 - DNA, 1359 bp, Homo Sapiens; identical to SEQ ID NO: 350882
  misc_feature (30)..(30): n is a, c, g, or t
  misc_feature (1103)..(1146): n is a, c, g, or t

SEQ ID NO: 383230 - DNA, 766 bp, Homo Sapiens; identical to SEQ ID NO: 350883
  misc_feature (281)..(299): n is a, c, g, or t
  misc_feature (306)..(559): n is a, c, g, or t

SEQ ID NO: 383231 - DNA, 2392 bp, Homo Sapiens; identical to SEQ ID NO: 350885
  misc_feature (2318)..(2336): n is a, c, g, or t

SEQ ID NO: 383232 - DNA, 474 bp, Homo Sapiens; identical to SEQ ID NO: 350886
  misc_feature (182)..(199): n is a, c, g, or t

SEQ ID NO: 383233 - DNA, 1231 bp, Homo Sapiens; identical to SEQ ID NO: 350888
  misc_feature (84)..(124): n is a, c, g, or t

SEQ ID NO: 383234 - DNA, 997 bp, Homo Sapiens; identical to SEQ ID NO: 350889

SEQ ID NO: 383235 - DNA, 1415 bp, Homo Sapiens; identical to SEQ ID NO: 350890
  misc_feature (164)..(176): n is a, c, g, or t
  misc_feature (280)..(296): n is a, c, g, or t

SEQ ID NO: 383236 - DNA, 812 bp, Homo Sapiens; identical to SEQ ID NO: 350891
  misc_feature (533)..(533): n is a, c, g, or t
  misc_feature (714)..(714): n is a, c, g, or t

SEQ ID NO: 383237 - DNA, 1169 bp, Homo Sapiens; identical to SEQ ID NO: 350892
  misc_feature (27)..(27): n is a, c, g, or t
  misc_feature (51)..(51): n is a, c, g, or t
  misc_feature (99)..(111): n is a, c, g, or t
  misc_feature (117)..(117): n is a, c, g, or t
  misc_feature (606)..(606): n is a, c, g, or t
  misc_feature (1048)..(1084): n is a, c, g, or t

SEQ ID NO: 383238 - DNA, 945 bp, Homo Sapiens; identical to SEQ ID NO: 350895
  misc_feature (165)..(174): n is a, c, g, or t

SEQ ID NO: 383239 - DNA, 893 bp, Homo Sapiens; identical to SEQ ID NO: 350896

SEQ ID NO: 383240 - DNA, 192 bp, Homo Sapiens; identical to SEQ ID NO: 350897

SEQ ID NO: 383241 - DNA, 1884 bp, Homo Sapiens; identical to SEQ ID NO: 350898

SEQ ID NO: 383242 - DNA, 1094 bp, Homo Sapiens; identical to SEQ ID NO: 350899
  misc_feature (998)..(1048): n is a, c, g, or t

SEQ ID NO: 383243 - DNA, 902 bp, Homo Sapiens; identical to SEQ ID NO: 350901
  misc_feature (711)..(711): n is a, c, g, or t

SEQ ID NO: 383244 - DNA, 1552 bp, Homo Sapiens; identical to SEQ ID NO: 350902

SEQ ID NO: 383245 - DNA, 348 bp, Homo Sapiens; identical to SEQ ID NO: 350903
  misc_feature (167)..(167): n is a, c, g, or t
  misc_feature (253)..(253): n is a, c, g, or t

SEQ ID NO: 383246 - DNA, 1159 bp, Homo Sapiens; identical to SEQ ID NO: 350909

SEQ ID NO: 383247 - DNA, 1518 bp, Homo Sapiens; identical to SEQ ID NO: 350910
  misc_feature (331)..(331): n is a, c, g, or t
  misc_feature (1107)..(1107): n is a, c, g, or t
  misc_feature (1122)..(1122): n is a, c, g, or t

SEQ ID NO: 383248 - DNA, 538 bp, Homo Sapiens; identical to SEQ ID NO: 350914
  misc_feature (93)..(128): n is a, c, g, or t
  misc_feature (369)..(369): n is a, c, g, or t

SEQ ID NO: 383249 - DNA, 475 bp, Homo Sapiens; identical to SEQ ID NO: 350915
  misc_feature (19)..(19): n is a, c, g, or t
  misc_feature (25)..(25): n is a, c, g, or t

SEQ ID NO: 383250 - DNA, 1411 bp, Homo Sapiens; identical to SEQ ID NO: 350919
  misc_feature (389)..(457): n is a, c, g, or t
  misc_feature (1266)..(1266): n is a, c, g, or t
  misc_feature (1393)..(1393): n is a, c, g, or t

SEQ ID NO: 383251 - DNA, 1408 bp, Homo Sapiens; identical to SEQ ID NO: 350920
  misc_feature (23)..(23): n is a, c, g, or t
  misc_feature (951)..(1019): n is a, c, g, or t
  misc_feature (1294)..(1303): n is a, c, g, or t

SEQ ID NO: 383252 - DNA, 845 bp, Homo Sapiens; identical to SEQ ID NO: 350921
  misc_feature (145)..(238): n is a, c, g, or t
  misc_feature (747)..(747): n is a, c, g, or t

SEQ ID NO: 383253 - DNA, 1080 bp, Homo Sapiens; identical to SEQ ID NO: 350922
  misc_feature (1058)..(1058): n is a, c, g, or t

SEQ ID NO: 383254 - DNA, 1801 bp, Homo Sapiens; identical to SEQ ID NO: 350923
  misc_feature (1665)..(1665): n is a, c, g, or t

SEQ ID NO: 383255 - DNA, 443 bp, Homo Sapiens; identical to SEQ ID NO: 350924

SEQ ID NO: 383256 - DNA, 1263 bp, Homo Sapiens; identical to SEQ ID NO: 350926
  misc_feature (1171)..(1171): n is a, c, g, or t
  misc_feature (1245)..(1245): n is a, c, g, or t

SEQ ID NO: 383257 - DNA, 1067 bp, Homo Sapiens; identical to SEQ ID NO: 350927

SEQ ID NO: 383258 - DNA, 1774 bp, Homo Sapiens; identical to SEQ ID NO: 350929

SEQ ID NO: 383259 - DNA, 986 bp, Homo Sapiens; identical to SEQ ID NO: 350930
  misc_feature (41)..(77): n is a, c, g, or t

SEQ ID NO: 383260 - DNA, 811 bp, Homo Sapiens; identical to SEQ ID NO: 350931

SEQ ID NO: 383261 - DNA, 817 bp, Homo Sapiens; identical to SEQ ID NO: 350933

SEQ ID NO: 383262 - DNA, 731 bp, Homo Sapiens; identical to SEQ ID NO: 350934

SEQ ID NO: 383263 - DNA, 763 bp, Homo Sapiens; identical to SEQ ID NO: 350935

SEQ ID NO: 383264 - DNA, 1915 bp, Homo Sapiens; identical to SEQ ID NO: 350936

SEQ ID NO: 383265 - DNA, 1149 bp, Homo Sapiens; identical to SEQ ID NO: 350937
  misc_feature (798)..(810): n is a, c, g, or t
  misc_feature (892)..(892): n is a, c, g, or t

SEQ ID NO: 383266 - DNA, 592 bp, Homo Sapiens; identical to SEQ ID NO: 350938
  misc_feature (536)..(536): n is a, c, g, or t
  misc_feature (547)..(547): n is a, c, g, or t
  misc_feature (556)..(556): n is a, c, g, or t

SEQ ID NO: 383267 - DNA, 919 bp, Homo Sapiens; identical to SEQ ID NO: 350941
  misc_feature (627)..(641): n is a, c, g, or t

SEQ ID NO: 383268 - DNA, 1536 bp, Homo Sapiens; identical to SEQ ID NO: 350942
  misc_feature (143)..(194): n is a, c, g, or t
  misc_feature (1228)..(1235): n is a, c, g, or t

SEQ ID NO: 383269 - DNA, 785 bp, Homo Sapiens; identical to SEQ ID NO: 350943
  misc_feature (39)..(39): n is a, c, g, or t
  misc_feature (74)..(74): n is a, c, g, or t
  misc_feature (107)..(159): n is a, c, g, or t

SEQ ID NO: 383270 - DNA, 823 bp, Homo Sapiens; identical to SEQ ID NO: 350944
  misc_feature (629)..(681): n is a, c, g, or t

SEQ ID NO: 383271 - DNA, 475 bp, Homo Sapiens; identical to SEQ ID NO: 350945
  misc_feature (93)..(93): n is a, c, g, or t
  misc_feature (150)..(175): n is a, c, g, or t

SEQ ID NO: 383272 - DNA, 3611 bp, Homo Sapiens; identical to SEQ ID NO: 350947
  misc_feature (3414)..(3431): n is a, c, g, or t

SEQ ID NO: 383273 - DNA, 749 bp, Homo Sapiens; identical to SEQ ID NO: 350948

SEQ ID NO: 383274 - DNA, 2003 bp, Homo Sapiens; identical to SEQ ID NO: 350949
  misc_feature (1545)..(1554): n is a, c, g, or t
  misc_feature (1569)..(1590): n is a, c, g, or t
  misc_feature (1661)..(1669): n is a, c, g, or t
  misc_feature (1850)..(1899): n is a, c, g, or t

SEQ ID NO: 383275 - DNA, 834 bp, Homo Sapiens; identical to SEQ ID NO: 350950

SEQ ID NO: 383276 - DNA, 1000 bp, Homo Sapiens; identical to SEQ ID NO: 350951
  misc_feature (457)..(457): n is a, c, g, or t
  misc_feature (934)..(955): n is a, c, g, or t

SEQ ID NO: 383277 - DNA, 410 bp, Homo Sapiens; identical to SEQ ID NO: 350959
  misc_feature (52)..(73): n is a, c, g, or t

SEQ ID NO: 383278 - DNA, 992 bp, Homo Sapiens; identical to SEQ ID NO: 350960

SEQ ID NO: 383279 - DNA, 1322 bp, Homo Sapiens; identical to SEQ ID NO: 350962
  misc_feature (260)..(320): n is a, c, g, or t
  misc_feature (645)..(645): n is a, c, g, or t
  misc_feature (651)..(651): n is a, c, g, or t
  misc_feature (693)..(693): n is a, c, g, or t
  misc_feature (696)..(696): n is a, c, g, or t

SEQ ID NO: 383280 - DNA, 1421 bp, Homo Sapiens; identical to SEQ ID NO: 350963
  misc_feature (196)..(196): n is a, c, g, or t
  misc_feature (1056)..(1056): n is a, c, g, or t
  misc_feature (1185)..(1185): n is a, c, g, or t

SEQ ID NO: 383281 - DNA, 1301 bp, Homo Sapiens; identical to SEQ ID NO: 350964

SEQ ID NO: 383282 - DNA, 1254 bp, Homo Sapiens; identical to SEQ ID NO: 350965
  misc_feature (91)..(91): n is a, c, g, or t
  misc_feature (219)..(219): n is a, c, g, or t
  misc_feature (442)..(450): n is a, c, g, or t
  misc_feature (464)..(514): n is a, c, g, or t
  misc_feature (969)..(1030): n is a, c, g, or t

SEQ ID NO: 383283 - DNA, 1612 bp, Homo Sapiens; identical to SEQ ID NO: 350966

SEQ ID NO: 383284 - DNA, 1041 bp, Homo Sapiens; identical to SEQ ID NO: 350967
  misc_feature (637)..(637): n is a, c, g, or t
  misc_feature (694)..(694): n is a, c, g, or t

SEQ ID NO: 383285 - DNA, 910 bp, Homo Sapiens; identical to SEQ ID NO: 350972

SEQ ID NO: 383286 - DNA, 855 bp, Homo Sapiens; identical to SEQ ID NO: 350973
  misc_feature (768)..(768): n is a, c, g, or t
  misc_feature (828)..(828): n is a, c, g, or t
  misc_feature (843)..(843): n is a, c, g, or t

SEQ ID NO: 383287 - DNA, 321 bp, Homo Sapiens; identical to SEQ ID NO: 350974

SEQ ID NO: 383288 - DNA, 948 bp, Homo Sapiens; identical to SEQ ID NO: 350975
  misc_feature (37)..(37): n is a, c, g, or t
  misc_feature (40)..(40): n is a, c, g, or t
  misc_feature (89)..(89): n is a, c, g, or t
  misc_feature (172)..(172): n is a, c, g, or t
  misc_feature (530)..(650): n is a, c, g, or t
  misc_feature (661)..(672): n is a, c, g, or t
  misc_feature (730)..(852): n is a, c, g, or t
  misc_feature (892)..(906): n is a, c, g, or t

SEQ ID NO: 383289 - DNA, 1199 bp, Homo Sapiens; identical to SEQ ID NO: 350976

SEQ ID NO: 383290 - DNA, 2039 bp, Homo Sapiens; identical to SEQ ID NO: 350977
  misc_feature (71)..(71): n is a, c, g, or t
  misc_feature (73)..(73): n is a, c, g, or t
  misc_feature (75)..(75): n is a, c, g, or t

SEQ ID NO: 383291 - DNA, 774 bp, Homo Sapiens; identical to SEQ ID NO: 350978

SEQ ID NO: 383292 - DNA, 1193 bp, Homo Sapiens; identical to SEQ ID NO: 350979

SEQ ID NO: 383293 - DNA, 819 bp, Homo Sapiens; identical to SEQ ID NO: 350980

SEQ ID NO: 383294 - DNA, 1096 bp, Homo Sapiens; identical to SEQ ID NO: 350981

SEQ ID NO: 383295 - DNA, 1149 bp, Homo Sapiens; identical to SEQ ID NO: 350982
  misc_feature (916)..(916): n is a, c, g, or t
  misc_feature (946)..(946): n is a, c, g, or t
  misc_feature (951)..(951): n is a, c, g, or t
  misc_feature (957)..(957): n is a, c, g, or t

SEQ ID NO: 383296 - DNA, 1112 bp, Homo Sapiens; identical to SEQ ID NO: 350983

SEQ ID NO: 383297 - DNA, 1055 bp, Homo Sapiens; identical to SEQ ID NO: 350986
  misc_feature (83)..(97): n is a, c, g, or t
  misc_feature (713)..(735): n is a, c, g, or t
  misc_feature (984)..(995): n is a, c, g, or t

SEQ ID NO: 383298 - DNA, 1030 bp, Homo Sapiens; identical to SEQ ID NO: 350987
  misc_feature (37)..(37): n is a, c, g, or t
  misc_feature (45)..(45): n is a, c, g, or t
  misc_feature (54)..(54): n is a, c, g, or t
  misc_feature (65)..(65): n is a, c, g, or t
  misc_feature (140)..(140): n is a, c, g, or t
  misc_feature (143)..(157): n is a, c, g, or t
  misc_feature (777)..(824): n is a, c, g, or t

SEQ ID NO: 383299 - DNA, 461 bp, Homo Sapiens; identical to SEQ ID NO: 350988

SEQ ID NO: 383300 - DNA, 1245 bp, Homo Sapiens; identical to SEQ ID NO: 350991

SEQ ID NO: 383301 - DNA, 1432 bp, Homo Sapiens; identical to SEQ ID NO: 350992
  misc_feature (1400)..(1400): n is a, c, g, or t

SEQ ID NO: 383302 - DNA, 335 bp, Homo Sapiens; identical to SEQ ID NO: 350994

SEQ ID NO: 383303 - DNA, 389 bp, Homo Sapiens; identical to SEQ ID NO: 350995

SEQ ID NO: 383304 - DNA, 1019 bp, Homo Sapiens; identical to SEQ ID NO: 350997
  misc_feature (943)..(943): n is a, c, g, or t
  misc_feature (978)..(978): n is a, c, g, or t
  misc_feature (991)..(991): n is a, c, g, or t

SEQ ID NO: 383305 - DNA, 1225 bp, Homo Sapiens; identical to SEQ ID NO: 350998

SEQ ID NO: 383306 - DNA, 2127 bp, Homo Sapiens; identical to SEQ ID NO: 350999
  misc_feature (1473)..(1477): n is a, c, g, or t

SEQ ID NO: 383307 - DNA, 338 bp, Homo Sapiens; identical to SEQ ID NO: 351000

SEQ ID NO: 383308 - DNA, 515 bp, Homo Sapiens; identical to SEQ ID NO: 351006
  misc_feature (359)..(418): n is a, c, g, or t

SEQ ID NO: 383309 - DNA, 2078 bp, Homo Sapiens; identical to SEQ ID NO: 351007

SEQ ID NO: 383310 - DNA, 496 bp, Homo Sapiens; identical to SEQ ID NO: 351008
  misc_feature (61)..(121): n is a, c, g, or t
  misc_feature (137)..(331): n is a, c, g, or t

SEQ ID NO: 383311 - DNA, 1942 bp, Homo Sapiens; identical to SEQ ID NO: 351009

SEQ ID NO: 383312 - DNA, 452 bp, Homo Sapiens; identical to SEQ ID NO: 351010
  misc_feature (425)..(425): n is a, c, g, or t
  misc_feature (431)..(431): n is a, c, g, or t

SEQ ID NO: 383313 - DNA, 501 bp, Homo Sapiens; identical to SEQ ID NO: 351011

SEQ ID NO: 383314 - DNA, 1472 bp, Homo Sapiens; identical to SEQ ID NO: 351012
  misc_feature (101)..(128): n is a, c, g, or t
  misc_feature (598)..(640): n is a, c, g, or t

SEQ ID NO: 383315 - DNA, 1007 bp, Homo Sapiens; identical to SEQ ID NO: 351015
  misc_feature (868)..(868): n is a, c, g, or t
  misc_feature (906)..(906): n is a, c, g, or t
  misc_feature (932)..(932): n is a, c, g, or t
  misc_feature (956)..(956): n is a, c, g, or t
  misc_feature (966)..(966): n is a, c, g, or t

SEQ ID NO: 383316 - DNA, 861 bp, Homo Sapiens; identical to SEQ ID NO: 351016

SEQ ID NO: 383317 - DNA, 1149 bp, Homo Sapiens; identical to SEQ ID NO: 351017
  misc_feature (9)..(9): n is a, c, g, or t
  misc_feature (14)..(14): n is a, c, g, or t
  misc_feature (17)..(17): n is a, c, g, or t
  misc_feature (23)..(23): n is a, c, g, or t
  misc_feature (28)..(28): n is a, c, g, or t
  misc_feature (34)..(34): n is a, c, g, or t
  misc_feature (37)..(37): n is a, c, g, or t
  misc_feature (43)..(43): n is a, c, g, or t
  misc_feature (45)..(45): n is a, c, g, or t
  misc_feature (51)..(53): n is a, c, g, or t
  misc_feature (63)..(64): n is a, c, g, or t
  misc_feature (70)..(70): n is a, c, g, or t
  misc_feature (76)..(76): n is a, c, g, or t
  misc_feature (87)..(88): n is a, c, g, or t
  misc_feature (94)..(95): n is a, c, g, or t
  misc_feature (97)..(97): n is a, c, g, or t
  misc_feature (103)..(103): n is a, c, g, or t
  misc_feature (107)..(108): n is a, c, g, or t
  misc_feature (113)..(113): n is a, c, g, or t
  misc_feature (116)..(116): n is a, c, g, or t
  misc_feature (119)..(119): n is a, c, g, or t
  misc_feature (126)..(126): n is a, c, g, or t
  misc_feature (129)..(129): n is a, c, g, or t
  misc_feature (133)..(134): n is a, c, g, or t
  misc_feature (138)..(138): n is a, c, g, or t
  misc_feature (144)..(144): n is a, c, g, or t
  misc_feature (147)..(147): n is a, c, g, or t
  misc_feature (150)..(150): n is a, c, g, or t
  misc_feature (153)..(153): n is a, c, g, or t
  misc_feature (160)..(160): n is a, c, g, or t
  misc_feature (171)..(171): n is a, c, g, or t
  misc_feature (188)..(188): n is a, c, g, or t
  misc_feature (203)..(203): n is a, c, g, or t

SEQ ID NO: 383318 - DNA, 2444 bp, Homo Sapiens; identical to SEQ ID NO: 351018
  misc_feature (2272)..(2272): n is a, c, g, or t
  misc_feature (2334)..(2334): n is a, c, g, or t
  misc_feature (2399)..(2399): n is a, c, g, or t
  misc_feature (2404)..(2404): n is a, c, g, or t
  misc_feature (2441)..(2441): n is a, c, g, or t

SEQ ID NO: 383319 - DNA, 1237 bp, Homo Sapiens; identical to SEQ ID NO: 351019

SEQ ID NO: 383320 - DNA, 1198 bp, Homo Sapiens; identical to SEQ ID NO: 351020
  misc_feature (65)..(65): n is a, c, g, or t

SEQ ID NO: 383321 - DNA, 525 bp, Homo Sapiens; identical to SEQ ID NO: 351021

SEQ ID NO: 383322 - DNA, 2130 bp, Homo Sapiens; identical to SEQ ID NO: 351023

SEQ ID NO: 383323 - DNA, 1790 bp, Homo Sapiens; identical to SEQ ID NO: 351024
  misc_feature (78)..(108): n is a, c, g, or t

SEQ ID NO: 383324 - DNA, 1267 bp, Homo Sapiens; identical to SEQ ID NO: 351025

SEQ ID NO: 383325 - DNA, 960 bp, Homo Sapiens; identical to SEQ ID NO: 351026
  misc_feature (859)..(889): n is a, c, g, or t

SEQ ID NO: 383326 - DNA, 948 bp, Homo Sapiens; identical to SEQ ID NO: 351027
  misc_feature (185)..(215): n is a, c, g, or t
  misc_feature (857)..(857): n is a, c, g, or t

SEQ ID NO: 383327 - DNA, 1019 bp, Homo Sapiens; identical to SEQ ID NO: 351028

SEQ ID NO: 383328 - DNA, 1016 bp, Homo Sapiens; identical to SEQ ID NO: 351029
  misc_feature (42)..(42): n is a, c, g, or t
  misc_feature (118)..(118): n is a, c, g, or t
  misc_feature (794)..(824): n is a, c, g, or t

SEQ ID NO: 383329 - DNA, 1149 bp, Homo Sapiens; identical to SEQ ID NO: 351030
  misc_feature (770)..(770): n is a, c, g, or t
  misc_feature (855)..(855): n is a, c, g, or t

SEQ ID NO: 383330 - DNA, 1118 bp, Homo Sapiens; identical to SEQ ID NO: 351033
  misc_feature (58)..(70): n is a, c, g, or t
  misc_feature (668)..(668): n is a, c, g, or t
  misc_feature (1068)..(1068): n is a, c, g, or t

SEQ ID NO: 383331 - DNA, 1187 bp, Homo Sapiens; identical to SEQ ID NO: 351034
  misc_feature (123)..(163): n is a, c, g, or t
  misc_feature (350)..(350): n is a, c, g, or t

SEQ ID NO: 383332 - DNA, 2313 bp, Homo Sapiens; identical to SEQ ID NO: 351035
  misc_feature (45)..(53): n is a, c, g, or t

SEQ ID NO: 383333 - DNA, 427 bp, Homo Sapiens; identical to SEQ ID NO: 351036
  misc_feature (85)..(85): n is a, c, g, or t

SEQ ID NO: 383334 - DNA, 1188 bp, Homo Sapiens; identical to SEQ ID NO: 351039

SEQ ID NO: 383335 - DNA, 1162 bp, Homo Sapiens; identical to SEQ ID NO: 351040
  misc_feature (877)..(877): n is a, c, g, or t

SEQ ID NO: 383336 - DNA, 734 bp, Homo Sapiens; identical to SEQ ID NO: 351042
  misc_feature (183)..(228): n is a, c, g, or t

SEQ ID NO: 383337 - DNA, 1539 bp, Homo Sapiens; identical to SEQ ID NO: 351043
  misc_feature (211)..(211): n is a, c, g, or t
  misc_feature (291)..(291): n is a, c, g, or t
  misc_feature (367)..(367): n is a, c, g, or t
  misc_feature (395)..(395): n is a, c, g, or t
  misc_feature (443)..(443): n is a, c, g, or t
  misc_feature (449)..(494): n is a, c, g, or t
  misc_feature (517)..(517): n is a, c, g, or t
  misc_feature (540)..(540): n is a, c, g, or t
  misc_feature (568)..(568): n is a, c, g, or t
  misc_feature (610)..(610): n is a, c, g, or t
  misc_feature (612)..(612): n is a, c, g, or t
  misc_feature (674)..(675): n is a, c, g, or t
  misc_feature (677)..(701): n is a, c, g, or t
  misc_feature (722)..(722): n is a, c, g, or t
  misc_feature (740)..(740): n is a, c, g, or t
  misc_feature (1003)..(1029): n is a, c, g, or t

SEQ ID NO: 383338 - DNA, 1099 bp, Homo Sapiens; identical to SEQ ID NO: 351044
  misc_feature (1032)..(1040): n is a, c, g, or t
  misc_feature (1064)..(1064): n is a, c, g, or t

SEQ ID NO: 383339 - DNA, 801 bp, Homo Sapiens; identical to SEQ ID NO: 351045

SEQ ID NO: 383340 - DNA, 291 bp, Homo Sapiens; identical to SEQ ID NO: 351046
  misc_feature (69)..(69): n is a, c, g, or t
  misc_feature (95)..(140): n is a, c, g, or t

SEQ ID NO: 383341 - DNA, 858 bp, Homo Sapiens; identical to SEQ ID NO: 351051

SEQ ID NO: 383342 - DNA, 918 bp, Homo Sapiens; identical to SEQ ID NO: 351052

SEQ ID NO: 383343 - DNA, 879 bp, Homo Sapiens; identical to SEQ ID NO: 351053
  misc_feature (497)..(580): n is a, c, g, or t

SEQ ID NO: 383344 - DNA, 1047 bp, Homo Sapiens; identical to SEQ ID NO: 351054

SEQ ID NO: 383345 - DNA, 695 bp, Homo Sapiens; identical to SEQ ID NO: 351057
  misc_feature (616)..(616): n is a, c, g, or t

SEQ ID NO: 383346 - DNA, 1099 bp, Homo Sapiens; identical to SEQ ID NO: 351058
  misc_feature (808)..(808): n is a, c, g, or t
  misc_feature (812)..(818): n is a, c, g, or t
  misc_feature (820)..(820): n is a, c, g, or t
  misc_feature (822)..(822): n is a, c, g, or t
  misc_feature (824)..(852): n is a, c, g, or t
  misc_feature (884)..(884): n is a, c, g, or t
  misc_feature (917)..(917): n is a, c, g, or t

SEQ ID NO: 383347 - DNA, 741 bp, Homo Sapiens; identical to SEQ ID NO: 351059
  misc_feature (682)..(682): n is a, c, g, or t

SEQ ID NO: 383348 - DNA, 1429 bp, Homo Sapiens; identical to SEQ ID NO: 351060
  misc_feature (677)..(677): n is a, c, g, or t
  misc_feature (739)..(739): n is a, c, g, or t

SEQ ID NO: 383349 - DNA, 2490 bp, Homo Sapiens; identical to SEQ ID NO: 351061

SEQ ID NO: 383350 - DNA, 862 bp, Homo Sapiens; identical to SEQ ID NO: 351062

SEQ ID NO: 383351 - DNA, 753 bp, Homo Sapiens; identical to SEQ ID NO: 351063

SEQ ID NO: 383352 - DNA, 1072 bp, Homo Sapiens; identical to SEQ ID NO: 351065
  misc_feature (5)..(5): n is a, c, g, or t
  misc_feature (19)..(19): n is a, c, g, or t
  misc_feature (22)..(22): n is a, c, g, or t
  misc_feature (32)..(32): n is a, c, g, or t
  misc_feature (36)..(36): n is a, c, g, or t
  misc_feature (38)..(40): n is a, c, g, or t
  misc_feature (45)..(45): n is a, c, g, or t
  misc_feature (58)..(58): n is a, c, g, or t
  misc_feature (60)..(60): n is a, c, g, or t
  misc_feature (64)..(64): n is a, c, g, or t
  misc_feature (69)..(69): n is a, c, g, or t
  misc_feature (83)..(83): n is a, c, g, or t
  misc_feature (89)..(89): n is a, c, g, or t
  misc_feature (94)..(94): n is a, c, g, or t
  misc_feature (96)..(96): n is a, c, g, or t
  misc_feature (100)..(100): n is a, c, g, or t
  misc_feature (142)..(142): n is a, c, g, or t
  misc_feature (151)..(151): n is a, c, g, or t
  misc_feature (155)..(155): n is a, c, g, or t
  misc_feature (170)..(170): n is a, c, g, or t
  misc_feature (177)..(177): n is a, c, g, or t
  misc_feature (200)..(200): n is a, c, g, or t

SEQ ID NO: 383353 - DNA, 834 bp, Homo Sapiens; identical to SEQ ID NO: 351066

SEQ ID NO: 383354 - DNA, 994 bp, Homo Sapiens; identical to SEQ ID NO: 351067

SEQ ID NO: 383355 - DNA, 990 bp, Homo Sapiens; identical to SEQ ID NO: 351068

SEQ ID NO: 383356 - DNA, 1145 bp, Homo Sapiens; identical to SEQ ID NO: 351069
  misc_feature (713)..(721): n is a, c, g, or t

SEQ ID NO: 383357 - DNA, 1561 bp, Homo Sapiens; identical to SEQ ID NO: 351070
  misc_feature (771)..(771): n is a, c, g, or t

SEQ ID NO: 383358 - DNA, 702 bp, Homo Sapiens; identical to SEQ ID NO: 351071

SEQ ID NO: 383359 - DNA, 1077 bp, Homo Sapiens; identical to SEQ ID NO: 351077
  misc_feature (901)..(901): n is a, c, g, or t
  misc_feature (905)..(905): n is a, c, g, or t
  misc_feature (916)..(916): n is a, c, g, or t
  misc_feature (955)..(955): n is a, c, g, or t
  misc_feature (959)..(959): n is a, c, g, or t
  misc_feature (991)..(991): n is a, c, g, or t
  misc_feature (1005)..(1006): n is a, c, g, or t
  misc_feature (1011)..(1011): n is a, c, g, or t
  misc_feature (1015)..(1015): n is a, c, g, or t
  misc_feature (1020)..(1020): n is a, c, g, or t
  misc_feature (1040)..(1040): n is a, c, g, or t
  misc_feature (1045)..(1045): n is a, c, g, or t
  misc_feature (1050)..(1050): n is a, c, g, or t
  misc_feature (1058)..(1059): n is a, c, g, or t
  misc_feature (1064)..(1064): n is a, c, g, or t
  misc_feature (1066)..(1066): n is a, c, g, or t

SEQ ID NO: 383360 - DNA, 863 bp, Homo Sapiens; identical to SEQ ID NO: 351078
  misc_feature (780)..(800): n is a, c, g, or t

SEQ ID NO: 383361 - DNA, 1720 bp, Homo Sapiens; identical to SEQ ID NO: 351079
  misc_feature (1658)..(1671): n is a, c, g, or t

SEQ ID NO: 383362 - DNA, 512 bp, Homo Sapiens; identical to SEQ ID NO: 351080
  misc_feature (27)..(27): n is a, c, g, or t
  misc_feature (54)..(54): n is a, c, g, or t
  misc_feature (156)..(156): n is a, c, g, or t

SEQ ID NO: 383363 - DNA, 950 bp, Homo Sapiens; identical to SEQ ID NO: 351081
  misc_feature (69)..(69): n is a, c, g, or t
  misc_feature (100)..(100): n is a, c, g, or t

SEQ ID NO: 383364 - DNA, 2607 bp, Homo Sapiens; identical to SEQ ID NO: 351082
  misc_feature (893)..(893): n is a, c, g, or t
  misc_feature (2208)..(2208): n is a, c, g, or t
  misc_feature (2232)..(2232): n is a, c, g, or t
  misc_feature (2234)..(2235): n is a, c, g, or t
  misc_feature (2237)..(2237): n is a, c, g, or t
  misc_feature (2252)..(2252): n is a, c, g, or t
  misc_feature (2274)..(2274): n is a, c, g, or t
  misc_feature (2282)..(2282): n is a, c, g, or t
  misc_feature (2316)..(2316): n is a, c, g, or t
  misc_feature (2334)..(2334): n is a, c, g, or t
  misc_feature (2352)..(2352): n is a, c, g, or t
  misc_feature (2382)..(2382): n is a, c, g, or t
  misc_feature (2482)..(2482): n is a, c, g, or t
  misc_feature (2519)..(2519): n is a, c, g, or t
  misc_feature (2527)..(2527): n is a, c, g, or t
  misc_feature (2530)..(2530): n is a, c, g, or t
  misc_feature (2542)..(2542): n is a, c, g, or t
  misc_feature (2547)..(2547): n is a, c, g, or t
  misc_feature (2557)..(2557): n is a, c, g, or t
  misc_feature (2599)..(2599): n is a, c, g, or t
  misc_feature (2601)..(2601): n is a, c, g, or t

SEQ ID NO: 383365 - DNA, 1210 bp, Homo Sapiens; identical to SEQ ID NO: 351083
  misc_feature (54)..(90): n is a, c, g, or t

SEQ ID NO: 383366 - DNA, 832 bp, Homo Sapiens; identical to SEQ ID NO: 351084

SEQ ID NO: 383367 - DNA, 908 bp, Homo Sapiens; identical to SEQ ID NO: 351085

SEQ ID NO: 383368 - DNA, 230 bp, Homo Sapiens; identical to SEQ ID NO: 351086
  misc_feature (45)..(45): n is a, c, g, or t

SEQ ID NO: 383369 - DNA, 1213 bp, Homo Sapiens; identical to SEQ ID NO: 351089
  misc_feature (20)..(20): n is a, c, g, or t
  misc_feature (32)..(32): n is a, c, g, or t
  misc_feature (82)..(82): n is a, c, g, or t
  misc_feature (1149)..(1166): n is a, c, g, or t

SEQ ID NO: 383370 - DNA, 1546 bp, Homo Sapiens; identical to SEQ ID NO: 351090
  misc_feature (67)..(67): n is a, c, g, or t

SEQ ID NO: 383371 - DNA, 457 bp, Homo Sapiens; identical to SEQ ID NO: 351091
  misc_feature (11)..(11): n is a, c, g, or t
  misc_feature (38)..(38): n is a, c, g, or t
  misc_feature (51)..(51): n is a, c, g, or t
  misc_feature (67)..(67): n is a, c, g, or t

SEQ ID NO: 383372 - DNA, 1332 bp, Homo Sapiens; identical to SEQ ID NO: 351092
  misc_feature (277)..(520): n is a, c, g, or t
  misc_feature (522)..(558): n is a, c, g, or t
  misc_feature (560)..(589): n is a, c, g, or t
  misc_feature (591)..(612): n is a, c, g, or t
  misc_feature (614)..(618): n is a, c, g, or t
  misc_feature (621)..(628): n is a, c, g, or t
  misc_feature (631)..(631): n is a, c, g, or t
  misc_feature (636)..(636): n is a, c, g, or t
  misc_feature (640)..(928): n is a, c, g, or t
  misc_feature (935)..(1028): n is a, c, g, or t
  misc_feature (1053)..(1053): n is a, c, g, or t
  misc_feature (1074)..(1074): n is a, c, g, or t
  misc_feature (1087)..(1087): n is a, c, g, or t
  misc_feature (1149)..(1149): n is a, c, g, or t
  misc_feature (1264)..(1264): n is a, c, g, or t

SEQ ID NO: 383373 - DNA, 775 bp, Homo Sapiens; identical to SEQ ID NO: 351093

SEQ ID NO: 383374 - DNA, 919 bp, Homo Sapiens; identical to SEQ ID NO: 351094
  misc_feature (488)..(488): n is a, c, g, or t
  misc_feature (555)..(740): n is a, c, g, or t
  misc_feature (808)..(808): n is a, c, g, or t

SEQ ID NO: 383375 - DNA, 666 bp, Homo Sapiens; identical to SEQ ID NO: 351095

SEQ ID NO: 383376 - DNA, 1192 bp, Homo Sapiens; identical to SEQ ID NO: 351096
  misc_feature (771)..(784): n is a, c, g, or t
  misc_feature (791)..(791): n is a, c, g, or t
  misc_feature (805)..(805): n is a, c, g, or t
  misc_feature (883)..(892): n is a, c, g, or t
  misc_feature (982)..(982): n is a, c, g, or t
  misc_feature (1000)..(1000): n is a, c, g, or t
  misc_feature (1029)..(1047): n is a, c, g, or t
  misc_feature (1097)..(1112): n is a, c, g, or t
  misc_feature (1114)..(1114): n is a, c, g, or t

SEQ ID NO: 383377 - DNA, 989 bp, Homo Sapiens; identical to SEQ ID NO: 351097
  misc_feature (19)..(19): n is a, c, g, or t
  misc_feature (30)..(30): n is a, c, g, or t
  misc_feature (49)..(49): n is a, c, g, or t
  misc_feature (62)..(62): n is a, c, g, or t
  misc_feature (90)..(90): n is a, c, g, or t
  misc_feature (94)..(157): n is a, c, g, or t
  misc_feature (210)..(210): n is a, c, g, or t
  misc_feature (219)..(219): n is a, c, g, or t
  misc_feature (250)..(250): n is a, c, g, or t
  misc_feature (254)..(254): n is a, c, g, or t
  misc_feature (280)..(280): n is a, c, g, or t
  misc_feature (284)..(284): n is a, c, g, or t
  misc_feature (305)..(320): n is a, c, g, or t
  misc_feature (344)..(344): n is a, c, g, or t
  misc_feature (424)..(424): n is a, c, g, or t
  misc_feature (428)..(428): n is a, c, g, or t
  misc_feature (855)..(855): n is a, c, g, or t
  misc_feature (921)..(921): n is a, c, g, or t

SEQ ID NO: 383378 - DNA, 2685 bp, Homo Sapiens; identical to SEQ ID NO: 351099
  misc_feature (86)..(86): n is a, c, g, or t
  misc_feature (622)..(622): n is a, c, g, or t
  misc_feature (638)..(638): n is a, c, g, or t
  misc_feature (889)..(909): n is a, c, g, or t
  misc_feature (948)..(948): n is a, c, g, or t
  misc_feature (1033)..(1033): n is a, c, g, or t
  misc_feature (1039)..(1039): n is a, c, g, or t
  misc_feature (1042)..(1042): n is a, c, g, or t
  misc_feature (1948)..(1956): n is a, c, g, or t
  misc_feature (2097)..(2097): n is a, c, g, or t
  misc_feature (2126)..(2126): n is a, c, g, or t
  misc_feature (2138)..(2138): n is a, c, g, or t
  misc_feature (2141)..(2141): n is a, c, g, or t
  misc_feature (2159)..(2159): n is a, c, g, or t
  misc_feature (2170)..(2170): n is a, c, g, or t
  misc_feature (2174)..(2174): n is a, c, g, or t
  misc_feature (2196)..(2196): n is a, c, g, or t
  misc_feature (2211)..(2211): n is a, c, g, or t
  misc_feature (2215)..(2216): n is a, c, g, or t
  misc_feature (2218)..(2220): n is a, c, g, or t
  misc_feature (2222)..(2222): n is a, c, g, or t
  misc_feature (2224)..(2224): n is a, c, g, or t
  misc_feature (2228)..(2278): n is a, c, g, or t
  misc_feature (2282)..(2282): n is a, c, g, or t
  misc_feature (2285)..(2285): n is a, c, g, or t
  misc_feature (2287)..(2287): n is a, c, g, or t
  misc_feature (2292)..(2292): n is a, c, g, or t
  misc_feature (2294)..(2294): n is a, c, g, or t
  misc_feature (2300)..(2300): n is a, c, g, or t
  misc_feature (2305)..(2305): n is a, c, g, or t
  misc_feature (2307)..(2307): n is a, c, g, or t
  misc_feature (2309)..(2310): n is a, c, g, or t
  misc_feature (2316)..(2316): n is a, c, g, or t
  misc_feature (2319)..(2319): n is a, c, g, or t
  misc_feature (2322)..(2322): n is a, c, g, or t
  misc_feature (2329)..(2329): n is a, c, g, or t
  misc_feature (2333)..(2333): n is a, c, g, or t
  misc_feature (2336)..(2336): n is a, c, g, or t
  misc_feature (2358)..(2358): n is a, c, g, or t
  misc_feature (2361)..(2361): n is a, c, g, or t
  misc_feature (2373)..(2374): n is a, c, g, or t
  misc_feature (2386)..(2386): n is a, c, g, or t
  misc_feature (2390)..(2390): n is a, c, g, or t
  misc_feature (2393)..(2393): n is a, c, g, or t
  misc_feature (2400)..(2400): n is a, c, g, or t
  misc_feature (2402)..(2402): n is a, c, g, or t
  misc_feature (2413)..(2415): n is a, c, g, or t
  misc_feature (2417)..(2417): n is a, c, g, or t
  misc_feature (2443)..(2443): n is a, c, g, or t
  misc_feature (2482)..(2482): n is a, c, g, or t
  misc_feature (2530)..(2530): n is a, c, g, or t
  misc_feature (2554)..(2554): n is a, c, g, or t
  misc_feature (2556)..(2556): n is a, c, g, or t
  misc_feature (2561)..(2561): n is a, c, g, or t
  misc_feature (2619)..(2619): n is a, c, g, or t
  misc_feature (2627)..(2627): n is a, c, g, or t
  misc_feature (2650)..(2650): n is a, c, g, or t

SEQ ID NO: 383379 - DNA, 1336 bp, Homo Sapiens; identical to SEQ ID NO: 351100

SEQ ID NO: 383380 - DNA, 1005 bp, Homo Sapiens; identical to SEQ ID NO: 351101
  misc_feature (50)..(70): n is a, c, g, or t

SEQ ID NO: 383381 - DNA, 738 bp, Homo Sapiens; identical to SEQ ID NO: 351103

SEQ ID NO: 383382 - DNA, 1735 bp, Homo Sapiens; identical to SEQ ID NO: 351104
  misc_feature (925)..(956): n is a, c, g, or t
  misc_feature (961)..(961): n is a, c, g, or t
  misc_feature (1123)..(1123): n is a, c, g, or t
  misc_feature (1131)..(1131): n is a, c, g, or t
  misc_feature (1172)..(1175): n is a, c, g, or t
  misc_feature (1181)..(1181): n is a, c, g, or t
  misc_feature (1192)..(1192): n is a, c, g, or t
  misc_feature (1196)..(1197): n is a, c, g, or t
  misc_feature (1205)..(1205): n is a, c, g, or t
  misc_feature (1209)..(1209): n is a, c, g, or t
  misc_feature (1264)..(1264): n is a, c, g, or t
  misc_feature (1276)..(1289): n is a, c, g, or t
  misc_feature (1532)..(1532): n is a, c, g, or t

SEQ ID NO: 383383 - DNA, 3000 bp, Homo Sapiens; identical to SEQ ID NO: 351106

SEQ ID NO: 383384 - DNA, 1920 bp, Homo Sapiens; identical to SEQ ID NO: 351107

SEQ ID NO: 383385 - DNA, 759 bp, Homo Sapiens; identical to SEQ ID NO: 351108

SEQ ID NO: 383386 - DNA, 1656 bp, Homo Sapiens; identical to SEQ ID NO: 351111
  misc_feature (1382)..(1385): n is a, c, g, or t
  misc_feature (1387)..(1387): n is a, c, g, or t
  misc_feature (1403)..(1403): n is a, c, g, or t
  misc_feature (1405)..(1406): n is a, c, g, or t
  misc_feature (1419)..(1419): n is a, c, g, or t
  misc_feature (1446)..(1471): n is a, c, g, or t
  misc_feature (1476)..(1476): n is a, c, g, or t
  misc_feature (1515)..(1515): n is a, c, g, or t
  misc_feature (1526)..(1526): n is a, c, g, or t
  misc_feature (1528)..(1528): n is a, c, g, or t
  misc_feature (1530)..(1530): n is a, c, g, or t
  misc_feature (1547)..(1547): n is a, c, g, or t
  misc_feature (1549)..(1549): n is a, c, g, or t
  misc_feature (1577)..(1577): n is a, c, g, or t
  misc_feature (1600)..(1600): n is a, c, g, or t
  misc_feature (1615)..(1615): n is a, c, g, or t
  misc_feature (1619)..(1619): n is a, c, g, or t
  misc_feature (1631)..(1631): n is a, c, g, or t
  misc_feature (1652)..(1652): n is a, c, g, or t

SEQ ID NO: 383387 - DNA, 907 bp, Homo Sapiens; identical to SEQ ID NO: 351112

SEQ ID NO: 383388 - DNA, 2104 bp, Homo Sapiens; identical to SEQ ID NO: 351113

SEQ ID NO: 383389 - DNA, 443 bp, Homo Sapiens; identical to SEQ ID NO: 351114
  misc_feature (11)..(11): n is a, c, g, or t

SEQ ID NO: 383390 - DNA, 1077 bp, Homo Sapiens; identical to SEQ ID NO: 351115
  misc_feature (842)..(842): n is a, c, g, or t
  misc_feature (1002)..(1011): n is a, c, g, or t

SEQ ID NO: 383391 - DNA, 1134 bp, Homo Sapiens; identical to SEQ ID NO: 351116

SEQ ID NO: 383392 - DNA, 2291 bp, Homo Sapiens; identical to SEQ ID NO: 351117
  misc_feature (1654)..(1744): n is a, c, g, or t
  misc_feature (1748)..(1748): n is a, c, g, or t
  misc_feature (1754)..(1757): n is a, c, g, or t
  misc_feature (1765)..(1765): n is a, c, g, or t
  misc_feature (1902)..(1912): n is a, c, g, or t
  misc_feature (1947)..(1959): n is a, c, g, or t
  misc_feature (2229)..(2229): n is a, c, g, or t

SEQ ID NO: 383393 - DNA, 1409 bp, Homo Sapiens; identical to SEQ ID NO: 351119
  misc_feature (1041)..(1041): n is a, c, g, or t
  misc_feature (1236)..(1237): n is a, c, g, or t

SEQ ID NO: 383394 - DNA, 1532 bp, Homo Sapiens; identical to SEQ ID NO: 351120
  misc_feature (1369)..(1369): n is a, c, g, or t
  misc_feature (1398)..(1398): n is a, c, g, or t
  misc_feature (1460)..(1460): n is a, c, g, or t
  misc_feature (1520)..(1520): n is a, c, g, or t

SEQ ID NO: 383395 - DNA, 658 bp, Homo Sapiens; identical to SEQ ID NO: 351121
  misc_feature (36)..(36): n is a, c, g, or t

SEQ ID NO: 383396 - DNA, 1594 bp, Homo Sapiens; identical to SEQ ID NO: 351122
  misc_feature (52)..(84): n is a, c, g, or t

SEQ ID NO: 383397 - DNA, 1032 bp, Homo Sapiens; identical to SEQ ID NO: 351123
  misc_feature (440)..(498): n is a, c, g, or t
  misc_feature (634)..(634): n is a, c, g, or t

SEQ ID NO: 383398 - DNA, 733 bp, Homo Sapiens; identical to SEQ ID NO: 351124
  misc_feature (371)..(443): n is a, c, g, or t

SEQ ID NO: 383399 - DNA, 346 bp, Homo Sapiens; identical to SEQ ID NO: 351125

SEQ ID NO: 383400 - DNA, 370 bp, Homo Sapiens; identical to SEQ ID NO: 351126

SEQ ID NO: 383401 - DNA, 883 bp, Homo Sapiens; identical to SEQ ID NO: 351127
  misc_feature (425)..(772): n is a, c, g, or t

SEQ ID NO: 383402 - DNA, 1248 bp, Homo Sapiens; identical to SEQ ID NO: 351128
  misc_feature (812)..(812): n is a, c, g, or t
  misc_feature (831)..(1174): n is a, c, g, or t

SEQ ID NO: 383403 - DNA, 1017 bp, Homo Sapiens; identical to SEQ ID NO: 351129

SEQ ID NO: 383404 - DNA, 1783 bp, Homo Sapiens; identical to SEQ ID NO: 351130
  misc_feature (1611)..(1611): n is a, c, g, or t

SEQ ID NO: 383405 - DNA, 1048 bp, Homo Sapiens; identical to SEQ ID NO: 351131

SEQ ID NO: 383406 - DNA, 1271 bp, Homo Sapiens; identical to SEQ ID NO: 351134
  misc_feature (116)..(166): n is a, c, g, or t
  misc_feature (812)..(812): n is a, c, g, or t

SEQ ID NO: 383407 - DNA, 872 bp, Homo Sapiens; identical to SEQ ID NO: 351135
  misc_feature (131)..(171): n is a, c, g, or t

SEQ ID NO: 383408 - DNA, 823 bp, Homo Sapiens; identical to SEQ ID NO: 351136
  misc_feature (140)..(180): n is a, c, g, or t

SEQ ID NO: 383409 - DNA, 1126 bp, Homo Sapiens; identical to SEQ ID NO: 351137
  misc_feature (286)..(326): n is a, c, g, or t

SEQ ID NO: 383410 - DNA, 1297 bp, Homo Sapiens; identical to SEQ ID NO: 351138
  misc_feature (243)..(307): n is a, c, g, or t

SEQ ID NO: 383411 - DNA, 1075 bp, Homo Sapiens; identical to SEQ ID NO: 351143

SEQ ID NO: 383412 - DNA, 854 bp, Homo Sapiens; identical to SEQ ID NO: 351144

SEQ ID NO: 383413 - DNA, 1586 bp, Homo Sapiens; identical to SEQ ID NO: 351145
  misc_feature (853)..(853): n is a, c, g, or t
  misc_feature (1481)..(1481): n is a, c, g, or t

SEQ ID NO: 383414 - DNA, 497 bp, Homo Sapiens; identical to SEQ ID NO: 351146
  misc_feature (458)..(458): n is a, c, g, or t

SEQ ID NO: 383415 - DNA, 1628 bp, Homo Sapiens; identical to SEQ ID NO: 351150

SEQ ID NO: 383416 - DNA, 648 bp, Homo Sapiens; identical to SEQ ID NO: 351151

SEQ ID NO: 383417 - DNA, 984 bp, Homo Sapiens; identical to SEQ ID NO: 351154

SEQ ID NO: 383418 - DNA, 773 bp, Homo Sapiens; identical to SEQ ID NO: 351155
  misc_feature (29)..(29): n is a, c, g, or t

SEQ ID NO: 383419 - DNA, 449 bp, Homo Sapiens; identical to SEQ ID NO: 351156

SEQ ID NO: 383420 - DNA, 1218 bp, Homo Sapiens; identical to SEQ ID NO: 351157

SEQ ID NO: 383421 - DNA, 832 bp, Homo Sapiens; identical to SEQ ID NO: 351158

SEQ ID NO: 383422 - DNA, 1751 bp, Homo Sapiens; identical to SEQ ID NO: 351160
  misc_feature (146)..(329): n is a, c, g, or t
  misc_feature (1151)..(1151): n is a, c, g, or t
  misc_feature (1155)..(1155): n is a, c, g, or t
  misc_feature (1160)..(1160): n is a, c, g, or t
  misc_feature (1175)..(1176): n is a, c, g, or t
  misc_feature (1181)..(1181): n is a, c, g, or t
  misc_feature (1185)..(1185): n is a, c, g, or t
  misc_feature (1187)..(1206): n is a, c, g, or t
  misc_feature (1297)..(1297): n is a, c, g, or t
  misc_feature (1330)..(1330): n is a, c, g, or t
  misc_feature (1343)..(1343): n is a, c, g, or t
  misc_feature (1345)..(1347): n is a, c, g, or t
  misc_feature (1352)..(1352): n is a, c, g, or t
  misc_feature (1358)..(1358): n is a, c, g, or t
  misc_feature (1362)..(1362): n is a, c, g, or t
  misc_feature (1369)..(1371): n is a, c, g, or t
  misc_feature (1373)..(1373): n is a, c, g, or t
  misc_feature (1382)..(1384): n is a, c, g, or t
  misc_feature (1401)..(1401): n is a, c, g, or t
  misc_feature (1404)..(1404): n is a, c, g, or t
  misc_feature (1428)..(1428): n is a, c, g, or t
  misc_feature (1442)..(1442): n is a, c, g, or t
  misc_feature (1476)..(1476): n is a, c, g, or t
  misc_feature (1488)..(1488): n is a, c, g, or t
  misc_feature (1490)..(1490): n is a, c, g, or t
  misc_feature (1495)..(1521): n is a, c, g, or t
  misc_feature (1523)..(1523): n is a, c, g, or t
  misc_feature (1525)..(1525): n is a, c, g, or t
  misc_feature (1545)..(1545): n is a, c, g, or t
  misc_feature (1549)..(1549): n is a, c, g, or t
  misc_feature (1551)..(1551): n is a, c, g, or t
  misc_feature (1555)..(1556): n is a, c, g, or t
  misc_feature (1558)..(1559): n is a, c, g, or t
  misc_feature (1562)..(1562): n is a, c, g, or t
  misc_feature (1570)..(1570): n is a, c, g, or t
  misc_feature (1572)..(1572): n is a, c, g, or t
  misc_feature (1595)..(1595): n is a, c, g, or t
  misc_feature (1602)..(1602): n is a, c, g, or t
  misc_feature (1605)..(1605): n is a, c, g, or t
  misc_feature (1613)..(1613): n is a, c, g, or t
  misc_feature (1621)..(1621): n is a, c, g, or t
  misc_feature (1632)..(1632): n is a, c, g, or t
  misc_feature (1652)..(1652): n is a, c, g, or t
  misc_feature (1658)..(1658): n is a, c, g, or t
  misc_feature (1664)..(1664): n is a, c, g, or t
  misc_feature (1668)..(1668): n is a, c, g, or t
  misc_feature (1671)..(1671): n is a, c, g, or t
  misc_feature (1684)..(1684): n is a, c, g, or t
  misc_feature (1706)..(1706): n is a, c, g, or t
  misc_feature (1708)..(1708): n is a, c, g, or t
  misc_feature (1720)..(1720): n is a, c, g, or t
  misc_feature (1737)..(1737): n is a, c, g, or t
  misc_feature (1741)..(1742): n is a, c, g, or t

SEQ ID NO: 383423 - DNA, 1363 bp, Homo Sapiens; identical to SEQ ID NO: 351161

SEQ ID NO: 383424 - DNA, 1817 bp, Homo Sapiens; identical to SEQ ID NO: 351162
  misc_feature (182)..(191): n is a, c, g, or t
  misc_feature (218)..(230): n is a, c, g, or t
  misc_feature (336)..(336): n is a, c, g, or t
  misc_feature (1715)..(1724): n is a, c, g, or t

SEQ ID NO: 383425 - DNA, 834 bp, Homo Sapiens; identical to SEQ ID NO: 351163
  misc_feature (720)..(733): n is a, c, g, or t
  misc_feature (735)..(735): n is a, c, g, or t
  misc_feature (740)..(744): n is a, c, g, or t

SEQ ID NO: 383426 - DNA, 481 bp, Homo Sapiens; identical to SEQ ID NO: 351164

SEQ ID NO: 383427 - DNA, 835 bp, Homo Sapiens; identical to SEQ ID NO: 351165

SEQ ID NO: 383428 - DNA, 1103 bp, Homo Sapiens; identical to SEQ ID NO: 351166

SEQ ID NO: 383429 - DNA, 984 bp, Homo Sapiens; identical to SEQ ID NO: 351174

SEQ ID NO: 383430 - DNA, 598 bp, Homo Sapiens; identical to SEQ ID NO: 351175

SEQ ID NO: 383431 - DNA, 830 bp, Homo Sapiens; identical to SEQ ID NO: 351176

SEQ ID NO: 383432 - DNA, 1174 bp, Homo Sapiens; identical to SEQ ID NO: 351177
  misc_feature (1159)..(1159): n is a, c, g, or t

SEQ ID NO: 383433 - DNA, 929 bp, Homo Sapiens; identical to SEQ ID NO: 351178
  misc_feature (82)..(82): n is a, c, g, or t
  misc_feature (355)..(355): n is a, c, g, or t

SEQ ID NO: 383434 - DNA, 677 bp, Homo Sapiens; identical to SEQ ID NO: 351179

SEQ ID NO: 383435 - DNA, 908 bp, Homo Sapiens; identical to SEQ ID NO: 351181

SEQ ID NO: 383436 - DNA, 1733 bp, Homo Sapiens; identical to SEQ ID NO: 351182
  misc_feature (366)..(366): n is a, c, g, or t

SEQ ID NO: 383437 - DNA, 1335 bp, Homo Sapiens; identical to SEQ ID NO: 351183

SEQ ID NO: 383438 - DNA, 2395 bp, Homo Sapiens; identical to SEQ ID NO: 351184

SEQ ID NO: 383439 - DNA, 2295 bp, Homo Sapiens; identical to SEQ ID NO: 351193
  misc_feature (25)..(26): n is a, c, g, or t
  misc_feature (86)..(86): n is a, c, g, or t
  misc_feature (95)..(95): n is a, c, g, or t
  misc_feature (140)..(140): n is a, c, g, or t
  misc_feature (161)..(161): n is a, c, g, or t
  misc_feature (212)..(212): n is a, c, g, or t

SEQ ID NO: 383440 - DNA, 985 bp, Homo Sapiens; identical to SEQ ID NO: 351194
  misc_feature (27)..(27): n is a, c, g, or t
  misc_feature (33)..(33): n is a, c, g, or t
  misc_feature (43)..(43): n is a, c, g, or t
  misc_feature (45)..(45): n is a, c, g, or t
  misc_feature (61)..(61): n is a, c, g, or t
  misc_feature (79)..(79): n is a, c, g, or t
  misc_feature (87)..(87): n is a, c, g, or t
  misc_feature (91)..(91): n is a, c, g, or t
  misc_feature (97)..(97): n is a, c, g, or t
  misc_feature (114)..(114): n is a, c, g, or t
  misc_feature (133)..(133): n is a, c, g, or t
  misc_feature (139)..(140): n is a, c, g, or t
  misc_feature (142)..(142): n is a, c, g, or t
  misc_feature (151)..(151): n is a, c, g, or t
  misc_feature (175)..(175): n is a, c, g, or t
  misc_feature (180)..(180): n is a, c, g, or t
  misc_feature (193)..(193): n is a, c, g, or t
  misc_feature (200)..(200): n is a, c, g, or t
  misc_feature (203)..(203): n is a, c, g, or t
  misc_feature (211)..(211): n is a, c, g, or t
  misc_feature (217)..(217): n is a, c, g, or t
  misc_feature (221)..(221): n is a, c, g, or t

SEQ ID NO: 383441 - DNA, 1580 bp, Homo Sapiens; identical to SEQ ID NO: 351195

SEQ ID NO: 383442 - DNA, 2258 bp, Homo Sapiens; identical to SEQ ID NO: 351196

SEQ ID NO: 383443 - DNA, 1136 bp, Homo Sapiens; identical to SEQ ID NO: 351197
  misc_feature (733)..(733): n is a, c, g, or t

SEQ ID NO: 383444 - DNA, 1028 bp, Homo Sapiens; identical to SEQ ID NO: 351198
  misc_feature (942)..(978): n is a, c, g, or t

SEQ ID NO: 383445 - DNA, 1045 bp, Homo Sapiens; identical to SEQ ID NO: 351199

SEQ ID NO: 383446 - DNA, 1892 bp, Homo Sapiens; identical to SEQ ID NO: 351200
  misc_feature (4)..(4): n is a, c, g, or t
  misc_feature (17)..(17): n is a, c, g, or t
  misc_feature (20)..(20): n is a, c, g, or t
  misc_feature (23)..(23): n is a, c, g, or t
  misc_feature (29)..(29): n is a, c, g, or t
  misc_feature (35)..(35): n is a, c, g, or t
  misc_feature (39)..(40): n is a, c, g, or t
  misc_feature (44)..(45): n is a, c, g, or t
  misc_feature (56)..(56): n is a, c, g, or t
  misc_feature (66)..(68): n is a, c, g, or t
  misc_feature (71)..(71): n is a, c, g, or t
  misc_feature (78)..(78): n is a, c, g, or t
  misc_feature (98)..(99): n is a, c, g, or t
  misc_feature (113)..(113): n is a, c, g, or t
  misc_feature (119)..(119): n is a, c, g, or t
  misc_feature (122)..(122): n is a, c, g, or t
  misc_feature (136)..(136): n is a, c, g, or t
  misc_feature (144)..(146): n is a, c, g, or t
  misc_feature (149)..(149): n is a, c, g, or t
  misc_feature (193)..(193): n is a, c, g, or t
  misc_feature (228)..(228): n is a, c, g, or t
  misc_feature (241)..(241): n is a, c, g, or t
  misc_feature (257)..(290): n is a, c, g, or t
  misc_feature (386)..(386): n is a, c, g, or t
  misc_feature (459)..(459): n is a, c, g, or t
  misc_feature (467)..(467): n is a, c, g, or t
  misc_feature (474)..(474): n is a, c, g, or t

SEQ ID NO: 383447 - DNA, 1084 bp, Homo Sapiens; identical to SEQ ID NO: 351201
  misc_feature (11)..(11): n is a, c, g, or t
  misc_feature (17)..(17): n is a, c, g, or t
  misc_feature (22)..(23): n is a, c, g, or t
  misc_feature (28)..(28): n is a, c, g, or t
  misc_feature (33)..(33): n is a, c, g, or t
  misc_feature (36)..(36): n is a, c, g, or t
  misc_feature (38)..(39): n is a, c, g, or t
  misc_feature (45)..(46): n is a, c, g, or t
  misc_feature (49)..(49): n is a, c, g, or t
  misc_feature (55)..(55): n is a, c, g, or t
  misc_feature (63)..(63): n is a, c, g, or t
  misc_feature (67)..(67): n is a, c, g, or t
  misc_feature (71)..(71): n is a, c, g, or t
  misc_feature (81)..(81): n is a, c, g, or t
  misc_feature (87)..(87): n is a, c, g, or t
  misc_feature (89)..(89): n is a, c, g, or t
  misc_feature (91)..(91): n is a, c, g, or t
  misc_feature (100)..(100): n is a, c, g, or t
  misc_feature (102)..(102): n is a, c, g, or t
  misc_feature (126)..(127): n is a, c, g, or t
  misc_feature (132)..(132): n is a, c, g, or t
  misc_feature (149)..(149): n is a, c, g, or t
  misc_feature (158)..(159): n is a, c, g, or t
  misc_feature (162)..(162): n is a, c, g, or t
  misc_feature (167)..(167): n is a, c, g, or t
  misc_feature (172)..(172): n is a, c, g, or t
  misc_feature (178)..(178): n is a, c, g, or t

SEQ ID NO: 383448 - DNA, 1365 bp, Homo Sapiens; identical to SEQ ID NO: 351202
  misc_feature (1220)..(1220): n is a, c, g, or t
  misc_feature (1271)..(1271): n is a, c, g, or t
  misc_feature (1273)..(1273): n is a, c, g, or t
  misc_feature (1282)..(1282): n is a, c, g, or t
  misc_feature (1292)..(1292): n is a, c, g, or t
  misc_feature (1297)..(1297): n is a, c, g, or t
  misc_feature (1299)..(1299): n is a, c, g, or t
  misc_feature (1306)..(1307): n is a, c, g, or t
  misc_feature (1314)..(1314): n is a, c, g, or t
  misc_feature (1317)..(1317): n is a, c, g, or t
  misc_feature (1323)..(1323): n is a, c, g, or t
  misc_feature (1329)..(1329): n is a, c, g, or t
  misc_feature (1331)..(1331): n is a, c, g, or t
  misc_feature (1336)..(1336): n is a, c, g, or t
  misc_feature (1347)..(1347): n is a, c, g, or t

SEQ ID NO: 383449 - DNA, 899 bp, Homo Sapiens; identical to SEQ ID NO: 351203

SEQ ID NO: 383450 - DNA, 911 bp, Homo Sapiens; identical to SEQ ID NO: 351204

SEQ ID NO: 383451 - DNA, 536 bp, Homo Sapiens; identical to SEQ ID NO: 351206
  misc_feature (39)..(39): n is a, c, g, or t

SEQ ID NO: 383452 - DNA, 1413 bp, Homo Sapiens; identical to SEQ ID NO: 351207
  misc_feature (1007)..(1007): n is a, c, g, or t
  misc_feature (1085)..(1085): n is a, c, g, or t
  misc_feature (1113)..(1156): n is a, c, g, or t
  misc_feature (1191)..(1191): n is a, c, g, or t
  misc_feature (1207)..(1207): n is a, c, g, or t
  misc_feature (1209)..(1209): n is a, c, g, or t
  misc_feature (1300)..(1300): n is a, c, g, or t
  misc_feature (1308)..(1308): n is a, c, g, or t
  misc_feature (1323)..(1323): n is a, c, g, or t
  misc_feature (1333)..(1333): n is a, c, g, or t
  misc_feature (1339)..(1339): n is a, c, g, or t
  misc_feature (1355)..(1355): n is a, c, g, or t
  misc_feature (1370)..(1370): n is a, c, g, or t
  misc_feature (1378)..(1378): n is a, c, g, or t
  misc_feature (1388)..(1388): n is a, c, g, or t

SEQ ID NO: 383453 - DNA, 709 bp, Homo Sapiens; identical to SEQ ID NO: 351211
  misc_feature (51)..(51): n is a, c, g, or t
  misc_feature (112)..(112): n is a, c, g, or t

SEQ ID NO: 383454 - DNA, 1621 bp, Homo Sapiens; identical to SEQ ID NO: 351212

SEQ ID NO: 383455 - DNA, 1284 bp, Homo Sapiens; identical to SEQ ID NO: 351213
  misc_feature (61)..(97): n is a, c, g, or t
  misc_feature (562)..(685): n is a, c, g, or t
  misc_feature (730)..(738): n is a, c, g, or t
  misc_feature (888)..(896): n is a, c, g, or t

SEQ ID NO: 383456 - DNA, 733 bp, Homo Sapiens; identical to SEQ ID NO: 351214

SEQ ID NO: 383457 - DNA, 690 bp, Homo Sapiens; identical to SEQ ID NO: 351215

SEQ ID NO: 383458 - DNA, 416 bp, Homo Sapiens; identical to SEQ ID NO: 351216

SEQ ID NO: 383459 - DNA, 2576 bp, Homo Sapiens; identical to SEQ ID NO: 351217
  misc_feature (2323)..(2413): n is a, c, g, or t

SEQ ID NO: 383460 - DNA, 849 bp, Homo Sapiens; identical to SEQ ID NO: 351218

SEQ ID NO: 383461 - DNA, 1642 bp, Homo Sapiens; identical to SEQ ID NO: 351219
  misc_feature (31)..(31): n is a, c, g, or t
  misc_feature (44)..(44): n is a, c, g, or t
  misc_feature (71)..(71): n is a, c, g, or t
  misc_feature (81)..(81): n is a, c, g, or t
  misc_feature (90)..(90): n is a, c, g, or t
  misc_feature (102)..(102): n is a, c, g, or t
  misc_feature (111)..(111): n is a, c, g, or t
  misc_feature (129)..(129): n is a, c, g, or t
  misc_feature (1279)..(1343): n is a, c, g, or t

SEQ ID NO: 383462 - DNA, 690 bp, Homo Sapiens; identical to SEQ ID NO: 351220

SEQ ID NO: 383463 - DNA, 506 bp, Homo Sapiens; identical to SEQ ID NO: 351221
  misc_feature (55)..(55): n is a, c, g, or t
  misc_feature (133)..(133): n is a, c, g, or t

SEQ ID NO: 383464 - DNA, 1174 bp, Homo Sapiens; identical to SEQ ID NO: 351223

SEQ ID NO: 383465 - DNA, 1689 bp, Homo Sapiens; identical to SEQ ID NO: 351224
  misc_feature (230)..(375): n is a, c, g, or t
  misc_feature (837)..(837): n is a, c, g, or t
  misc_feature (894)..(894): n is a, c, g, or t
  misc_feature (931)..(931): n is a, c, g, or t
  misc_feature (960)..(960): n is a, c, g, or t
  misc_feature (965)..(965): n is a, c, g, or t
  misc_feature (971)..(971): n is a, c, g, or t
  misc_feature (974)..(974): n is a, c, g, or t
  misc_feature (997)..(997): n is a, c, g, or t
  misc_feature (1008)..(1008): n is a, c, g, or t
  misc_feature (1016)..(1016): n is a, c, g, or t
  misc_feature (1020)..(1020): n is a, c, g, or t
  misc_feature (1022)..(1023): n is a, c, g, or t
  misc_feature (1040)..(1040): n is a, c, g, or t
  misc_feature (1059)..(1059): n is a, c, g, or t
  misc_feature (1077)..(1078): n is a, c, g, or t
  misc_feature (1092)..(1092): n is a, c, g, or t
  misc_feature (1110)..(1110): n is a, c, g, or t
  misc_feature (1118)..(1119): n is a, c, g, or t
  misc_feature (1121)..(1121): n is a, c, g, or t
  misc_feature (1127)..(1130): n is a, c, g, or t
  misc_feature (1132)..(1133): n is a, c, g, or t
  misc_feature (1152)..(1152): n is a, c, g, or t
  misc_feature (1156)..(1156): n is a, c, g, or t
  misc_feature (1159)..(1160): n is a, c, g, or t
  misc_feature (1167)..(1167): n is a, c, g, or t
  misc_feature (1186)..(1186): n is a, c, g, or t
  misc_feature (1231)..(1231): n is a, c, g, or t
  misc_feature (1235)..(1235): n is a, c, g, or t
  misc_feature (1242)..(1242): n is a, c, g, or t
  misc_feature (1588)..(1588): n is a, c, g, or t
  misc_feature (1614)..(1614): n is a, c, g, or t
  misc_feature (1616)..(1616): n is a, c, g, or t
  misc_feature (1633)..(1633): n is a, c, g, or t
  misc_feature (1636)..(1636): n is a, c, g, or t
  misc_feature (1640)..(1640): n is a, c, g, or t
  misc_feature (1643)..(1643): n is a, c, g, or t
  misc_feature (1647)..(1649): n is a, c, g, or t
  misc_feature (1653)..(1653): n is a, c, g, or t
  misc_feature (1655)..(1655): n is a, c, g, or t
  misc_feature (1685)..(1685): n is a, c, g, or t
  misc_feature (1687)..(1687): n is a, c, g, or t

SEQ ID NO: 383466 - DNA, 850 bp, Homo Sapiens; identical to SEQ ID NO: 351225

SEQ ID NO: 383467 - DNA, 979 bp, Homo Sapiens; identical to SEQ ID NO: 351227
  misc_feature (862)..(862): n is a, c, g, or t

SEQ ID NO: 383468 - DNA, 856 bp, Homo Sapiens; identical to SEQ ID NO: 351228

SEQ ID NO: 383469 - DNA, 2586 bp, Homo Sapiens; identical to SEQ ID NO: 351230
  misc_feature (2110)..(2219): n is a, c, g, or t
  misc_feature (2396)..(2430): n is a, c, g, or t

SEQ ID NO: 383470 - DNA, 768 bp, Homo Sapiens; identical to SEQ ID NO: 351231
  misc_feature (490)..(490): n is a, c, g, or t
  misc_feature (602)..(602): n is a, c, g, or t

SEQ ID NO: 383471 - DNA, 1468 bp, Homo Sapiens; identical to SEQ ID NO: 351232

SEQ ID NO: 383472 - DNA, 1162 bp, Homo Sapiens; identical to SEQ ID NO: 351233
  misc_feature (362)..(419): n is a, c, g, or t

SEQ ID NO: 383473 - DNA, 519 bp, Homo Sapiens; identical to SEQ ID NO: 351234
  misc_feature (198)..(351): n is a, c, g, or t

SEQ ID NO: 383474 - DNA, 366 bp, Homo Sapiens; identical to SEQ ID NO: 351235
  misc_feature (50)..(50): n is a, c, g, or t
  misc_feature (122)..(190): n is a, c, g, or t

SEQ ID NO: 383475 - DNA, 1021 bp, Homo Sapiens; identical to SEQ ID NO: 351236
  misc_feature (935)..(939): n is a, c, g, or t
  misc_feature (968)..(968): n is a, c, g, or t
  misc_feature (971)..(971): n is a, c, g, or t
  misc_feature (979)..(979): n is a, c, g, or t
  misc_feature (982)..(982): n is a, c, g, or t
  misc_feature (985)..(985): n is a, c, g, or t
  misc_feature (987)..(987): n is a, c, g, or t
  misc_feature (989)..(989): n is a, c, g, or t
  misc_feature (1003)..(1003): n is a, c, g, or t
  misc_feature (1006)..(1006): n is a, c, g, or t
  misc_feature (1011)..(1011): n is a, c, g, or t
  misc_feature (1013)..(1013): n is a, c, g, or t

SEQ ID NO: 383476 - DNA, 1028 bp, Homo Sapiens; identical to SEQ ID NO: 351237

SEQ ID NO: 383477 - DNA, 950 bp, Homo Sapiens; identical to SEQ ID NO: 351238

SEQ ID NO: 383478 - DNA, 1050 bp, Homo Sapiens; identical to SEQ ID NO: 351240
  misc_feature (467)..(475): n is a, c, g, or t
  misc_feature (705)..(705): n is a, c, g, or t
  misc_feature (893)..(893): n is a, c, g, or t
  misc_feature (897)..(897): n is a, c, g, or t

SEQ ID NO: 383479 - DNA, 866 bp, Homo Sapiens; identical to SEQ ID NO: 351241
  misc_feature (801)..(823): n is a, c, g, or t

SEQ ID NO: 383480 - DNA, 1907 bp, Homo Sapiens; identical to SEQ ID NO: 351242

SEQ ID NO: 383481 - DNA, 1175 bp, Homo Sapiens; identical to SEQ ID NO: 351243
  misc_feature (126)..(126): n is a, c, g, or t

SEQ ID NO: 383482 - DNA, 793 bp, Homo Sapiens; identical to SEQ ID NO: 351244

SEQ ID NO: 383483 - DNA, 1594 bp, Homo Sapiens; identical to SEQ ID NO: 351249
  misc_feature (57)..(99): n is a, c, g, or t
  misc_feature (527)..(535): n is a, c, g, or t
  misc_feature (1149)..(1170): n is a, c, g, or t

SEQ ID NO: 383484 - DNA, 831 bp, Homo Sapiens; identical to SEQ ID NO: 351250

SEQ ID NO: 383485 - DNA, 1154 bp, Homo Sapiens; identical to SEQ ID NO: 351255
  misc_feature (6)..(6): n is a, c, g, or t
  misc_feature (8)..(9): n is a, c, g, or t
  misc_feature (54)..(54): n is a, c, g, or t
  misc_feature (57)..(57): n is a, c, g, or t
  misc_feature (64)..(64): n is a, c, g, or t
  misc_feature (85)..(85): n is a, c, g, or t
  misc_feature (93)..(93): n is a, c, g, or t
  misc_feature (102)..(102): n is a, c, g, or t
  misc_feature (650)..(670): n is a, c, g, or t

SEQ ID NO: 383486 - DNA, 1323 bp, Homo Sapiens; identical to SEQ ID NO: 351256
  misc_feature (124)..(209): n is a, c, g, or t
  misc_feature (867)..(934): n is a, c, g, or t

SEQ ID NO: 383487 - DNA, 888 bp, Homo Sapiens; identical to SEQ ID NO: 351257
  misc_feature (24)..(24): n is a, c, g, or t

SEQ ID NO: 383488 - DNA, 629 bp, Homo Sapiens; identical to SEQ ID NO: 351258
  misc_feature (16)..(16): n is a, c, g, or t
  misc_feature (156)..(156): n is a, c, g, or t
  misc_feature (254)..(303): n is a, c, g, or t

SEQ ID NO: 383489 - DNA, 916 bp, Homo Sapiens; identical to SEQ ID NO: 351264
  misc_feature (14)..(14): n is a, c, g, or t
  misc_feature (48)..(48): n is a, c, g, or t
  misc_feature (182)..(204): n is a, c, g, or t

SEQ ID NO: 383490 - DNA, 423 bp, Homo Sapiens; identical to SEQ ID NO: 351265

SEQ ID NO: 383491 - DNA, 660 bp, Homo Sapiens; identical to SEQ ID NO: 351266

SEQ ID NO: 383492 - DNA, 534 bp, Homo Sapiens; identical to SEQ ID NO: 351267

SEQ ID NO: 383493 - DNA, 1917 bp, Homo Sapiens; identical to SEQ ID NO: 351269

SEQ ID NO: 383494 - DNA, 1390 bp, Homo Sapiens; identical to SEQ ID NO: 351270
  misc_feature (337)..(337): n is a, c, g, or t
  misc_feature (359)..(359): n is a, c, g, or t
  misc_feature (1045)..(1045): n is a, c, g, or t
  misc_feature (1117)..(1135): n is a, c, g, or t
  misc_feature (1338)..(1338): n is a, c, g, or t

SEQ ID NO: 383495 - DNA, 461 bp, Homo Sapiens; identical to SEQ ID NO: 351271
  misc_feature (390)..(390): n is a, c, g, or t
  misc_feature (406)..(406): n is a, c, g, or t

SEQ ID NO: 383496 - DNA, 2736 bp, Homo Sapiens; identical to SEQ ID NO: 351275
  misc_feature (2287)..(2348): n is a, c, g, or t

SEQ ID NO: 383497 - DNA, 1068 bp, Homo Sapiens; identical to SEQ ID NO: 351276

SEQ ID NO: 383498 - DNA, 470 bp, Homo Sapiens; identical to SEQ ID NO: 351277
  misc_feature (109)..(109): n is a, c, g, or t

SEQ ID NO: 383499 - DNA, 456 bp, Homo Sapiens; identical to SEQ ID NO: 351280

SEQ ID NO: 383500 - DNA, 958 bp, Homo Sapiens; identical to SEQ ID NO: 351281

SEQ ID NO: 383501 - DNA, 1253 bp, Homo Sapiens; identical to SEQ ID NO: 351282

SEQ ID NO: 383502 - DNA, 824 bp, Homo Sapiens; identical to SEQ ID NO: 351284

SEQ ID NO: 383503 - DNA, 1948 bp, Homo Sapiens; identical to SEQ ID NO: 351285
  misc_feature (49)..(85): n is a, c, g, or t
  misc_feature (1369)..(1371): n is a, c, g, or t
  misc_feature (1373)..(1443): n is a, c, g, or t
  misc_feature (1446)..(1449): n is a, c, g, or t

SEQ ID NO: 383504 - DNA, 1216 bp, Homo Sapiens; identical to SEQ ID NO: 351287
  misc_feature (1114)..(1114): n is a, c, g, or t

SEQ ID NO: 383505 - DNA, 777 bp, Homo Sapiens; identical to SEQ ID NO: 351288
  misc_feature (349)..(349): n is a, c, g, or t
  misc_feature (517)..(547): n is a, c, g, or t

SEQ ID NO: 383506 - DNA, 548 bp, Homo Sapiens; identical to SEQ ID NO: 351289
  misc_feature (24)..(24): n is a, c, g, or t
  misc_feature (107)..(107): n is a, c, g, or t

SEQ ID NO: 383507 - DNA, 1345 bp, Homo Sapiens; identical to SEQ ID NO: 351301

SEQ ID NO: 383508 - DNA, 722 bp, Homo Sapiens; identical to SEQ ID NO: 351302

SEQ ID NO: 383509 - DNA, 574 bp, Homo Sapiens; identical to SEQ ID NO: 351303

SEQ ID NO: 383510 - DNA, 2497 bp, Homo Sapiens; identical to SEQ ID NO: 351304
  misc_feature (32)..(32): n is a, c, g, or t
  misc_feature (40)..(40): n is a, c, g, or t
  misc_feature (88)..(88): n is a, c, g, or t
  misc_feature (187)..(187): n is a, c, g, or t

SEQ ID NO: 383511 - DNA, 1370 bp, Homo Sapiens; identical to SEQ ID NO: 351310
  misc_feature (755)..(755): n is a, c, g, or t
  misc_feature (887)..(887): n is a, c, g, or t
  misc_feature (971)..(971): n is a, c, g, or t
  misc_feature (990)..(990): n is a, c, g, or t
  misc_feature (1113)..(1113): n is a, c, g, or t
  misc_feature (1117)..(1117): n is a, c, g, or t
  misc_feature (1147)..(1147): n is a, c, g, or t

SEQ ID NO: 383512 - DNA, 2143 bp, Homo Sapiens; identical to SEQ ID NO: 351311

SEQ ID NO: 383513 - DNA, 577 bp, Homo Sapiens; identical to SEQ ID NO: 351312

SEQ ID NO: 383514 - DNA, 1619 bp, Homo Sapiens; identical to SEQ ID NO: 351313

SEQ ID NO: 383515 - DNA, 993 bp, Homo Sapiens; identical to SEQ ID NO: 351314
  misc_feature (6)..(6): n is a, c, g, or t
  misc_feature (13)..(13): n is a, c, g, or t
  misc_feature (796)..(796): n is a, c, g, or t

SEQ ID NO: 383516 - DNA, 1128 bp, Homo Sapiens; identical to SEQ ID NO: 351315
  misc_feature (736)..(736): n is a, c, g, or t
  misc_feature (809)..(809): n is a, c, g, or t
  misc_feature (946)..(946): n is a, c, g, or t

SEQ ID NO: 383517 - DNA, 847 bp, Homo Sapiens; identical to SEQ ID NO: 351316

SEQ ID NO: 383518 - DNA, 925 bp, Homo Sapiens; identical to SEQ ID NO: 351317
  misc_feature (47)..(83): n is a, c, g, or t

SEQ ID NO: 383519 - DNA, 2451 bp, Homo Sapiens; identical to SEQ ID NO: 351318
  misc_feature (1660)..(1674): n is a, c, g, or t
  misc_feature (1763)..(1772): n is a, c, g, or t
  misc_feature (1846)..(1846): n is a, c, g, or t
  misc_feature (1876)..(1876): n is a, c, g, or t

SEQ ID NO: 383520 - DNA, 349 bp, Homo Sapiens; identical to SEQ ID NO: 351319

SEQ ID NO: 383521 - DNA, 511 bp, Homo Sapiens; identical to SEQ ID NO: 351322
  misc_feature (13)..(13): n is a, c, g, or t
  misc_feature (48)..(48): n is a, c, g, or t
  misc_feature (54)..(54): n is a, c, g, or t

SEQ ID NO: 383522 - DNA, 920 bp, Homo Sapiens; identical to SEQ ID NO: 351323
  misc_feature (253)..(253): n is a, c, g, or t
  misc_feature (260)..(269): n is a, c, g, or t

SEQ ID NO: 383523 - DNA, 498 bp, Homo Sapiens; identical to SEQ ID NO: 351325

SEQ ID NO: 383524 - DNA, 389 bp, Homo Sapiens; identical to SEQ ID NO: 351326
  misc_feature (13)..(13): n is a, c, g, or t
  misc_feature (83)..(83): n is a, c, g, or t

SEQ ID NO: 383525 - DNA, 2701 bp, Homo Sapiens; identical to SEQ ID NO: 351344
  misc_feature (2423)..(2423): n is a, c, g, or t

SEQ ID NO: 383526 - DNA, 1122 bp, Homo Sapiens; identical to SEQ ID NO: 351345
  misc_feature (482)..(482): n is a, c, g, or t

SEQ ID NO: 383527 - DNA, 461 bp, Homo Sapiens; identical to SEQ ID NO: 351346

SEQ ID NO: 383528 - DNA, 471 bp, Homo Sapiens; identical to SEQ ID NO: 351347
  misc_feature (18)..(18): n is a, c, g, or t
  misc_feature (36)..(36): n is a, c, g, or t
  misc_feature (41)..(41): n is a, c, g, or t
  misc_feature (79)..(79): n is a, c, g, or t
  misc_feature (96)..(96): n is a, c, g, or t

SEQ ID NO: 383529 - DNA, 823 bp, Homo Sapiens; identical to SEQ ID NO: 351348
  misc_feature (19)..(19): n is a, c, g, or t

SEQ ID NO: 383530 - DNA, 704 bp, Homo Sapiens; identical to SEQ ID NO: 351349
  misc_feature (23)..(23): n is a, c, g, or t

SEQ ID NO: 383531 - DNA, 421 bp, Homo Sapiens; identical to SEQ ID NO: 351353
  misc_feature (344)..(352): n is a, c, g, or t

SEQ ID NO: 383532 - DNA, 533 bp, Homo Sapiens; identical to SEQ ID NO: 351354
  misc_feature (462)..(470): n is a, c, g, or t

SEQ ID NO: 383533 - DNA, 525 bp, Homo Sapiens; identical to SEQ ID NO: 351361

SEQ ID NO: 383534 - DNA, 455 bp, Homo Sapiens; identical to SEQ ID NO: 351362
  misc_feature (64)..(64): n is a, c, g, or t
  misc_feature (238)..(238): n is a, c, g, or t

SEQ ID NO: 383535 - DNA, 1342 bp, Homo Sapiens; identical to SEQ ID NO: 351370
  misc_feature (20)..(20): n is a, c, g, or t
  misc_feature (132)..(149): n is a, c, g, or t
  misc_feature (207)..(231): n is a, c, g, or t
  misc_feature (785)..(807): n is a, c, g, or t

SEQ ID NO: 383536 - DNA, 1105 bp, Homo Sapiens; identical to SEQ ID NO: 351371
  misc_feature (53)..(94): n is a, c, g, or t
  misc_feature (327)..(350): n is a, c, g, or t
  misc_feature (358)..(358): n is a, c, g, or t
  misc_feature (407)..(424): n is a, c, g, or t
  misc_feature (967)..(994): n is a, c, g, or t

SEQ ID NO: 383537 - DNA, 1158 bp, Homo Sapiens; identical to SEQ ID NO: 351372
  misc_feature (111)..(138): n is a, c, g, or t
  misc_feature (682)..(698): n is a, c, g, or t
  misc_feature (755)..(779): n is a, c, g, or t
  misc_feature (1052)..(1052): n is a, c, g, or t

SEQ ID NO: 383538 - DNA, 1733 bp, Homo Sapiens; identical to SEQ ID NO: 351377
  misc_feature (1098)..(1098): n is a, c, g, or t
  misc_feature (1115)..(1165): n is a, c, g, or t
  misc_feature (1176)..(1176): n is a, c, g, or t
  misc_feature (1185)..(1185): n is a, c, g, or t
  misc_feature (1236)..(1236): n is a, c, g, or t
  misc_feature (1243)..(1243): n is a, c, g, or t
  misc_feature (1248)..(1249): n is a, c, g, or t
  misc_feature (1255)..(1255): n is a, c, g, or t
  misc_feature (1258)..(1258): n is a, c, g, or t
  misc_feature (1301)..(1301): n is a, c, g, or t
  misc_feature (1308)..(1308): n is a, c, g, or t
  misc_feature (1330)..(1330): n is a, c, g, or t
  misc_feature (1338)..(1338): n is a, c, g, or t
  misc_feature (1347)..(1347): n is a, c, g, or t
  misc_feature (1349)..(1349): n is a, c, g, or t
  misc_feature (1352)..(1352): n is a, c, g, or t
  misc_feature (1354)..(1354): n is a, c, g, or t
  misc_feature (1373)..(1374): n is a, c, g, or t
  misc_feature (1408)..(1416): n is a, c, g, or t

SEQ ID NO: 383539 - DNA, 884 bp, Homo Sapiens; identical to SEQ ID NO: 351378

SEQ ID NO: 383540 - DNA, 558 bp, Homo Sapiens; identical to SEQ ID NO: 351379
  misc_feature (20)..(20): n is a, c, g, or t
  misc_feature (25)..(25): n is a, c, g, or t

SEQ ID NO: 383541 - DNA, 479 bp, Homo Sapiens; identical to SEQ ID NO: 351380

SEQ ID NO: 383542 - DNA, 2647 bp, Homo Sapiens; identical to SEQ ID NO: 351381

SEQ ID NO: 383543 - DNA, 1677 bp, Homo Sapiens; identical to SEQ ID NO: 351382

SEQ ID NO: 383544 - DNA, 426 bp, Homo Sapiens; identical to SEQ ID NO: 351383
  misc_feature (16)..(16): n is a, c, g, or t

SEQ ID NO: 383545 - DNA, 515 bp, Homo Sapiens; identical to SEQ ID NO: 351386
  misc_feature (213)..(213): n is a, c, g, or t

SEQ ID NO: 383546 - DNA, 420 bp, Homo Sapiens; identical to SEQ ID NO: 351387
  misc_feature (15)..(15): n is a, c, g, or t
  misc_feature (25)..(25): n is a, c, g, or t
  misc_feature (31)..(31): n is a, c, g, or t
  misc_feature (102)..(102): n is a, c, g, or t
  misc_feature (189)..(189): n is a, c, g, or t

SEQ ID NO: 383547 - DNA, 984 bp, Homo Sapiens; identical to SEQ ID NO: 351389
  misc_feature (853)..(853): n is a, c, g, or t
  misc_feature (946)..(946): n is a, c, g, or t
  misc_feature (951)..(951): n is a, c, g, or t

SEQ ID NO: 383548 - DNA, 2514 bp, Homo Sapiens; identical to SEQ ID NO: 351390

SEQ ID NO: 383549 - DNA, 1221 bp, Homo Sapiens; identical to SEQ ID NO: 351401
  misc_feature (880)..(904): n is a, c, g, or t
  misc_feature (1110)..(1121): n is a, c, g, or t

SEQ ID NO: 383550 - DNA, 2200 bp, Homo Sapiens; identical to SEQ ID NO: 351402

SEQ ID NO: 383551 - DNA, 1234 bp, Homo Sapiens; identical to SEQ ID NO: 351403
  misc_feature (50)..(82): n is a, c, g, or t

SEQ ID NO: 383552 - DNA, 893 bp, Homo Sapiens; identical to SEQ ID NO: 351404

SEQ ID NO: 383553 - DNA, 1087 bp, Homo Sapiens; identical to SEQ ID NO: 351405
  misc_feature (39)..(39): n is a, c, g, or t
  misc_feature (154)..(154): n is a, c, g, or t
  misc_feature (184)..(184): n is a, c, g, or t
  misc_feature (445)..(445): n is a, c, g, or t

SEQ ID NO: 383554 - DNA, 1127 bp, Homo Sapiens; identical to SEQ ID NO: 351406

SEQ ID NO: 383555 - DNA, 750 bp, Homo Sapiens; identical to SEQ ID NO: 351407

SEQ ID NO: 383556 - DNA, 1094 bp, Homo Sapiens; identical to SEQ ID NO: 351408

SEQ ID NO: 383557 - DNA, 1238 bp, Homo Sapiens; identical to SEQ ID NO: 351409
  misc_feature (1191)..(1192): n is a, c, g, or t
  misc_feature (1195)..(1195): n is a, c, g, or t
  misc_feature (1225)..(1226): n is a, c, g, or t

SEQ ID NO: 383558 - DNA, 1890 bp, Homo Sapiens; identical to SEQ ID NO: 351410
  misc_feature (1440)..(1464): n is a, c, g, or t
  misc_feature (1661)..(1661): n is a, c, g, or t
  misc_feature (1711)..(1711): n is a, c, g, or t

SEQ ID NO: 383559 - DNA, 815 bp, Homo Sapiens; identical to SEQ ID NO: 351411

SEQ ID NO: 383560 - DNA, 1212 bp, Homo Sapiens; identical to SEQ ID NO: 351414

SEQ ID NO: 383561 - DNA, 1953 bp, Homo Sapiens; identical to SEQ ID NO: 351415
  misc_feature (1607)..(1607): n is a, c, g, or t
  misc_feature (1674)..(1674): n is a, c, g, or t
  misc_feature (1678)..(1678): n is a, c, g, or t
  misc_feature (1710)..(1710): n is a, c, g, or t
  misc_feature (1806)..(1806): n is a, c, g, or t
  misc_feature (1843)..(1843): n is a, c, g, or t
  misc_feature (1855)..(1855): n is a, c, g, or t
  misc_feature (1886)..(1907): n is a, c, g, or t

SEQ ID NO: 383562 - DNA, 847 bp, Homo Sapiens; identical to SEQ ID NO: 351421

SEQ ID NO: 383563 - DNA, 2650 bp, Homo Sapiens; identical to SEQ ID NO: 351422
  misc_feature (715)..(772): n is a, c, g, or t
  misc_feature (1715)..(1728): n is a, c, g, or t

SEQ ID NO: 383564 - DNA, 408 bp, Homo Sapiens; identical to SEQ ID NO: 351423

SEQ ID NO: 383565 - DNA, 2791 bp, Homo Sapiens; identical to SEQ ID NO: 351424
  misc_feature (1657)..(1657): n is a, c, g, or t
  misc_feature (1660)..(1685): n is a, c, g, or t

SEQ ID NO: 383566 - DNA, 1226 bp, Homo Sapiens; identical to SEQ ID NO: 351427
  misc_feature (517)..(631): n is a, c, g, or t

SEQ ID NO: 383567 - DNA, 344 bp, Homo Sapiens; identical to SEQ ID NO: 351428

SEQ ID NO: 383568 - DNA, 567 bp, Homo Sapiens; identical to SEQ ID NO: 351434
  misc_feature (419)..(419): n is a, c, g, or t
  misc_feature (444)..(444): n is a, c, g, or t
  misc_feature (450)..(450): n is a, c, g, or t
  misc_feature (466)..(466): n is a, c, g, or t
  misc_feature (474)..(474): n is a, c, g, or t
  misc_feature (484)..(484): n is a, c, g, or t
  misc_feature (496)..(496): n is a, c, g, or t
  misc_feature (515)..(515): n is a, c, g, or t
  misc_feature (529)..(529): n is a, c, g, or t
  misc_feature (542)..(542): n is a, c, g, or t
  misc_feature (549)..(549): n is a, c, g, or t

SEQ ID NO: 383569 - DNA, 1342 bp, Homo Sapiens; identical to SEQ ID NO: 351435

SEQ ID NO: 383570 - DNA, 647 bp, Homo Sapiens; identical to SEQ ID NO: 351436
  misc_feature (443)..(443): n is a, c, g, or t
  misc_feature (448)..(448): n is a, c, g, or t
  misc_feature (468)..(468): n is a, c, g, or t
  misc_feature (473)..(473): n is a, c, g, or t
  misc_feature (479)..(479): n is a, c, g, or t
  misc_feature (516)..(516): n is a, c, g, or t
  misc_feature (523)..(523): n is a, c, g, or t
  misc_feature (533)..(533): n is a, c, g, or t
  misc_feature (552)..(552): n is a, c, g, or t
  misc_feature (569)..(569): n is a, c, g, or t
  misc_feature (574)..(574): n is a, c, g, or t
  misc_feature (583)..(583): n is a, c, g, or t
  misc_feature (595)..(595): n is a, c, g, or t
  misc_feature (617)..(617): n is a, c, g, or t
  misc_feature (637)..(637): n is a, c, g, or t

SEQ ID NO: 383571 - DNA, 361 bp, Homo Sapiens; identical to SEQ ID NO: 351444
  misc_feature (12)..(12): n is a, c, g, or t

SEQ ID NO: 383572 - DNA, 448 bp, Homo Sapiens; identical to SEQ ID NO: 351445
  misc_feature (56)..(56): n is a, c, g, or t
  misc_feature (133)..(133): n is a, c, g, or t

SEQ ID NO: 383573 - DNA, 555 bp, Homo Sapiens; identical to SEQ ID NO: 351447

SEQ ID NO: 383574 - DNA, 475 bp, Homo Sapiens; identical to SEQ ID NO: 351448
  misc_feature (362)..(362): n is a, c, g, or t
  misc_feature (382)..(382): n is a, c, g, or t
  misc_feature (387)..(387): n is a, c, g, or t
  misc_feature (424)..(424): n is a, c, g, or t
  misc_feature (453)..(453): n is a, c, g, or t
  misc_feature (459)..(459): n is a, c, g, or t

SEQ ID NO: 383575 - DNA, 683 bp, Homo Sapiens; identical to SEQ ID NO: 351452
  misc_feature (14)..(14): n is a, c, g, or t

SEQ ID NO: 383576 - DNA, 454 bp, Homo Sapiens; identical to SEQ ID NO: 351453

SEQ ID NO: 383577 - DNA, 688 bp, Homo Sapiens; identical to SEQ ID NO: 351454

SEQ ID NO: 383578 - DNA, 551 bp, Homo Sapiens; identical to SEQ ID NO: 351455

SEQ ID NO: 383579 - DNA, 841 bp, Homo Sapiens; identical to SEQ ID NO: 351458
  misc_feature (21)..(21): n is a, c, g, or t
  misc_feature (49)..(49): n is a, c, g, or t
  misc_feature (57)..(57): n is a, c, g, or t
  misc_feature (64)..(64): n is a, c, g, or t
  misc_feature (83)..(83): n is a, c, g, or t
  misc_feature (88)..(88): n is a, c, g, or t
  misc_feature (285)..(399): n is a, c, g, or t
  misc_feature (416)..(450): n is a, c, g, or t

SEQ ID NO: 383580 - DNA, 1018 bp, Homo Sapiens; identical to SEQ ID NO: 351459
  misc_feature (21)..(21): n is a, c, g, or t
  misc_feature (27)..(27): n is a, c, g, or t
  misc_feature (57)..(57): n is a, c, g, or t
  misc_feature (63)..(63): n is a, c, g, or t
  misc_feature (69)..(69): n is a, c, g, or t
  misc_feature (77)..(77): n is a, c, g, or t
  misc_feature (106)..(106): n is a, c, g, or t
  misc_feature (120)..(120): n is a, c, g, or t
  misc_feature (781)..(896): n is a, c, g, or t
  misc_feature (913)..(947): n is a, c, g, or t

SEQ ID NO: 383581 - DNA, 446 bp, Homo Sapiens; identical to SEQ ID NO: 351461

SEQ ID NO: 383582 - DNA, 696 bp, Homo Sapiens; identical to SEQ ID NO: 351462
  misc_feature (17)..(17): n is a, c, g, or t
  misc_feature (26)..(26): n is a, c, g, or t

SEQ ID NO: 383583 - DNA, 406 bp, Homo Sapiens; identical to SEQ ID NO: 351463
  misc_feature (12)..(12): n is a, c, g, or t
  misc_feature (23)..(23): n is a, c, g, or t
  misc_feature (50)..(50): n is a, c, g, or t

SEQ ID NO: 383584 - DNA, 693 bp, Homo Sapiens; identical to SEQ ID NO: 351464
  misc_feature (24)..(24): n is a, c, g, or t
  misc_feature (73)..(73): n is a, c, g, or t
  misc_feature (478)..(478): n is a, c, g, or t

SEQ ID NO: 383585 - DNA, 568 bp, Homo Sapiens; identical to SEQ ID NO: 351465
  misc_feature (24)..(24): n is a, c, g, or t
  misc_feature (94)..(94): n is a, c, g, or t

SEQ ID NO: 383586 - DNA, 661 bp, Homo Sapiens; identical to SEQ ID NO: 351470
  misc_feature (142)..(194): n is a, c, g, or t
  misc_feature (267)..(380): n is a, c, g, or t
  misc_feature (483)..(483): n is a, c, g, or t

SEQ ID NO: 383587 - DNA, 1962 bp, Homo Sapiens; identical to SEQ ID NO: 351471

SEQ ID NO: 383588 - DNA, 836 bp, Homo Sapiens; identical to SEQ ID NO: 351491
  misc_feature (667)..(693): n is a, c, g, or t
  misc_feature (757)..(757): n is a, c, g, or t
  misc_feature (823)..(823): n is a, c, g, or t

SEQ ID NO: 383589 - DNA, 309 bp, Homo Sapiens; identical to SEQ ID NO: 351492

SEQ ID NO: 383590 - DNA, 1122 bp, Homo Sapiens; identical to SEQ ID NO: 351495
  misc_feature (9)..(9): n is a, c, g, or t
  misc_feature (23)..(23): n is a, c, g, or t
  misc_feature (28)..(28): n is a, c, g, or t
  misc_feature (31)..(31): n is a, c, g, or t
  misc_feature (35)..(35): n is a, c, g, or t
  misc_feature (43)..(43): n is a, c, g, or t
  misc_feature (49)..(49): n is a, c, g, or t
  misc_feature (51)..(51): n is a, c, g, or t
  misc_feature (57)..(57): n is a, c, g, or t
  misc_feature (75)..(75): n is a, c, g, or t
  misc_feature (97)..(97): n is a, c, g, or t
  misc_feature (107)..(107): n is a, c, g, or t
  misc_feature (122)..(122): n is a, c, g, or t
  misc_feature (138)..(138): n is a, c, g, or t
  misc_feature (170)..(170): n is a, c, g, or t
  misc_feature (174)..(174): n is a, c, g, or t
  misc_feature (192)..(192): n is a, c, g, or t
  misc_feature (209)..(209): n is a, c, g, or t

SEQ ID NO: 383591 - DNA, 696 bp, Homo Sapiens; identical to SEQ ID NO: 351496
  misc_feature (420)..(549): n is a, c, g, or t
  misc_feature (556)..(558): n is a, c, g, or t
  misc_feature (560)..(560): n is a, c, g, or t
  misc_feature (563)..(580): n is a, c, g, or t
  misc_feature (586)..(586): n is a, c, g, or t
  misc_feature (589)..(606): n is a, c, g, or t

SEQ ID NO: 383592 - DNA, 884 bp, Homo Sapiens; identical to SEQ ID NO: 351498
  misc_feature (40)..(40): n is a, c, g, or t
  misc_feature (59)..(59): n is a, c, g, or t
  misc_feature (83)..(83): n is a, c, g, or t
  misc_feature (125)..(125): n is a, c, g, or t
  misc_feature (152)..(152): n is a, c, g, or t
  misc_feature (258)..(258): n is a, c, g, or t

SEQ ID NO: 383593 - DNA, 418 bp, Homo Sapiens; identical to SEQ ID NO: 351499
  misc_feature (33)..(33): n is a, c, g, or t
  misc_feature (42)..(42): n is a, c, g, or t
  misc_feature (94)..(94): n is a, c, g, or t
  misc_feature (111)..(111): n is a, c, g, or t

SEQ ID NO: 383594 - DNA, 1347 bp, Homo Sapiens; identical to SEQ ID NO: 351500

SEQ ID NO: 383595 - DNA, 464 bp, Homo Sapiens; identical to SEQ ID NO: 351501
  misc_feature (16)..(16): n is a, c, g, or t
  misc_feature (24)..(24): n is a, c, g, or t
  misc_feature (42)..(42): n is a, c, g, or t

SEQ ID NO: 383596 - DNA, 1190 bp, Homo Sapiens; identical to SEQ ID NO: 351506

SEQ ID NO: 383597 - DNA, 1173 bp, Homo Sapiens; identical to SEQ ID NO: 351507

SEQ ID NO: 383598 - DNA, 2241 bp, Homo Sapiens; identical to SEQ ID NO: 351509
  misc_feature (1612)..(1699): n is a, c, g, or t
  misc_feature (1843)..(1852): n is a, c, g, or t
  misc_feature (2116)..(2116): n is a, c, g, or t

SEQ ID NO: 383599 - DNA, 651 bp, Homo Sapiens; identical to SEQ ID NO: 351510
  misc_feature (449)..(449): n is a, c, g, or t

SEQ ID NO: 383600 - DNA, 293 bp, Homo Sapiens; identical to SEQ ID NO: 351513

SEQ ID NO: 383601 - DNA, 518 bp, Homo Sapiens; identical to SEQ ID NO: 351514

SEQ ID NO: 383602 - DNA, 997 bp, Homo Sapiens; identical to SEQ ID NO: 351520
  misc_feature (878)..(878): n is a, c, g, or t
  misc_feature (933)..(933): n is a, c, g, or t
  misc_feature (952)..(952): n is a, c, g, or t

SEQ ID NO: 383603 - DNA, 875 bp, Homo Sapiens; identical to SEQ ID NO: 351521
  misc_feature (52)..(88): n is a, c, g, or t

SEQ ID NO: 383604 - DNA, 449 bp, Homo Sapiens; identical to SEQ ID NO: 351522

SEQ ID NO: 383605 - DNA, 616 bp, Homo Sapiens; identical to SEQ ID NO: 351523
  misc_feature (55)..(55): n is a, c, g, or t

SEQ ID NO: 383606 - DNA, 1870 bp, Homo Sapiens; identical to SEQ ID NO: 351530
  misc_feature (388)..(388): n is a, c, g, or t

SEQ ID NO: 383607 - DNA, 514 bp, Homo Sapiens; identical to SEQ ID NO: 351531

SEQ ID NO: 383608 - DNA, 384 bp, Homo Sapiens; identical to SEQ ID NO: 351532
  misc_feature (147)..(147): n is a, c, g, or t
  misc_feature (299)..(299): n is a, c, g, or t

SEQ ID NO: 383609 - DNA, 2104 bp, Homo Sapiens; identical to SEQ ID NO: 351533
  misc_feature (52)..(52): n is a, c, g, or t
  misc_feature (71)..(71): n is a, c, g, or t
  misc_feature (80)..(80): n is a, c, g, or t
  misc_feature (94)..(216): n is a, c, g, or t
  misc_feature (233)..(233): n is a, c, g, or t

SEQ ID NO: 383610 - DNA, 900 bp, Homo Sapiens; identical to SEQ ID NO: 351534
  misc_feature (662)..(662): n is a, c, g, or t

SEQ ID NO: 383611 - DNA, 1055 bp, Homo Sapiens; identical to SEQ ID NO: 351535

SEQ ID NO: 383612 - DNA, 845 bp, Homo Sapiens; identical to SEQ ID NO: 351536

SEQ ID NO: 383613 - DNA, 956 bp, Homo Sapiens; identical to SEQ ID NO: 351537

SEQ ID NO: 383614 - DNA, 781 bp, Homo Sapiens; identical to SEQ ID NO: 351538

SEQ ID NO: 383615 - DNA, 3588 bp, Homo Sapiens; identical to SEQ ID NO: 351539

SEQ ID NO: 383616 - DNA, 678 bp, Homo Sapiens; identical to SEQ ID NO: 351540
  misc_feature (55)..(55): n is a, c, g, or t
  misc_feature (67)..(67): n is a, c, g, or t

SEQ ID NO: 383617 - DNA, 628 bp, Homo Sapiens; identical to SEQ ID NO: 351541

SEQ ID NO: 383618 - DNA, 1174 bp, Homo Sapiens; identical to SEQ ID NO: 351542
  misc_feature (6)..(6): n is a, c, g, or t
  misc_feature (15)..(15): n is a, c, g, or t
  misc_feature (20)..(20): n is a, c, g, or t
  misc_feature (27)..(27): n is a, c, g, or t
  misc_feature (29)..(29): n is a, c, g, or t
  misc_feature (45)..(45): n is a, c, g, or t
  misc_feature (47)..(47): n is a, c, g, or t
  misc_feature (50)..(50): n is a, c, g, or t
  misc_feature (52)..(55): n is a, c, g, or t
  misc_feature (58)..(59): n is a, c, g, or t
  misc_feature (61)..(62): n is a, c, g, or t
  misc_feature (65)..(65): n is a, c, g, or t
  misc_feature (78)..(78): n is a, c, g, or t
  misc_feature (81)..(81): n is a, c, g, or t
  misc_feature (91)..(91): n is a, c, g, or t
  misc_feature (143)..(143): n is a, c, g, or t
  misc_feature (905)..(905): n is a, c, g, or t

SEQ ID NO: 383619 - DNA, 1078 bp, Homo Sapiens; identical to SEQ ID NO: 351543
  misc_feature (3)..(3): n is a, c, g, or t
  misc_feature (25)..(26): n is a, c, g, or t
  misc_feature (31)..(32): n is a, c, g, or t
  misc_feature (35)..(35): n is a, c, g, or t
  misc_feature (47)..(47): n is a, c, g, or t
  misc_feature (52)..(52): n is a, c, g, or t
  misc_feature (66)..(66): n is a, c, g, or t

SEQ ID NO: 383620 - DNA, 1391 bp, Homo Sapiens; identical to SEQ ID NO: 351544
  misc_feature (120)..(120): n is a, c, g, or t
  misc_feature (1357)..(1357): n is a, c, g, or t
  misc_feature (1367)..(1367): n is a, c, g, or t
  misc_feature (1376)..(1376): n is a, c, g, or t

SEQ ID NO: 383621 - DNA, 1058 bp, Homo Sapiens; identical to SEQ ID NO: 351545
  misc_feature (726)..(726): n is a, c, g, or t

SEQ ID NO: 383622 - DNA, 1374 bp, Homo Sapiens; identical to SEQ ID NO: 351547
  misc_feature (58)..(58): n is a, c, g, or t
  misc_feature (74)..(74): n is a, c, g, or t
  misc_feature (1014)..(1071): n is a, c, g, or t

SEQ ID NO: 383623 - DNA, 719 bp, Homo Sapiens; identical to SEQ ID NO: 351548
  misc_feature (332)..(332): n is a, c, g, or t
  misc_feature (337)..(410): n is a, c, g, or t

SEQ ID NO: 383624 - DNA, 702 bp, Homo Sapiens; identical to SEQ ID NO: 351552
  misc_feature (451)..(451): n is a, c, g, or t
  misc_feature (571)..(571): n is a, c, g, or t
  misc_feature (576)..(576): n is a, c, g, or t
  misc_feature (598)..(598): n is a, c, g, or t
  misc_feature (646)..(646): n is a, c, g, or t

SEQ ID NO: 383625 - DNA, 1586 bp, Homo Sapiens; identical to SEQ ID NO: 351553
  misc_feature (1329)..(1329): n is a, c, g, or t
  misc_feature (1495)..(1495): n is a, c, g, or t
  misc_feature (1526)..(1526): n is a, c, g, or t
  misc_feature (1562)..(1562): n is a, c, g, or t

SEQ ID NO: 383626 - DNA, 1169 bp, Homo Sapiens; identical to SEQ ID NO: 351554
  misc_feature (184)..(196): n is a, c, g, or t

SEQ ID NO: 383627 - DNA, 664 bp, Homo Sapiens; identical to SEQ ID NO: 351555

SEQ ID NO: 383628 - DNA, 2067 bp, Homo Sapiens; identical to SEQ ID NO: 351559
  misc_feature (38)..(38): n is a, c, g, or t
  misc_feature (1233)..(1242): n is a, c, g, or t
  misc_feature (1403)..(1403): n is a, c, g, or t
  misc_feature (1405)..(1405): n is a, c, g, or t
  misc_feature (1407)..(1408): n is a, c, g, or t
  misc_feature (1414)..(1414): n is a, c, g, or t
  misc_feature (1416)..(1416): n is a, c, g, or t
  misc_feature (1422)..(1422): n is a, c, g, or t
  misc_feature (1424)..(1424): n is a, c, g, or t
  misc_feature (1426)..(1426): n is a, c, g, or t
  misc_feature (1428)..(1428): n is a, c, g, or t
  misc_feature (1430)..(1430): n is a, c, g, or t
  misc_feature (1432)..(1432): n is a, c, g, or t

SEQ ID NO: 383629 - DNA, 1645 bp, Homo Sapiens; identical to SEQ ID NO: 351560
  misc_feature (33)..(33): n is a, c, g, or t
  misc_feature (47)..(47): n is a, c, g, or t
  misc_feature (62)..(63): n is a, c, g, or t
  misc_feature (66)..(68): n is a, c, g, or t
  misc_feature (76)..(77): n is a, c, g, or t
  misc_feature (80)..(80): n is a, c, g, or t
  misc_feature (82)..(82): n is a, c, g, or t
  misc_feature (134)..(134): n is a, c, g, or t
  misc_feature (1219)..(1228): n is a, c, g, or t
  misc_feature (1390)..(1430): n is a, c, g, or t

SEQ ID NO: 383630 - DNA, 1138 bp, Homo Sapiens; identical to SEQ ID NO: 351561
  misc_feature (84)..(84): n is a, c, g, or t
  misc_feature (90)..(90): n is a, c, g, or t
  misc_feature (103)..(104): n is a, c, g, or t
  misc_feature (908)..(908): n is a, c, g, or t

SEQ ID NO: 383631 - DNA, 416 bp, Homo Sapiens; identical to SEQ ID NO: 351564

SEQ ID NO: 383632 - DNA, 1007 bp, Homo Sapiens; identical to SEQ ID NO: 351565
  misc_feature (762)..(765): n is a, c, g, or t

SEQ ID NO: 383633 - DNA, 568 bp, Homo Sapiens; identical to SEQ ID NO: 351566

SEQ ID NO: 383634 - DNA, 1022 bp, Homo Sapiens; identical to SEQ ID NO: 351567

SEQ ID NO: 383635 - DNA, 1246 bp, Homo Sapiens; identical to SEQ ID NO: 351568
  misc_feature (1084)..(1179): n is a, c, g, or t

SEQ ID NO: 383636 - DNA, 2550 bp, Homo Sapiens; identical to SEQ ID NO: 351570
  misc_feature (78)..(78): n is a, c, g, or t
  misc_feature (100)..(100): n is a, c, g, or t
  misc_feature (1153)..(1183): n is a, c, g, or t
  misc_feature (1802)..(1802): n is a, c, g, or t
  misc_feature (1825)..(1825): n is a, c, g, or t
  misc_feature (1986)..(1986): n is a, c, g, or t
  misc_feature (2035)..(2035): n is a, c, g, or t
  misc_feature (2055)..(2055): n is a, c, g, or t
  misc_feature (2094)..(2094): n is a, c, g, or t
  misc_feature (2107)..(2107): n is a, c, g, or t
  misc_feature (2149)..(2157): n is a, c, g, or t
  misc_feature (2166)..(2166): n is a, c, g, or t
  misc_feature (2224)..(2224): n is a, c, g, or t
  misc_feature (2294)..(2294): n is a, c, g, or t
  misc_feature (2321)..(2321): n is a, c, g, or t
  misc_feature (2382)..(2382): n is a, c, g, or t
  misc_feature (2407)..(2408): n is a, c, g, or t
  misc_feature (2448)..(2448): n is a, c, g, or t
  misc_feature (2481)..(2496): n is a, c, g, or t
  misc_feature (2498)..(2498): n is a, c, g, or t
  misc_feature (2507)..(2507): n is a, c, g, or t

SEQ ID NO: 383637 - DNA, 1153 bp, Homo Sapiens; identical to SEQ ID NO: 351571
  misc_feature (450)..(450): n is a, c, g, or t
  misc_feature (467)..(467): n is a, c, g, or t
  misc_feature (699)..(699): n is a, c, g, or t
  misc_feature (1051)..(1051): n is a, c, g, or t
  misc_feature (1088)..(1088): n is a, c, g, or t
  misc_feature (1118)..(1118): n is a, c, g, or t

SEQ ID NO: 383638 - DNA, 534 bp, Homo Sapiens; identical to SEQ ID NO: 351572

SEQ ID NO: 383639 - DNA, 1372 bp, Homo Sapiens; identical to SEQ ID NO: 351574

SEQ ID NO: 383640 - DNA, 1627 bp, Homo Sapiens; identical to SEQ ID NO: 351575

SEQ ID NO: 383641 - DNA, 821 bp, Homo Sapiens; identical to SEQ ID NO: 351576

SEQ ID NO: 383642 - DNA, 834 bp, Homo Sapiens; identical to SEQ ID NO: 351578
  misc_feature (764)..(788): n is a, c, g, or t
  misc_feature (818)..(818): n is a, c, g, or t

SEQ ID NO: 383643 - DNA, 1517 bp, Homo Sapiens; identical to SEQ ID NO: 351579
  misc_feature (18)..(18): n is a, c, g, or t
  misc_feature (203)..(203): n is a, c, g, or t
  misc_feature (968)..(968): n is a, c, g, or t
  misc_feature (1143)..(1143): n is a, c, g, or t
  misc_feature (1412)..(1412): n is a, c, g, or t
  misc_feature (1445)..(1446): n is a, c, g, or t

SEQ ID NO: 383644 - DNA, 745 bp, Homo Sapiens; identical to SEQ ID NO: 351581

SEQ ID NO: 383645 - DNA, 425 bp, Homo Sapiens; identical to SEQ ID NO: 351582

SEQ ID NO: 383646 - DNA, 982 bp, Homo Sapiens; identical to SEQ ID NO: 351588

SEQ ID NO: 383647 - DNA, 1003 bp, Homo Sapiens; identical to SEQ ID NO: 351589
  misc_feature (847)..(847): n is a, c, g, or t
  misc_feature (862)..(862): n is a, c, g, or t
  misc_feature (876)..(876): n is a, c, g, or t
  misc_feature (885)..(885): n is a, c, g, or t
  misc_feature (902)..(902): n is a, c, g, or t
  misc_feature (914)..(914): n is a, c, g, or t
  misc_feature (922)..(922): n is a, c, g, or t
  misc_feature (943)..(943): n is a, c, g, or t
  misc_feature (972)..(973): n is a, c, g, or t
  misc_feature (981)..(981): n is a, c, g, or t
  misc_feature (990)..(990): n is a, c, g, or t
  misc_feature (993)..(993): n is a, c, g, or t
  misc_feature (996)..(996): n is a, c, g, or t

SEQ ID NO: 383648 - DNA, 499 bp, Homo Sapiens; identical to SEQ ID NO: 351590

SEQ ID NO: 383649 - DNA, 895 bp, Homo Sapiens; identical to SEQ ID NO: 351591

SEQ ID NO: 383650 - DNA, 732 bp, Homo Sapiens; identical to SEQ ID NO: 351597

SEQ ID NO: 383651 - DNA, 746 bp, Homo Sapiens; identical to SEQ ID NO: 351598

SEQ ID NO: 383652 - DNA, 2428 bp, Homo Sapiens; identical to SEQ ID NO: 351599

SEQ ID NO: 383653 - DNA, 1016 bp, Homo Sapiens; identical to SEQ ID NO: 351600

SEQ ID NO: 383654 - DNA, 1883 bp, Homo Sapiens; identical to SEQ ID NO: 351609

SEQ ID NO: 383655 - DNA, 536 bp, Homo Sapiens; identical to SEQ ID NO: 351610

SEQ ID NO: 383656 - DNA, 630 bp, Homo Sapiens; identical to SEQ ID NO: 351611

SEQ ID NO: 383657 - DNA, 2012 bp, Homo Sapiens; identical to SEQ ID NO: 351614
  misc_feature (1594)..(1594): n is a, c, g, or t
  misc_feature (1608)..(1608): n is a, c, g, or t
  misc_feature (1619)..(1619): n is a, c, g, or t
  misc_feature (1628)..(1629): n is a, c, g, or t
  misc_feature (1638)..(1638): n is a, c, g, or t
  misc_feature (1642)..(1643): n is a, c, g, or t
  misc_feature (1650)..(1650): n is a, c, g, or t
  misc_feature (1657)..(1657): n is a, c, g, or t
  misc_feature (1661)..(1662): n is a, c, g, or t
  misc_feature (1673)..(1673): n is a, c, g, or t
  misc_feature (1687)..(1687): n is a, c, g, or t
  misc_feature (1727)..(1774): n is a, c, g, or t
  misc_feature (1857)..(1916): n is a, c, g, or t
  misc_feature (1928)..(1928): n is a, c, g, or t
  misc_feature (1937)..(1939): n is a, c, g, or t
  misc_feature (1960)..(1960): n is a, c, g, or t
  misc_feature (1980)..(1980): n is a, c, g, or t

SEQ ID NO: 383658 - DNA, 532 bp, Homo Sapiens; identical to SEQ ID NO: 351615
  misc_feature (17)..(17): n is a, c, g, or t
  misc_feature (53)..(53): n is a, c, g, or t
  misc_feature (60)..(60): n is a, c, g, or t
  misc_feature (69)..(69): n is a, c, g, or t
  misc_feature (85)..(85): n is a, c, g, or t
  misc_feature (92)..(92): n is a, c, g, or t
  misc_feature (100)..(100): n is a, c, g, or t
  misc_feature (108)..(108): n is a, c, g, or t
  misc_feature (202)..(202): n is a, c, g, or t
  misc_feature (321)..(321): n is a, c, g, or t
  misc_feature (464)..(464): n is a, c, g, or t
  misc_feature (521)..(521): n is a, c, g, or t

SEQ ID NO: 383659 - DNA, 2133 bp, Homo Sapiens; identical to SEQ ID NO: 351616
  misc_feature (722)..(732): n is a, c, g, or t
  misc_feature (1062)..(1073): n is a, c, g, or t
  misc_feature (1421)..(1436): n is a, c, g, or t

SEQ ID NO: 383660 - DNA, 536 bp, Homo Sapiens; identical to SEQ ID NO: 351617
  misc_feature (35)..(35): n is a, c, g, or t
  misc_feature (42)..(42): n is a, c, g, or t
  misc_feature (66)..(119): n is a, c, g, or t
  misc_feature (136)..(136): n is a, c, g, or t
  misc_feature (167)..(167): n is a, c, g, or t

SEQ ID NO: 383661 - DNA, 488 bp, Homo Sapiens; identical to SEQ ID NO: 351618
  misc_feature (121)..(132): n is a, c, g, or t
  misc_feature (417)..(417): n is a, c, g, or t
  misc_feature (449)..(449): n is a, c, g, or t
  misc_feature (459)..(459): n is a, c, g, or t
  misc_feature (466)..(466): n is a, c, g, or t

SEQ ID NO: 383662 - DNA, 1794 bp, Homo Sapiens; identical to SEQ ID NO: 351620

SEQ ID NO: 383663 - DNA, 962 bp, Homo Sapiens; identical to SEQ ID NO: 351621

SEQ ID NO: 383664 - DNA, 1093 bp, Homo Sapiens; identical to SEQ ID NO: 351622

SEQ ID NO: 383665 - DNA, 1117 bp, Homo Sapiens; identical to SEQ ID NO: 351623
  misc_feature (728)..(728): n is a, c, g, or t

SEQ ID NO: 383666 - DNA, 1285 bp, Homo Sapiens; identical to SEQ ID NO: 351625
  misc_feature (1145)..(1145): n is a, c, g, or t
  misc_feature (1186)..(1186): n is a, c, g, or t
  misc_feature (1198)..(1198): n is a, c, g, or t
  misc_feature (1209)..(1209): n is a, c, g, or t
  misc_feature (1219)..(1219): n is a, c, g, or t
  misc_feature (1274)..(1274): n is a, c, g, or t

SEQ ID NO: 383667 - DNA, 1768 bp, Homo Sapiens; identical to SEQ ID NO: 351626

SEQ ID NO: 383668 - DNA, 2081 bp, Homo Sapiens; identical to SEQ ID NO: 351629

SEQ ID NO: 383669 - DNA, 1129 bp, Homo Sapiens; identical to SEQ ID NO: 351630
  misc_feature (797)..(797): n is a, c, g, or t
  misc_feature (930)..(1006): n is a, c, g, or t

SEQ ID NO: 383670 - DNA, 731 bp, Homo Sapiens; identical to SEQ ID NO: 351632
  misc_feature (416)..(600): n is a, c, g, or t

SEQ ID NO: 383671 - DNA, 2116 bp, Homo Sapiens; identical to SEQ ID NO: 351633

SEQ ID NO: 383672 - DNA, 333 bp, Homo Sapiens; identical to SEQ ID NO: 351634

SEQ ID NO: 383673 - DNA, 1059 bp, Homo Sapiens; identical to SEQ ID NO: 351635
  misc_feature (508)..(544): n is a, c, g, or t
  misc_feature (903)..(903): n is a, c, g, or t
  misc_feature (917)..(917): n is a, c, g, or t
  misc_feature (925)..(925): n is a, c, g, or t

SEQ ID NO: 383674 - DNA, 305 bp, Homo Sapiens; identical to SEQ ID NO: 351636

SEQ ID NO: 383675 - DNA, 2410 bp, Homo Sapiens; identical to SEQ ID NO: 351640
  misc_feature (246)..(246): n is a, c, g, or t
  misc_feature (373)..(373): n is a, c, g, or t
  misc_feature (1783)..(1783): n is a, c, g, or t

SEQ ID NO: 383676 - DNA, 305 bp, Homo Sapiens; identical to SEQ ID NO: 351641

SEQ ID NO: 383677 - DNA, 2014 bp, Homo Sapiens; identical to SEQ ID NO: 351643

SEQ ID NO: 383678 - DNA, 469 bp, Homo Sapiens; identical to SEQ ID NO: 351644
  misc_feature (436)..(436): n is a, c, g, or t
  misc_feature (446)..(446): n is a, c, g, or t

SEQ ID NO: 383679 - DNA, 579 bp, Homo Sapiens; identical to SEQ ID NO: 351645
  misc_feature (538)..(538): n is a, c, g, or t
  misc_feature (546)..(546): n is a, c, g, or t

SEQ ID NO: 383680 - DNA, 1223 bp, Homo Sapiens; identical to SEQ ID NO: 351647
  misc_feature (736)..(753): n is a, c, g, or t
  misc_feature (762)..(800): n is a, c, g, or t
  misc_feature (847)..(919): n is a, c, g, or t

SEQ ID NO: 383681 - DNA, 472 bp, Homo Sapiens; identical to SEQ ID NO: 351648
  misc_feature (29)..(29): n is a, c, g, or t
  misc_feature (78)..(78): n is a, c, g, or t
  misc_feature (83)..(83): n is a, c, g, or t
  misc_feature (341)..(341): n is a, c, g, or t

SEQ ID NO: 383682 - DNA, 3755 bp, Homo Sapiens; identical to SEQ ID NO: 351649
  misc_feature (3281)..(3344): n is a, c, g, or t
  misc_feature (3371)..(3371): n is a, c, g, or t
  misc_feature (3404)..(3404): n is a, c, g, or t
  misc_feature (3411)..(3411): n is a, c, g, or t
  misc_feature (3413)..(3413): n is a, c, g, or t
  misc_feature (3464)..(3464): n is a, c, g, or t
  misc_feature (3468)..(3468): n is a, c, g, or t
  misc_feature (3495)..(3495): n is a, c, g, or t
  misc_feature (3637)..(3637): n is a, c, g, or t
  misc_feature (3654)..(3654): n is a, c, g, or t
  misc_feature (3662)..(3662): n is a, c, g, or t
  misc_feature (3665)..(3665): n is a, c, g, or t
  misc_feature (3677)..(3678): n is a, c, g, or t
  misc_feature (3686)..(3686): n is a, c, g, or t
  misc_feature (3689)..(3691): n is a, c, g, or t
  misc_feature (3696)..(3696): n is a, c, g, or t
  misc_feature (3698)..(3714): n is a, c, g, or t
  misc_feature (3720)..(3720): n is a, c, g, or t
  misc_feature (3737)..(3737): n is a, c, g, or t

SEQ ID NO: 383683 - DNA, 544 bp, Homo Sapiens; identical to SEQ ID NO: 351650
  misc_feature (26)..(26): n is a, c, g, or t
  misc_feature (33)..(33): n is a, c, g, or t
  misc_feature (56)..(56): n is a, c, g, or t
  misc_feature (83)..(83): n is a, c, g, or t
  misc_feature (98)..(98): n is a, c, g, or t
  misc_feature (105)..(105): n is a, c, g, or t

SEQ ID NO: 383684 - DNA, 559 bp, Homo Sapiens; identical to SEQ ID NO: 351651
  misc_feature (28)..(28): n is a, c, g, or t
  misc_feature (38)..(38): n is a, c, g, or t
  misc_feature (44)..(53): n is a, c, g, or t

SEQ ID NO: 383685 - DNA, 1686 bp, Homo Sapiens; identical to SEQ ID NO: 351655

SEQ ID NO: 383686 - DNA, 437 bp, Homo Sapiens; identical to SEQ ID NO: 351656
  misc_feature (421)..(421): n is a, c, g, or t

SEQ ID NO: 383687 - DNA, 1173 bp, Homo Sapiens; identical to SEQ ID NO: 351661
  misc_feature (815)..(1073): n is a, c, g, or t

SEQ ID NO: 383688 - DNA, 546 bp, Homo Sapiens; identical to SEQ ID NO: 351662
  misc_feature (18)..(18): n is a, c, g, or t
  misc_feature (105)..(105): n is a, c, g, or t

SEQ ID NO: 383689 - DNA, 625 bp, Homo Sapiens; identical to SEQ ID NO: 351668

SEQ ID NO: 383690 - DNA, 478 bp, Homo Sapiens; identical to SEQ ID NO: 351669
  misc_feature (19)..(19): n is a, c, g, or t
  misc_feature (27)..(27): n is a, c, g, or t
  misc_feature (33)..(33): n is a, c, g, or t
  misc_feature (175)..(175): n is a, c, g, or t

SEQ ID NO: 383691 - DNA, 413 bp, Homo Sapiens; identical to SEQ ID NO: 351670
  misc_feature (21)..(21): n is a, c, g, or t
  misc_feature (253)..(253): n is a, c, g, or t

SEQ ID NO: 383692 - DNA, 1653 bp, Homo Sapiens; identical to SEQ ID NO: 351671
  misc_feature (1077)..(1077): n is a, c, g, or t
  misc_feature (1087)..(1087): n is a, c, g, or t
  misc_feature (1093)..(1093): n is a, c, g, or t
  misc_feature (1096)..(1096): n is a, c, g, or t
  misc_feature (1100)..(1140): n is a, c, g, or t
  misc_feature (1158)..(1158): n is a, c, g, or t
  misc_feature (1164)..(1164): n is a, c, g, or t
  misc_feature (1169)..(1171): n is a, c, g, or t
  misc_feature (1180)..(1180): n is a, c, g, or t
  misc_feature (1182)..(1182): n is a, c, g, or t
  misc_feature (1187)..(1187): n is a, c, g, or t
  misc_feature (1191)..(1191): n is a, c, g, or t
  misc_feature (1243)..(1244): n is a, c, g, or t
  misc_feature (1255)..(1256): n is a, c, g, or t
  misc_feature (1264)..(1265): n is a, c, g, or t
  misc_feature (1276)..(1277): n is a, c, g, or t
  misc_feature (1282)..(1282): n is a, c, g, or t
  misc_feature (1286)..(1286): n is a, c, g, or t
  misc_feature (1290)..(1290): n is a, c, g, or t
  misc_feature (1310)..(1311): n is a, c, g, or t
  misc_feature (1331)..(1331): n is a, c, g, or t
  misc_feature (1334)..(1334): n is a, c, g, or t
  misc_feature (1341)..(1341): n is a, c, g, or t
  misc_feature (1350)..(1351): n is a, c, g, or t
  misc_feature (1361)..(1361): n is a, c, g, or t
  misc_feature (1377)..(1377): n is a, c, g, or t
  misc_feature (1386)..(1386): n is a, c, g, or t
  misc_feature (1389)..(1389): n is a, c, g, or t
  misc_feature (1394)..(1396): n is a, c, g, or t
  misc_feature (1400)..(1400): n is a, c, g, or t
  misc_feature (1420)..(1420): n is a, c, g, or t
  misc_feature (1424)..(1424): n is a, c, g, or t
  misc_feature (1444)..(1445): n is a, c, g, or t
  misc_feature (1471)..(1471): n is a, c, g, or t
  misc_feature (1499)..(1499): n is a, c, g, or t
  misc_feature (1531)..(1531): n is a, c, g, or t
  misc_feature (1533)..(1533): n is a, c, g, or t
  misc_feature (1537)..(1537): n is a, c, g, or t
  misc_feature (1539)..(1539): n is a, c, g, or t
  misc_feature (1544)..(1544): n is a, c, g, or t
  misc_feature (1553)..(1554): n is a, c, g, or t
  misc_feature (1556)..(1556): n is a, c, g, or t
  misc_feature (1561)..(1561): n is a, c, g, or t
  misc_feature (1563)..(1564): n is a, c, g, or t
  misc_feature (1573)..(1573): n is a, c, g, or t
  misc_feature (1578)..(1578): n is a, c, g, or t
  misc_feature (1583)..(1583): n is a, c, g, or t
  misc_feature (1585)..(1587): n is a, c, g, or t
  misc_feature (1589)..(1589): n is a, c, g, or t
  misc_feature (1600)..(1600): n is a, c, g, or t
  misc_feature (1602)..(1605): n is a, c, g, or t
  misc_feature (1611)..(1613): n is a, c, g, or t

SEQ ID NO: 383693 - DNA, 515 bp, Homo Sapiens; identical to SEQ ID NO: 351672

SEQ ID NO: 383694 - DNA, 451 bp, Homo Sapiens; identical to SEQ ID NO: 351673
  misc_feature (14)..(14): n is a, c, g, or t
  misc_feature (32)..(32): n is a, c, g, or t
  misc_feature (46)..(46): n is a, c, g, or t
  misc_feature (80)..(80): n is a, c, g, or t
  misc_feature (87)..(87): n is a, c, g, or t
  misc_feature (279)..(279): n is a, c, g, or t
  misc_feature (361)..(361): n is a, c, g, or t

SEQ ID NO: 383695 - DNA, 556 bp, Homo Sapiens; identical to SEQ ID NO: 351674
  misc_feature (459)..(459): n is a, c, g, or t
  misc_feature (465)..(465): n is a, c, g, or t
  misc_feature (490)..(490): n is a, c, g, or t
  misc_feature (496)..(496): n is a, c, g, or t
  misc_feature (502)..(502): n is a, c, g, or t
  misc_feature (511)..(511): n is a, c, g, or t
  misc_feature (529)..(529): n is a, c, g, or t
  misc_feature (541)..(541): n is a, c, g, or t

SEQ ID NO: 383696 - DNA, 978 bp, Homo Sapiens; identical to SEQ ID NO: 351678
  misc_feature (17)..(17): n is a, c, g, or t
  misc_feature (53)..(53): n is a, c, g, or t
  misc_feature (62)..(62): n is a, c, g, or t
  misc_feature (108)..(108): n is a, c, g, or t
  misc_feature (144)..(144): n is a, c, g, or t

SEQ ID NO: 383697 - DNA, 908 bp, Homo Sapiens; identical to SEQ ID NO: 351679
  misc_feature (100)..(100): n is a, c, g, or t
  misc_feature (127)..(127): n is a, c, g, or t

SEQ ID NO: 383698 - DNA, 1250 bp, Homo Sapiens; identical to SEQ ID NO: 351680
  misc_feature (58)..(58): n is a, c, g, or t
  misc_feature (390)..(390): n is a, c, g, or t
  misc_feature (640)..(640): n is a, c, g, or t
  misc_feature (646)..(646): n is a, c, g, or t
  misc_feature (650)..(650): n is a, c, g, or t
  misc_feature (692)..(703): n is a, c, g, or t

SEQ ID NO: 383699 - DNA, 899 bp, Homo Sapiens; identical to SEQ ID NO: 351681
  misc_feature (815)..(851): n is a, c, g, or t
  misc_feature (863)..(863): n is a, c, g, or t

SEQ ID NO: 383700 - DNA, 386 bp, Homo Sapiens; identical to SEQ ID NO: 351682

SEQ ID NO: 383701 - DNA, 750 bp, Homo Sapiens; identical to SEQ ID NO: 351693

SEQ ID NO: 383702 - DNA, 278 bp, Homo Sapiens; identical to SEQ ID NO: 351694

SEQ ID NO: 383703 - DNA, 1410 bp, Homo Sapiens; identical to SEQ ID NO: 351695
  misc_feature (59)..(59): n is a, c, g, or t
  misc_feature (61)..(61): n is a, c, g, or t
  misc_feature (293)..(293): n is a, c, g, or t
  misc_feature (339)..(339): n is a, c, g, or t
  misc_feature (343)..(351): n is a, c, g, or t
  misc_feature (384)..(384): n is a, c, g, or t
  misc_feature (430)..(430): n is a, c, g, or t
  misc_feature (493)..(493): n is a, c, g, or t
  misc_feature (515)..(515): n is a, c, g, or t
  misc_feature (519)..(519): n is a, c, g, or t
  misc_feature (528)..(544): n is a, c, g, or t

SEQ ID NO: 383704 - DNA, 705 bp, Homo Sapiens; identical to SEQ ID NO: 351696
  misc_feature (663)..(663): n is a, c, g, or t

SEQ ID NO: 383705 - DNA, 2161 bp, Homo Sapiens; identical to SEQ ID NO: 351699
  misc_feature (897)..(897): n is a, c, g, or t
  misc_feature (902)..(904): n is a, c, g, or t
  misc_feature (912)..(912): n is a, c, g, or t
  misc_feature (951)..(1017): n is a, c, g, or t
  misc_feature (1571)..(1580): n is a, c, g, or t

SEQ ID NO: 383706 - DNA, 500 bp, Homo Sapiens; identical to SEQ ID NO: 351700

SEQ ID NO: 383707 - DNA, 1045 bp, Homo Sapiens; identical to SEQ ID NO: 351705
  misc_feature (55)..(55): n is a, c, g, or t
  misc_feature (122)..(122): n is a, c, g, or t
  misc_feature (1027)..(1027): n is a, c, g, or t

SEQ ID NO: 383708 - DNA, 1021 bp, Homo Sapiens; identical to SEQ ID NO: 351706
  misc_feature (64)..(64): n is a, c, g, or t
  misc_feature (472)..(472): n is a, c, g, or t
  misc_feature (784)..(793): n is a, c, g, or t

SEQ ID NO: 383709 - DNA, 872 bp, Homo Sapiens; identical to SEQ ID NO: 351707

SEQ ID NO: 383710 - DNA, 1233 bp, Homo Sapiens; identical to SEQ ID NO: 351710
  misc_feature (60)..(60): n is a, c, g, or t
  misc_feature (1136)..(1136): n is a, c, g, or t
  misc_feature (1167)..(1167): n is a, c, g, or t
  misc_feature (1194)..(1194): n is a, c, g, or t

SEQ ID NO: 383711 - DNA, 1939 bp, Homo Sapiens; identical to SEQ ID NO: 351711
  misc_feature (14)..(14): n is a, c, g, or t
  misc_feature (1072)..(1082): n is a, c, g, or t
  misc_feature (1222)..(1251): n is a, c, g, or t

SEQ ID NO: 383712 - DNA, 500 bp, Homo Sapiens; identical to SEQ ID NO: 351712
  misc_feature (11)..(11): n is a, c, g, or t
  misc_feature (30)..(30): n is a, c, g, or t
  misc_feature (37)..(37): n is a, c, g, or t
  misc_feature (46)..(46): n is a, c, g, or t
  misc_feature (86)..(86): n is a, c, g, or t
  misc_feature (107)..(107): n is a, c, g, or t
  misc_feature (481)..(481): n is a, c, g, or t

SEQ ID NO: 383713 - DNA, 1081 bp, Homo Sapiens; identical to SEQ ID NO: 351717
  misc_feature (855)..(855): n is a, c, g, or t
  misc_feature (900)..(900): n is a, c, g, or t
  misc_feature (910)..(910): n is a, c, g, or t
  misc_feature (923)..(923): n is a, c, g, or t
  misc_feature (927)..(927): n is a, c, g, or t
  misc_feature (929)..(929): n is a, c, g, or t
  misc_feature (943)..(943): n is a, c, g, or t
  misc_feature (947)..(947): n is a, c, g, or t
  misc_feature (949)..(949): n is a, c, g, or t
  misc_feature (960)..(961): n is a, c, g, or t
  misc_feature (963)..(963): n is a, c, g, or t
  misc_feature (966)..(966): n is a, c, g, or t
  misc_feature (972)..(972): n is a, c, g, or t
  misc_feature (985)..(985): n is a, c, g, or t
  misc_feature (996)..(996): n is a, c, g, or t
  misc_feature (998)..(998): n is a, c, g, or t
  misc_feature (1000)..(1000): n is a, c, g, or t
  misc_feature (1003)..(1003): n is a, c, g, or t
  misc_feature (1005)..(1006): n is a, c, g, or t
  misc_feature (1012)..(1013): n is a, c, g, or t
  misc_feature (1016)..(1016): n is a, c, g, or t
  misc_feature (1018)..(1018): n is a, c, g, or t
  misc_feature (1021)..(1021): n is a, c, g, or t
  misc_feature (1023)..(1023): n is a, c, g, or t
  misc_feature (1025)..(1025): n is a, c, g, or t
  misc_feature (1030)..(1030): n is a, c, g, or t
  misc_feature (1033)..(1033): n is a, c, g, or t
  misc_feature (1037)..(1037): n is a, c, g, or t
  misc_feature (1040)..(1040): n is a, c, g, or t
  misc_feature (1042)..(1042): n is a, c, g, or t
  misc_feature (1045)..(1045): n is a, c, g, or t
  misc_feature (1049)..(1049): n is a, c, g, or t
  misc_feature (1063)..(1063): n is a, c, g, or t
  misc_feature (1073)..(1073): n is a, c, g, or t

SEQ ID NO: 383714 - DNA, 1611 bp, Homo Sapiens; identical to SEQ ID NO: 351718

SEQ ID NO: 383715 - DNA, 935 bp, Homo Sapiens; identical to SEQ ID NO: 351719

SEQ ID NO: 383716 - DNA, 2479 bp, Homo Sapiens; identical to SEQ ID NO: 351726

SEQ ID NO: 383717 - DNA, 953 bp, Homo Sapiens; identical to SEQ ID NO: 351727
  misc_feature (872)..(908): n is a, c, g, or t

SEQ ID NO: 383718 - DNA, 2795 bp, Homo Sapiens; identical to SEQ ID NO: 351728
  misc_feature (43)..(43): n is a, c, g, or t
  misc_feature (70)..(71): n is a, c, g, or t
  misc_feature (96)..(96): n is a, c, g, or t
  misc_feature (122)..(122): n is a, c, g, or t
  misc_feature (209)..(209): n is a, c, g, or t
  misc_feature (366)..(366): n is a, c, g, or t
  misc_feature (625)..(633): n is a, c, g, or t
  misc_feature (2653)..(2705): n is a, c, g, or t

SEQ ID NO: 383719 - DNA, 2665 bp, Homo Sapiens; identical to SEQ ID NO: 351729

SEQ ID NO: 383720 - DNA, 637 bp, Homo Sapiens; identical to SEQ ID NO: 351730
  misc_feature (604)..(604): n is a, c, g, or t

SEQ ID NO: 383721 - DNA, 478 bp, Homo Sapiens; identical to SEQ ID NO: 351731

SEQ ID NO: 383722 - DNA, 506 bp, Homo Sapiens; identical to SEQ ID NO: 351732

SEQ ID NO: 383723 - DNA, 1666 bp, Homo Sapiens; identical to SEQ ID NO: 351738

SEQ ID NO: 383724 - DNA, 993 bp, Homo Sapiens; identical to SEQ ID NO: 351739
  misc_feature (152)..(152): n is a, c, g, or t

SEQ ID NO: 383725 - DNA, 917 bp, Homo Sapiens; identical to SEQ ID NO: 351740

SEQ ID NO: 383726 - DNA, 411 bp, Homo Sapiens; identical to SEQ ID NO: 351741
  misc_feature (367)..(367): n is a, c, g, or t

SEQ ID NO: 383727 - DNA, 2304 bp, Homo Sapiens; identical to SEQ ID NO: 351742
  misc_feature (1993)..(2045): n is a, c, g, or t
  misc_feature (2053)..(2053): n is a, c, g, or t
  misc_feature (2093)..(2131): n is a, c, g, or t

SEQ ID NO: 383728 - DNA, 745 bp, Homo Sapiens; identical to SEQ ID NO: 351743
  misc_feature (330)..(383): n is a, c, g, or t
  misc_feature (632)..(676): n is a, c, g, or t

SEQ ID NO: 383729 - DNA, 1005 bp, Homo Sapiens; identical to SEQ ID NO: 351747
  misc_feature (49)..(85): n is a, c, g, or t

SEQ ID NO: 383730 - DNA, 1829 bp, Homo Sapiens; identical to SEQ ID NO: 351748
  misc_feature (1123)..(1123): n is a, c, g, or t
  misc_feature (1544)..(1655): n is a, c, g, or t

SEQ ID NO: 383731 - DNA, 577 bp, Homo Sapiens; identical to SEQ ID NO: 351749
  misc_feature (31)..(31): n is a, c, g, or t
  misc_feature (109)..(109): n is a, c, g, or t

SEQ ID NO: 383732 - DNA, 181 bp, Homo Sapiens; identical to SEQ ID NO: 351750

SEQ ID NO: 383733 - DNA, 462 bp, Homo Sapiens; identical to SEQ ID NO: 351757

SEQ ID NO: 383734 - DNA, 1245 bp, Homo Sapiens; identical to SEQ ID NO: 351758
  misc_feature (104)..(105): n is a, c, g, or t

SEQ ID NO: 383735 - DNA, 1396 bp, Homo Sapiens; identical to SEQ ID NO: 351759
  misc_feature (1081)..(1094): n is a, c, g, or t

SEQ ID NO: 383736 - DNA, 1349 bp, Homo Sapiens; identical to SEQ ID NO: 351760
  misc_feature (29)..(29): n is a, c, g, or t
  misc_feature (34)..(34): n is a, c, g, or t
  misc_feature (36)..(36): n is a, c, g, or t
  misc_feature (1092)..(1198): n is a, c, g, or t

SEQ ID NO: 383737 - DNA, 877 bp, Homo Sapiens; identical to SEQ ID NO: 351761
  misc_feature (178)..(188): n is a, c, g, or t
  misc_feature (521)..(703): n is a, c, g, or t
  misc_feature (705)..(714): n is a, c, g, or t

SEQ ID NO: 383738 - DNA, 146 bp, Homo Sapiens; identical to SEQ ID NO: 351762

SEQ ID NO: 383739 - DNA, 551 bp, Homo Sapiens; identical to SEQ ID NO: 351763
  misc_feature (209)..(217): n is a, c, g, or t

SEQ ID NO: 383740 - DNA, 712 bp, Homo Sapiens; identical to SEQ ID NO: 351764

SEQ ID NO: 383741 - DNA, 1752 bp, Homo Sapiens; identical to SEQ ID NO: 351765
  misc_feature (792)..(837): n is a, c, g, or t
  misc_feature (1182)..(1250): n is a, c, g, or t
  misc_feature (1632)..(1632): n is a, c, g, or t

SEQ ID NO: 383742 - DNA, 680 bp, Homo Sapiens; identical to SEQ ID NO: 351766
  misc_feature (50)..(118): n is a, c, g, or t
  misc_feature (463)..(508): n is a, c, g, or t

SEQ ID NO: 383743 - DNA, 497 bp, Homo Sapiens; identical to SEQ ID NO: 351767
  misc_feature (475)..(475): n is a, c, g, or t

SEQ ID NO: 383744 - DNA, 1063 bp, Homo Sapiens; identical to SEQ ID NO: 351770

SEQ ID NO: 383745 - DNA, 188 bp, Homo Sapiens; identical to SEQ ID NO: 351771

SEQ ID NO: 383746 - DNA, 977 bp, Homo Sapiens; identical to SEQ ID NO: 351776

SEQ ID NO: 383747 - DNA, 1817 bp, Homo Sapiens; identical to SEQ ID NO: 351777

SEQ ID NO: 383748 - DNA, 1099 bp, Homo Sapiens; identical to SEQ ID NO: 351778

SEQ ID NO: 383749 - DNA, 1129 bp, Homo Sapiens; identical to SEQ ID NO: 351786

SEQ ID NO: 383750 - DNA, 906 bp, Homo Sapiens; identical to SEQ ID NO: 351787

SEQ ID NO: 383751 - DNA, 696 bp, Homo Sapiens; identical to SEQ ID NO: 351788

SEQ ID NO: 383752 - DNA, 1000 bp, Homo Sapiens; identical to SEQ ID NO: 351793

SEQ ID NO: 383753 - DNA, 700 bp, Homo Sapiens; identical to SEQ ID NO: 351794

SEQ ID NO: 383754 - DNA, 461 bp, Homo Sapiens; identical to SEQ ID NO: 351795

SEQ ID NO: 383755 - DNA, 1031 bp, Homo Sapiens; identical to SEQ ID NO: 351796
  misc_feature (489)..(549): n is a, c, g, or t

SEQ ID NO: 383756 - DNA, 513 bp, Homo Sapiens; identical to SEQ ID NO: 351800
  misc_feature (19)..(19): n is a, c, g, or t
  misc_feature (47)..(47): n is a, c, g, or t

SEQ ID NO: 383757 - DNA, 517 bp, Homo Sapiens; identical to SEQ ID NO: 351801
  misc_feature (62)..(62): n is a, c, g, or t
  misc_feature (252)..(288): n is a, c, g, or t

SEQ ID NO: 383758 - DNA, 953 bp, Homo Sapiens; identical to SEQ ID NO: 351803
  misc_feature (497)..(497): n is a, c, g, or t

SEQ ID NO: 383759 - DNA, 442 bp, Homo Sapiens; identical to SEQ ID NO: 351804

SEQ ID NO: 383760 - DNA, 899 bp, Homo Sapiens; identical to SEQ ID NO: 172636
  misc_feature (630)..(630): n is a, c, g, or t

SEQ ID NO: 383761 - DNA, 1562 bp, Homo Sapiens; identical to SEQ ID NO: 351806
  misc_feature (1072)..(1132): n is a, c, g, or t

SEQ ID NO: 383762 - DNA, 992 bp, Homo Sapiens; identical to SEQ ID NO: 351807

SEQ ID NO: 383763 - DNA, 764 bp, Homo Sapiens; identical to SEQ ID NO: 351808

SEQ ID NO: 383764 - DNA, 1646 bp, Homo Sapiens; identical to SEQ ID NO: 351810
  misc_feature (1029)..(1029): n is a, c, g, or t
  misc_feature (1083)..(1083): n is a, c, g, or t
  misc_feature (1094)..(1094): n is a, c, g, or t
  misc_feature (1106)..(1106): n is a, c, g, or t
  misc_feature (1111)..(1113): n is a, c, g, or t
  misc_feature (1126)..(1126): n is a, c, g, or t
  misc_feature (1128)..(1128): n is a, c, g, or t
  misc_feature (1130)..(1130): n is a, c, g, or t
  misc_feature (1134)..(1134): n is a, c, g, or t
  misc_feature (1145)..(1145): n is a, c, g, or t
  misc_feature (1167)..(1167): n is a, c, g, or t
  misc_feature (1178)..(1178): n is a, c, g, or t
  misc_feature (1180)..(1180): n is a, c, g, or t
  misc_feature (1195)..(1195): n is a, c, g, or t
  misc_feature (1197)..(1197): n is a, c, g, or t
  misc_feature (1199)..(1199): n is a, c, g, or t
  misc_feature (1201)..(1201): n is a, c, g, or t
  misc_feature (1214)..(1214): n is a, c, g, or t
  misc_feature (1217)..(1217): n is a, c, g, or t
  misc_feature (1224)..(1225): n is a, c, g, or t
  misc_feature (1233)..(1234): n is a, c, g, or t
  misc_feature (1240)..(1243): n is a, c, g, or t
  misc_feature (1245)..(1245): n is a, c, g, or t
  misc_feature (1247)..(1247): n is a, c, g, or t
  misc_feature (1249)..(1249): n is a, c, g, or t
  misc_feature (1252)..(1300): n is a, c, g, or t
  misc_feature (1311)..(1311): n is a, c, g, or t
  misc_feature (1313)..(1313): n is a, c, g, or t
  misc_feature (1315)..(1315): n is a, c, g, or t
  misc_feature (1323)..(1323): n is a, c, g, or t
  misc_feature (1327)..(1327): n is a, c, g, or t
  misc_feature (1340)..(1340): n is a, c, g, or t
  misc_feature (1345)..(1345): n is a, c, g, or t
  misc_feature (1352)..(1352): n is a, c, g, or t
  misc_feature (1381)..(1381): n is a, c, g, or t
  misc_feature (1435)..(1439): n is a, c, g, or t
  misc_feature (1444)..(1447): n is a, c, g, or t
  misc_feature (1473)..(1473): n is a, c, g, or t
  misc_feature (1496)..(1496): n is a, c, g, or t
  misc_feature (1509)..(1509): n is a, c, g, or t
  misc_feature (1514)..(1514): n is a, c, g, or t
  misc_feature (1531)..(1531): n is a, c, g, or t
  misc_feature (1549)..(1549): n is a, c, g, or t
  misc_feature (1560)..(1560): n is a, c, g, or t
  misc_feature (1567)..(1567): n is a, c, g, or t
  misc_feature (1574)..(1574): n is a, c, g, or t
  misc_feature (1583)..(1583): n is a, c, g, or t
  misc_feature (1585)..(1585): n is a, c, g, or t
  misc_feature (1598)..(1598): n is a, c, g, or t
  misc_feature (1600)..(1602): n is a, c, g, or t
  misc_feature (1616)..(1616): n is a, c, g, or t
  misc_feature (1618)..(1618): n is a, c, g, or t
  misc_feature (1622)..(1622): n is a, c, g, or t
  misc_feature (1633)..(1633): n is a, c, g, or t
  misc_feature (1638)..(1638): n is a, c, g, or t

SEQ ID NO: 383765 - DNA, 771 bp, Homo Sapiens; identical to SEQ ID NO: 351811
  misc_feature (98)..(157): n is a, c, g, or t

SEQ ID NO: 383766 - DNA, 1358 bp, Homo Sapiens; identical to SEQ ID NO: 351812

SEQ ID NO: 383767 - DNA, 1563 bp, Homo Sapiens; identical to SEQ ID NO: 351814
  misc_feature (58)..(94): n is a, c, g, or t

SEQ ID NO: 383768 - DNA, 752 bp, Homo Sapiens; identical to SEQ ID NO: 351815

SEQ ID NO: 383769 - DNA, 1887 bp, Homo Sapiens; identical to SEQ ID NO: 351816
  misc_feature (1692)..(1700): n is a, c, g, or t

SEQ ID NO: 383770 - DNA, 473 bp, Homo Sapiens; identical to SEQ ID NO: 351817
  misc_feature (43)..(43): n is a, c, g, or t

SEQ ID NO: 383771 - DNA, 2383 bp, Homo Sapiens; identical to SEQ ID NO: 351819
  misc_feature (1802)..(1956): n is a, c, g, or t
  misc_feature (1964)..(1980): n is a, c, g, or t
  misc_feature (2005)..(2014): n is a, c, g, or t
  misc_feature (2052)..(2173): n is a, c, g, or t
  misc_feature (2199)..(2209): n is a, c, g, or t

SEQ ID NO: 383772 - DNA, 953 bp, Homo Sapiens; identical to SEQ ID NO: 351820

SEQ ID NO: 383773 - DNA, 481 bp, Homo Sapiens; identical to SEQ ID NO: 351821
  misc_feature (23)..(23): n is a, c, g, or t
  misc_feature (35)..(35): n is a, c, g, or t
  misc_feature (52)..(52): n is a, c, g, or t
  misc_feature (89)..(89): n is a, c, g, or t
  misc_feature (100)..(100): n is a, c, g, or t

SEQ ID NO: 383774 - DNA, 525 bp, Homo Sapiens; identical to SEQ ID NO: 351822
  misc_feature (16)..(16): n is a, c, g, or t
  misc_feature (38)..(38): n is a, c, g, or t
  misc_feature (57)..(57): n is a, c, g, or t
  misc_feature (459)..(459): n is a, c, g, or t
  misc_feature (461)..(461): n is a, c, g, or t

SEQ ID NO: 383775 - DNA, 2657 bp, Homo Sapiens; identical to SEQ ID NO: 351828
  misc_feature (2011)..(2078): n is a, c, g, or t
  misc_feature (2357)..(2365): n is a, c, g, or t
  misc_feature (2434)..(2434): n is a, c, g, or t
  misc_feature (2460)..(2480): n is a, c, g, or t

SEQ ID NO: 383776 - DNA, 1080 bp, Homo Sapiens; identical to SEQ ID NO: 351829

SEQ ID NO: 383777 - DNA, 1289 bp, Homo Sapiens; identical to SEQ ID NO: 351835
  misc_feature (349)..(349): n is a, c, g, or t
  misc_feature (476)..(476): n is a, c, g, or t
  misc_feature (1214)..(1214): n is a, c, g, or t
  misc_feature (1254)..(1254): n is a, c, g, or t

SEQ ID NO: 383778 - DNA, 407 bp, Homo Sapiens; identical to SEQ ID NO: 351836

SEQ ID NO: 383779 - DNA, 461 bp, Homo Sapiens; identical to SEQ ID NO: 351839

SEQ ID NO: 383780 - DNA, 2021 bp, Homo Sapiens; identical to SEQ ID NO: 351840
  misc_feature (51)..(87): n is a, c, g, or t

SEQ ID NO: 383781 - DNA, 523 bp, Homo Sapiens; identical to SEQ ID NO: 351841
  misc_feature (41)..(41): n is a, c, g, or t
  misc_feature (468)..(468): n is a, c, g, or t

SEQ ID NO: 383782 - DNA, 700 bp, Homo Sapiens; identical to SEQ ID NO: 351846
  misc_feature (388)..(457): n is a, c, g, or t

SEQ ID NO: 383783 - DNA, 491 bp, Homo Sapiens; identical to SEQ ID NO: 351847
  misc_feature (24)..(24): n is a, c, g, or t
  misc_feature (250)..(310): n is a, c, g, or t

SEQ ID NO: 383784 - DNA, 1027 bp, Homo Sapiens; identical to SEQ ID NO: 351853
  misc_feature (7)..(7): n is a, c, g, or t
  misc_feature (13)..(13): n is a, c, g, or t
  misc_feature (15)..(15): n is a, c, g, or t
  misc_feature (17)..(17): n is a, c, g, or t
  misc_feature (20)..(21): n is a, c, g, or t
  misc_feature (27)..(27): n is a, c, g, or t
  misc_feature (29)..(29): n is a, c, g, or t
  misc_feature (31)..(32): n is a, c, g, or t
  misc_feature (42)..(43): n is a, c, g, or t
  misc_feature (45)..(45): n is a, c, g, or t
  misc_feature (49)..(50): n is a, c, g, or t
  misc_feature (59)..(59): n is a, c, g, or t
  misc_feature (63)..(63): n is a, c, g, or t
  misc_feature (70)..(70): n is a, c, g, or t
  misc_feature (75)..(76): n is a, c, g, or t
  misc_feature (87)..(87): n is a, c, g, or t
  misc_feature (97)..(97): n is a, c, g, or t
  misc_feature (104)..(105): n is a, c, g, or t
  misc_feature (110)..(110): n is a, c, g, or t
  misc_feature (115)..(115): n is a, c, g, or t
  misc_feature (117)..(118): n is a, c, g, or t
  misc_feature (127)..(127): n is a, c, g, or t
  misc_feature (134)..(134): n is a, c, g, or t
  misc_feature (137)..(137): n is a, c, g, or t
  misc_feature (150)..(150): n is a, c, g, or t
  misc_feature (152)..(152): n is a, c, g, or t
  misc_feature (167)..(167): n is a, c, g, or t
  misc_feature (193)..(193): n is a, c, g, or t
  misc_feature (210)..(210): n is a, c, g, or t

SEQ ID NO: 383785 - DNA, 2810 bp, Homo Sapiens; identical to SEQ ID NO: 351854
  misc_feature (264)..(315): n is a, c, g, or t
  misc_feature (2061)..(2079): n is a, c, g, or t

SEQ ID NO: 383786 - DNA, 1048 bp, Homo Sapiens; identical to SEQ ID NO: 351855
  misc_feature (691)..(724): n is a, c, g, or t
  misc_feature (754)..(754): n is a, c, g, or t
  misc_feature (928)..(937): n is a, c, g, or t

SEQ ID NO: 383787 - DNA, 319 bp, Homo Sapiens; identical to SEQ ID NO: 351856

SEQ ID NO: 383788 - DNA, 1127 bp, Homo Sapiens; identical to SEQ ID NO: 351858
  misc_feature (13)..(13): n is a, c, g, or t
  misc_feature (23)..(23): n is a, c, g, or t
  misc_feature (31)..(31): n is a, c, g, or t

SEQ ID NO: 383789 - DNA, 1385 bp, Homo Sapiens; identical to SEQ ID NO: 351859
  misc_feature (112)..(156): n is a, c, g, or t
  misc_feature (258)..(261): n is a, c, g, or t
  misc_feature (278)..(282): n is a, c, g, or t
  misc_feature (284)..(284): n is a, c, g, or t
  misc_feature (288)..(289): n is a, c, g, or t
  misc_feature (302)..(302): n is a, c, g, or t
  misc_feature (304)..(321): n is a, c, g, or t
  misc_feature (409)..(409): n is a, c, g, or t
  misc_feature (418)..(419): n is a, c, g, or t
  misc_feature (438)..(438): n is a, c, g, or t
  misc_feature (497)..(498): n is a, c, g, or t
  misc_feature (503)..(505): n is a, c, g, or t
  misc_feature (516)..(521): n is a, c, g, or t
  misc_feature (1234)..(1234): n is a, c, g, or t
  misc_feature (1244)..(1244): n is a, c, g, or t
  misc_feature (1250)..(1250): n is a, c, g, or t
  misc_feature (1261)..(1261): n is a, c, g, or t
  misc_feature (1293)..(1294): n is a, c, g, or t
  misc_feature (1308)..(1308): n is a, c, g, or t
  misc_feature (1312)..(1312): n is a, c, g, or t
  misc_feature (1330)..(1330): n is a, c, g, or t
  misc_feature (1333)..(1333): n is a, c, g, or t
  misc_feature (1336)..(1336): n is a, c, g, or t
  misc_feature (1365)..(1365): n is a, c, g, or t

SEQ ID NO: 383790 - DNA, 414 bp, Homo Sapiens; identical to SEQ ID NO: 351864
  misc_feature (342)..(342): n is a, c, g, or t

SEQ ID NO: 383791 - DNA, 1380 bp, Homo Sapiens; identical to SEQ ID NO: 351865
  misc_feature (524)..(524): n is a, c, g, or t

SEQ ID NO: 383792 - DNA, 2222 bp, Homo Sapiens; identical to SEQ ID NO: 351867
  misc_feature (61)..(61): n is a, c, g, or t
  misc_feature (158)..(199): n is a, c, g, or t
  misc_feature (1847)..(1864): n is a, c, g, or t
  misc_feature (1887)..(2117): n is a, c, g, or t

SEQ ID NO: 383793 - DNA, 1350 bp, Homo Sapiens; identical to SEQ ID NO: 351868
  misc_feature (444)..(461): n is a, c, g, or t
  misc_feature (484)..(717): n is a, c, g, or t

SEQ ID NO: 383794 - DNA, 2442 bp, Homo Sapiens; identical to SEQ ID NO: 351873

SEQ ID NO: 383795 - DNA, 459 bp, Homo Sapiens; identical to SEQ ID NO: 351874
  misc_feature (24)..(24): n is a, c, g, or t

SEQ ID NO: 383796 - DNA, 1052 bp, Homo Sapiens; identical to SEQ ID NO: 351881
  misc_feature (960)..(960): n is a, c, g, or t
  misc_feature (998)..(998): n is a, c, g, or t
  misc_feature (1006)..(1006): n is a, c, g, or t
  misc_feature (1037)..(1037): n is a, c, g, or t
  misc_feature (1040)..(1040): n is a, c, g, or t
  misc_feature (1044)..(1044): n is a, c, g, or t

SEQ ID NO: 383797 - DNA, 1260 bp, Homo Sapiens; identical to SEQ ID NO: 351882

SEQ ID NO: 383798 - DNA, 1385 bp, Homo Sapiens; identical to SEQ ID NO: 351886

SEQ ID NO: 383799 - DNA, 814 bp, Homo Sapiens; identical to SEQ ID NO: 351887
  misc_feature (49)..(49): n is a, c, g, or t
  misc_feature (125)..(125): n is a, c, g, or t
  misc_feature (573)..(573): n is a, c, g, or t

SEQ ID NO: 383800 - DNA, 1162 bp, Homo Sapiens; identical to SEQ ID NO: 351888

SEQ ID NO: 383801 - DNA, 893 bp, Homo Sapiens; identical to SEQ ID NO: 351889

SEQ ID NO: 383802 - DNA, 548 bp, Homo Sapiens; identical to SEQ ID NO: 351890

SEQ ID NO: 383803 - DNA, 1017 bp, Homo Sapiens; identical to SEQ ID NO: 351897
  misc_feature (529)..(565): n is a, c, g, or t
  misc_feature (903)..(903): n is a, c, g, or t
  misc_feature (909)..(911): n is a, c, g, or t
  misc_feature (939)..(939): n is a, c, g, or t
  misc_feature (956)..(956): n is a, c, g, or t
  misc_feature (960)..(960): n is a, c, g, or t
  misc_feature (964)..(964): n is a, c, g, or t
  misc_feature (968)..(968): n is a, c, g, or t
  misc_feature (975)..(975): n is a, c, g, or t
  misc_feature (983)..(983): n is a, c, g, or t
  misc_feature (993)..(993): n is a, c, g, or t
  misc_feature (996)..(996): n is a, c, g, or t
  misc_feature (1002)..(1002): n is a, c, g, or t
  misc_feature (1009)..(1009): n is a, c, g, or t
  misc_feature (1014)..(1014): n is a, c, g, or t

SEQ ID NO: 383804 - DNA, 939 bp, Homo Sapiens; identical to SEQ ID NO: 351898
  misc_feature (10)..(10): n is a, c, g, or t
  misc_feature (12)..(12): n is a, c, g, or t
  misc_feature (16)..(16): n is a, c, g, or t
  misc_feature (24)..(24): n is a, c, g, or t
  misc_feature (33)..(33): n is a, c, g, or t
  misc_feature (47)..(47): n is a, c, g, or t
  misc_feature (74)..(74): n is a, c, g, or t
  misc_feature (80)..(80): n is a, c, g, or t
  misc_feature (86)..(86): n is a, c, g, or t
  misc_feature (96)..(96): n is a, c, g, or t
  misc_feature (106)..(106): n is a, c, g, or t
  misc_feature (113)..(113): n is a, c, g, or t
  misc_feature (116)..(116): n is a, c, g, or t
  misc_feature (121)..(121): n is a, c, g, or t
  misc_feature (124)..(124): n is a, c, g, or t
  misc_feature (130)..(130): n is a, c, g, or t
  misc_feature (143)..(143): n is a, c, g, or t
  misc_feature (151)..(151): n is a, c, g, or t
  misc_feature (175)..(175): n is a, c, g, or t
  misc_feature (177)..(177): n is a, c, g, or t
  misc_feature (182)..(183): n is a, c, g, or t
  misc_feature (185)..(185): n is a, c, g, or t
  misc_feature (188)..(188): n is a, c, g, or t
  misc_feature (199)..(200): n is a, c, g, or t
  misc_feature (208)..(209): n is a, c, g, or t
  misc_feature (211)..(213): n is a, c, g, or t
  misc_feature (215)..(215): n is a, c, g, or t
  misc_feature (219)..(221): n is a, c, g, or t
  misc_feature (224)..(224): n is a, c, g, or t
  misc_feature (236)..(236): n is a, c, g, or t

SEQ ID NO: 383805 - DNA, 1629 bp, Homo Sapiens; identical to SEQ ID NO: 351899
  misc_feature (1001)..(1001): n is a, c, g, or t
  misc_feature (1008)..(1008): n is a, c, g, or t
  misc_feature (1060)..(1301): n is a, c, g, or t
  misc_feature (1531)..(1532): n is a, c, g, or t
  misc_feature (1538)..(1538): n is a, c, g, or t
  misc_feature (1540)..(1541): n is a, c, g, or t
  misc_feature (1546)..(1546): n is a, c, g, or t
  misc_feature (1560)..(1560): n is a, c, g, or t
  misc_feature (1568)..(1569): n is a, c, g, or t
  misc_feature (1572)..(1572): n is a, c, g, or t
  misc_feature (1575)..(1575): n is a, c, g, or t
  misc_feature (1580)..(1581): n is a, c, g, or t
  misc_feature (1587)..(1587): n is a, c, g, or t
  misc_feature (1589)..(1590): n is a, c, g, or t
  misc_feature (1598)..(1598): n is a, c, g, or t
  misc_feature (1600)..(1600): n is a, c, g, or t
  misc_feature (1604)..(1604): n is a, c, g, or t
  misc_feature (1608)..(1608): n is a, c, g, or t
  misc_feature (1610)..(1610): n is a, c, g, or t
  misc_feature (1613)..(1614): n is a, c, g, or t
  misc_feature (1620)..(1621): n is a, c, g, or t
  misc_feature (1624)..(1625): n is a, c, g, or t

SEQ ID NO: 383806 - DNA, 1708 bp, Homo Sapiens; identical to SEQ ID NO: 351900
  misc_feature (373)..(401): n is a, c, g, or t

SEQ ID NO: 383807 - DNA, 1083 bp, Homo Sapiens; identical to SEQ ID NO: 351901
  misc_feature (1)..(2): n is a, c, g, or t
  misc_feature (12)..(12): n is a, c, g, or t
  misc_feature (19)..(19): n is a, c, g, or t
  misc_feature (33)..(33): n is a, c, g, or t
  misc_feature (59)..(59): n is a, c, g, or t
  misc_feature (101)..(101): n is a, c, g, or t
  misc_feature (148)..(148): n is a, c, g, or t
  misc_feature (160)..(160): n is a, c, g, or t
  misc_feature (549)..(549): n is a, c, g, or t

SEQ ID NO: 383808 - DNA, 919 bp, Homo Sapiens; identical to SEQ ID NO: 351904

SEQ ID NO: 383809 - DNA, 840 bp, Homo Sapiens; identical to SEQ ID NO: 351905

SEQ ID NO: 383810 - DNA, 948 bp, Homo Sapiens; identical to SEQ ID NO: 351906
  misc_feature (65)..(193): n is a, c, g, or t
  misc_feature (195)..(223): n is a, c, g, or t
  misc_feature (863)..(899): n is a, c, g, or t
  misc_feature (913)..(913): n is a, c, g, or t

SEQ ID NO: 383811 - DNA, 652 bp, Homo Sapiens; identical to SEQ ID NO: 351907
  misc_feature (495)..(495): n is a, c, g, or t
  misc_feature (561)..(561): n is a, c, g, or t
  misc_feature (566)..(566): n is a, c, g, or t
  misc_feature (620)..(620): n is a, c, g, or t

SEQ ID NO: 383812 - DNA, 501 bp, Homo Sapiens; identical to SEQ ID NO: 351915
  misc_feature (30)..(30): n is a, c, g, or t
  misc_feature (79)..(79): n is a, c, g, or t
  misc_feature (234)..(295): n is a, c, g, or t
  misc_feature (447)..(447): n is a, c, g, or t
  misc_feature (490)..(490): n is a, c, g, or t

SEQ ID NO: 383813 - DNA, 495 bp, Homo Sapiens; identical to SEQ ID NO: 351916
  misc_feature (14)..(14): n is a, c, g, or t
  misc_feature (413)..(440): n is a, c, g, or t

SEQ ID NO: 383814 - DNA, 1284 bp, Homo Sapiens; identical to SEQ ID NO: 351918
  misc_feature (1219)..(1219): n is a, c, g, or t
  misc_feature (1234)..(1234): n is a, c, g, or t
  misc_feature (1246)..(1246): n is a, c, g, or t

SEQ ID NO: 383815 - DNA, 567 bp, Homo Sapiens; identical to SEQ ID NO: 351919
  misc_feature (143)..(143): n is a, c, g, or t
  misc_feature (159)..(159): n is a, c, g, or t
  misc_feature (161)..(161): n is a, c, g, or t
  misc_feature (548)..(548): n is a, c, g, or t

SEQ ID NO: 383816 - DNA, 1764 bp, Homo Sapiens; identical to SEQ ID NO: 351920

SEQ ID NO: 383817 - DNA, 1033 bp, Homo Sapiens; identical to SEQ ID NO: 351921
  misc_feature (120)..(120): n is a, c, g, or t
  misc_feature (137)..(137): n is a, c, g, or t

SEQ ID NO: 383818 - DNA, 1452 bp, Homo Sapiens; identical to SEQ ID NO: 351927

SEQ ID NO: 383819 - DNA, 1056 bp, Homo Sapiens; identical to SEQ ID NO: 351928

SEQ ID NO: 383820 - DNA, 830 bp, Homo Sapiens; identical to SEQ ID NO: 351930
  misc_feature (680)..(680): n is a, c, g, or t
  misc_feature (751)..(751): n is a, c, g, or t
  misc_feature (808)..(808): n is a, c, g, or t

SEQ ID NO: 383821 - DNA, 342 bp, Homo Sapiens; identical to SEQ ID NO: 351931
  misc_feature (22)..(22): n is a, c, g, or t
  misc_feature (103)..(103): n is a, c, g, or t
  misc_feature (112)..(112): n is a, c, g, or t

SEQ ID NO: 383822 - DNA, 588 bp, Homo Sapiens; identical to SEQ ID NO: 351932
  misc_feature (429)..(485): n is a, c, g, or t

SEQ ID NO: 383823 - DNA, 1429 bp, Homo Sapiens; identical to SEQ ID NO: 351933

SEQ ID NO: 383824 - DNA, 2185 bp, Homo Sapiens; identical to SEQ ID NO: 351934
  misc_feature (1865)..(2034): n is a, c, g, or t

SEQ ID NO: 383825 - DNA, 1029 bp, Homo Sapiens; identical to SEQ ID NO: 351935
  misc_feature (199)..(253): n is a, c, g, or t
  misc_feature (375)..(431): n is a, c, g, or t

SEQ ID NO: 383826 - DNA, 448 bp, Homo Sapiens; identical to SEQ ID NO: 351936

SEQ ID NO: 383827 - DNA, 308 bp, Homo Sapiens; identical to SEQ ID NO: 351937

SEQ ID NO: 383828 - DNA, 444 bp, Homo Sapiens; identical to SEQ ID NO: 351938
  misc_feature (56)..(56): n is a, c, g, or t
  misc_feature (142)..(201): n is a, c, g, or t
  misc_feature (225)..(252): n is a, c, g, or t

SEQ ID NO: 383829 - DNA, 305 bp, Homo Sapiens; identical to SEQ ID NO: 351943

SEQ ID NO: 383830 - DNA, 1442 bp, Homo Sapiens; identical to SEQ ID NO: 351944
  misc_feature (1373)..(1402): n is a, c, g, or t

SEQ ID NO: 383831 - DNA, 653 bp, Homo Sapiens; identical to SEQ ID NO: 351946

SEQ ID NO: 383832 - DNA, 2316 bp, Homo Sapiens; identical to SEQ ID NO: 351947
  misc_feature (47)..(47): n is a, c, g, or t
  misc_feature (189)..(189): n is a, c, g, or t
  misc_feature (465)..(465): n is a, c, g, or t

SEQ ID NO: 383833 - DNA, 354 bp, Homo Sapiens; identical to SEQ ID NO: 351948

SEQ ID NO: 383834 - DNA, 1225 bp, Homo Sapiens; identical to SEQ ID NO: 351952

SEQ ID NO: 383835 - DNA, 989 bp, Homo Sapiens; identical to SEQ ID NO: 351953
  misc_feature (832)..(832): n is a, c, g, or t

SEQ ID NO: 383836 - DNA, 2756 bp, Homo Sapiens; identical to SEQ ID NO: 351959
  misc_feature (68)..(126): n is a, c, g, or t
  misc_feature (2713)..(2714): n is a, c, g, or t

SEQ ID NO: 383837 - DNA, 445 bp, Homo Sapiens; identical to SEQ ID NO: 351960
  misc_feature (11)..(11): n is a, c, g, or t
  misc_feature (316)..(316): n is a, c, g, or t

SEQ ID NO: 383838 - DNA, 1164 bp, Homo Sapiens; identical to SEQ ID NO: 351964
  misc_feature (236)..(351): n is a, c, g, or t

SEQ ID NO: 383839 - DNA, 474 bp, Homo Sapiens; identical to SEQ ID NO: 351965
  misc_feature (23)..(23): n is a, c, g, or t
  misc_feature (76)..(76): n is a, c, g, or t
  misc_feature (114)..(114): n is a, c, g, or t

SEQ ID NO: 383840 - DNA, 1043 bp, Homo Sapiens; identical to SEQ ID NO: 351968
  misc_feature (854)..(854): n is a, c, g, or t
  misc_feature (858)..(858): n is a, c, g, or t
  misc_feature (876)..(876): n is a, c, g, or t
  misc_feature (893)..(893): n is a, c, g, or t
  misc_feature (903)..(903): n is a, c, g, or t
  misc_feature (919)..(919): n is a, c, g, or t
  misc_feature (933)..(934): n is a, c, g, or t
  misc_feature (961)..(961): n is a, c, g, or t
  misc_feature (975)..(975): n is a, c, g, or t
  misc_feature (1016)..(1016): n is a, c, g, or t
  misc_feature (1033)..(1033): n is a, c, g, or t

SEQ ID NO: 383841 - DNA, 1168 bp, Homo Sapiens; identical to SEQ ID NO: 351969

SEQ ID NO: 383842 - DNA, 824 bp, Homo Sapiens; identical to SEQ ID NO: 351970

SEQ ID NO: 383843 - DNA, 441 bp, Homo Sapiens; identical to SEQ ID NO: 351972
  misc_feature (12)..(12): n is a, c, g, or t

SEQ ID NO: 383844 - DNA, 1462 bp, Homo Sapiens; identical to SEQ ID NO: 351973

SEQ ID NO: 383845 - DNA, 1071 bp, Homo Sapiens; identical to SEQ ID NO: 351980

SEQ ID NO: 383846 - DNA, 1043 bp, Homo Sapiens; identical to SEQ ID NO: 351981

SEQ ID NO: 383847 - DNA, 1389 bp, Homo Sapiens; identical to SEQ ID NO: 351983

SEQ ID NO: 383848 - DNA, 1324 bp, Homo Sapiens; identical to SEQ ID NO: 351984
  misc_feature (27)..(27): n is a, c, g, or t
  misc_feature (35)..(35): n is a, c, g, or t
  misc_feature (106)..(106): n is a, c, g, or t
  misc_feature (128)..(128): n is a, c, g, or t
  misc_feature (138)..(138): n is a, c, g, or t

SEQ ID NO: 383849 - DNA, 462 bp, Homo Sapiens; identical to SEQ ID NO: 351985
  misc_feature (26)..(26): n is a, c, g, or t
  misc_feature (40)..(40): n is a, c, g, or t
  misc_feature (62)..(62): n is a, c, g, or t
  misc_feature (213)..(213): n is a, c, g, or t

SEQ ID NO: 383850 - DNA, 1035 bp, Homo Sapiens; identical to SEQ ID NO: 351989
  misc_feature (29)..(29): n is a, c, g, or t
  misc_feature (854)..(864): n is a, c, g, or t

SEQ ID NO: 383851 - DNA, 2001 bp, Homo Sapiens; identical to SEQ ID NO: 351990

SEQ ID NO: 383852 - DNA, 1329 bp, Homo Sapiens; identical to SEQ ID NO: 351993
  misc_feature (1078)..(1078): n is a, c, g, or t

SEQ ID NO: 383853 - DNA, 804 bp, Homo Sapiens; identical to SEQ ID NO: 351994

SEQ ID NO: 383854 - DNA, 1807 bp, Homo Sapiens; identical to SEQ ID NO: 351998
  misc_feature (1443)..(1443): n is a, c, g, or t
  misc_feature (1586)..(1586): n is a, c, g, or t
  misc_feature (1636)..(1636): n is a, c, g, or t
  misc_feature (1667)..(1667): n is a, c, g, or t
  misc_feature (1684)..(1684): n is a, c, g, or t
  misc_feature (1687)..(1688): n is a, c, g, or t
  misc_feature (1690)..(1690): n is a, c, g, or t
  misc_feature (1693)..(1693): n is a, c, g, or t
  misc_feature (1704)..(1704): n is a, c, g, or t
  misc_feature (1711)..(1711): n is a, c, g, or t
  misc_feature (1725)..(1725): n is a, c, g, or t
  misc_feature (1739)..(1739): n is a, c, g, or t
  misc_feature (1746)..(1746): n is a, c, g, or t
  misc_feature (1780)..(1780): n is a, c, g, or t
  misc_feature (1790)..(1790): n is a, c, g, or t
  misc_feature (1793)..(1793): n is a, c, g, or t
  misc_feature (1802)..(1802): n is a, c, g, or t

SEQ ID NO: 383855 - DNA, 1185 bp, Homo Sapiens; identical to SEQ ID NO: 351999
  misc_feature (1058)..(1121): n is a, c, g, or t
  misc_feature (1123)..(1123): n is a, c, g, or t
  misc_feature (1127)..(1127): n is a, c, g, or t

SEQ ID NO: 383856 - DNA, 954 bp, Homo Sapiens; identical to SEQ ID NO: 352000

SEQ ID NO: 383857 - DNA, 1188 bp, Homo Sapiens; identical to SEQ ID NO: 352003
  misc_feature (807)..(807): n is a, c, g, or t
  misc_feature (901)..(901): n is a, c, g, or t
  misc_feature (990)..(990): n is a, c, g, or t

SEQ ID NO: 383858 - DNA, 895 bp, Homo Sapiens; identical to SEQ ID NO: 352004
  misc_feature (795)..(795): n is a, c, g, or t
  misc_feature (813)..(813): n is a, c, g, or t
  misc_feature (818)..(818): n is a, c, g, or t
  misc_feature (840)..(840): n is a, c, g, or t

SEQ ID NO: 383859 - DNA, 743 bp, Homo Sapiens; identical to SEQ ID NO: 352005

SEQ ID NO: 383860 - DNA, 1766 bp, Homo Sapiens; identical to SEQ ID NO: 352006
  misc_feature (19)..(19): n is a, c, g, or t
  misc_feature (48)..(48): n is a, c, g, or t
  misc_feature (136)..(136): n is a, c, g, or t
  misc_feature (164)..(165): n is a, c, g, or t
  misc_feature (458)..(466): n is a, c, g, or t
  misc_feature (485)..(495): n is a, c, g, or t

SEQ ID NO: 383861 - DNA, 2147 bp, Homo Sapiens; identical to SEQ ID NO: 352010

SEQ ID NO: 383862 - DNA, 972 bp, Homo Sapiens; identical to SEQ ID NO: 352011

SEQ ID NO: 383863 - DNA, 892 bp, Homo Sapiens; identical to SEQ ID NO: 352013
  misc_feature (18)..(18): n is a, c, g, or t
  misc_feature (57)..(57): n is a, c, g, or t

SEQ ID NO: 383864 - DNA, 1366 bp, Homo Sapiens; identical to SEQ ID NO: 352014
  misc_feature (1076)..(1076): n is a, c, g, or t

SEQ ID NO: 383865 - DNA, 2631 bp, Homo Sapiens; identical to SEQ ID NO: 352017
  misc_feature (19)..(19): n is a, c, g, or t
  misc_feature (32)..(32): n is a, c, g, or t
  misc_feature (1935)..(1935): n is a, c, g, or t
  misc_feature (1975)..(1975): n is a, c, g, or t
  misc_feature (1981)..(1981): n is a, c, g, or t
  misc_feature (2297)..(2297): n is a, c, g, or t

SEQ ID NO: 383866 - DNA, 1207 bp, Homo Sapiens; identical to SEQ ID NO: 352018
  misc_feature (49)..(49): n is a, c, g, or t
  misc_feature (56)..(56): n is a, c, g, or t
  misc_feature (92)..(92): n is a, c, g, or t
  misc_feature (115)..(115): n is a, c, g, or t
  misc_feature (150)..(150): n is a, c, g, or t
  misc_feature (157)..(157): n is a, c, g, or t
  misc_feature (211)..(239): n is a, c, g, or t
  misc_feature (288)..(288): n is a, c, g, or t
  misc_feature (296)..(296): n is a, c, g, or t
  misc_feature (319)..(319): n is a, c, g, or t
  misc_feature (328)..(328): n is a, c, g, or t
  misc_feature (410)..(410): n is a, c, g, or t
  misc_feature (412)..(412): n is a, c, g, or t
  misc_feature (414)..(414): n is a, c, g, or t
  misc_feature (421)..(421): n is a, c, g, or t
  misc_feature (428)..(428): n is a, c, g, or t
  misc_feature (451)..(451): n is a, c, g, or t
  misc_feature (483)..(483): n is a, c, g, or t
  misc_feature (516)..(516): n is a, c, g, or t
  misc_feature (531)..(531): n is a, c, g, or t
  misc_feature (1085)..(1086): n is a, c, g, or t
  misc_feature (1088)..(1088): n is a, c, g, or t
  misc_feature (1098)..(1098): n is a, c, g, or t
  misc_feature (1108)..(1108): n is a, c, g, or t
  misc_feature (1123)..(1123): n is a, c, g, or t
  misc_feature (1125)..(1125): n is a, c, g, or t
  misc_feature (1131)..(1131): n is a, c, g, or t
  misc_feature (1140)..(1141): n is a, c, g, or t
  misc_feature (1152)..(1152): n is a, c, g, or t
  misc_feature (1154)..(1154): n is a, c, g, or t
  misc_feature (1159)..(1159): n is a, c, g, or t
  misc_feature (1161)..(1161): n is a, c, g, or t
  misc_feature (1165)..(1165): n is a, c, g, or t
  misc_feature (1167)..(1167): n is a, c, g, or t
  misc_feature (1178)..(1178): n is a, c, g, or t
  misc_feature (1189)..(1189): n is a, c, g, or t
  misc_feature (1200)..(1200): n is a, c, g, or t
  misc_feature (1204)..(1204): n is a, c, g, or t

SEQ ID NO: 383867 - DNA, 713 bp, Homo Sapiens; identical to SEQ ID NO: 352019

SEQ ID NO: 383868 - DNA, 1033 bp, Homo Sapiens; identical to SEQ ID NO: 352020
  misc_feature (990)..(990): n is a, c, g, or t

SEQ ID NO: 383869 - DNA, 458 bp, Homo Sapiens; identical to SEQ ID NO: 352021
  misc_feature (316)..(316): n is a, c, g, or t
  misc_feature (351)..(351): n is a, c, g, or t
  misc_feature (372)..(372): n is a, c, g, or t
  misc_feature (436)..(436): n is a, c, g, or t

SEQ ID NO: 383870 - DNA, 1734 bp, Homo Sapiens; identical to SEQ ID NO: 352024

SEQ ID NO: 383871 - DNA, 413 bp, Homo Sapiens; identical to SEQ ID NO: 352025
  misc_feature (17)..(17): n is a, c, g, or t

SEQ ID NO: 383872 - DNA, 1278 bp, Homo Sapiens; identical to SEQ ID NO: 352027
  misc_feature (1157)..(1165): n is a, c, g, or t

SEQ ID NO: 383873 - DNA, 300 bp, Homo Sapiens; identical to SEQ ID NO: 352028
  misc_feature (180)..(180): n is a, c, g, or t
  misc_feature (223)..(223): n is a, c, g, or t

SEQ ID NO: 383874 - DNA, 882 bp, Homo Sapiens; identical to SEQ ID NO: 352030
  misc_feature (446)..(446): n is a, c, g, or t
  misc_feature (618)..(618): n is a, c, g, or t
  misc_feature (829)..(829): n is a, c, g, or t
  misc_feature (847)..(847): n is a, c, g, or t
  misc_feature (879)..(879): n is a, c, g, or t

SEQ ID NO: 383875 - DNA, 986 bp, Homo Sapiens; identical to SEQ ID NO: 352031
  misc_feature (16)..(16): n is a, c, g, or t
  misc_feature (28)..(28): n is a, c, g, or t

SEQ ID NO: 383876 - DNA, 1665 bp, Homo Sapiens; identical to SEQ ID NO: 352037

SEQ ID NO: 383877 - DNA, 3207 bp, Homo Sapiens; identical to SEQ ID NO: 352038
  misc_feature (3102)..(3102): n is a, c, g, or t
  misc_feature (3174)..(3174): n is a, c, g, or t
  misc_feature (3180)..(3180): n is a, c, g, or t
  misc_feature (3189)..(3189): n is a, c, g, or t

SEQ ID NO: 383878 - DNA, 1142 bp, Homo Sapiens; identical to SEQ ID NO: 352039

SEQ ID NO: 383879 - DNA, 2284 bp, Homo Sapiens; identical to SEQ ID NO: 352040
  misc_feature (1984)..(2031): n is a, c, g, or t

SEQ ID NO: 383880 - DNA, 412 bp, Homo Sapiens; identical to SEQ ID NO: 352041
  misc_feature (113)..(160): n is a, c, g, or t

SEQ ID NO: 383881 - DNA, 405 bp, Homo Sapiens; identical to SEQ ID NO: 352042
  misc_feature (107)..(154): n is a, c, g, or t

SEQ ID NO: 383882 - DNA, 399 bp, Homo Sapiens; identical to SEQ ID NO: 352043
  misc_feature (247)..(294): n is a, c, g, or t

SEQ ID NO: 383883 - DNA, 556 bp, Homo Sapiens; identical to SEQ ID NO: 352044
  misc_feature (254)..(301): n is a, c, g, or t

SEQ ID NO: 383884 - DNA, 414 bp, Homo Sapiens; identical to SEQ ID NO: 352045

SEQ ID NO: 383885 - DNA, 460 bp, Homo Sapiens; identical to SEQ ID NO: 352046
  misc_feature (273)..(304): n is a, c, g, or t
  misc_feature (360)..(360): n is a, c, g, or t
  misc_feature (379)..(379): n is a, c, g, or t
  misc_feature (432)..(432): n is a, c, g, or t
  misc_feature (443)..(443): n is a, c, g, or t

SEQ ID NO: 383886 - DNA, 917 bp, Homo Sapiens; identical to SEQ ID NO: 352050
  misc_feature (72)..(72): n is a, c, g, or t
  misc_feature (110)..(110): n is a, c, g, or t

SEQ ID NO: 383887 - DNA, 866 bp, Homo Sapiens; identical to SEQ ID NO: 352051

SEQ ID NO: 383888 - DNA, 1243 bp, Homo Sapiens; identical to SEQ ID NO: 352052

SEQ ID NO: 383889 - DNA, 599 bp, Homo Sapiens; identical to SEQ ID NO: 352053

SEQ ID NO: 383890 - DNA, 3222 bp, Homo Sapiens; identical to SEQ ID NO: 352059
  misc_feature (166)..(230): n is a, c, g, or t
  misc_feature (1073)..(1090): n is a, c, g, or t

SEQ ID NO: 383891 - DNA, 1046 bp, Homo Sapiens; identical to SEQ ID NO: 352060
  misc_feature (816)..(816): n is a, c, g, or t
  misc_feature (983)..(983): n is a, c, g, or t

SEQ ID NO: 383892 - DNA, 1109 bp, Homo Sapiens; identical to SEQ ID NO: 352064
  misc_feature (107)..(107): n is a, c, g, or t
  misc_feature (146)..(146): n is a, c, g, or t
  misc_feature (173)..(173): n is a, c, g, or t
  misc_feature (872)..(873): n is a, c, g, or t
  misc_feature (877)..(972): n is a, c, g, or t
  misc_feature (1094)..(1094): n is a, c, g, or t

SEQ ID NO: 383893 - DNA, 1632 bp, Homo Sapiens; identical to SEQ ID NO: 352065
  misc_feature (420)..(496): n is a, c, g, or t
  misc_feature (960)..(960): n is a, c, g, or t
  misc_feature (986)..(986): n is a, c, g, or t
  misc_feature (997)..(997): n is a, c, g, or t
  misc_feature (1000)..(1000): n is a, c, g, or t
  misc_feature (1018)..(1018): n is a, c, g, or t
  misc_feature (1049)..(1049): n is a, c, g, or t
  misc_feature (1165)..(1165): n is a, c, g, or t
  misc_feature (1179)..(1179): n is a, c, g, or t
  misc_feature (1182)..(1182): n is a, c, g, or t
  misc_feature (1184)..(1184): n is a, c, g, or t
  misc_feature (1202)..(1202): n is a, c, g, or t
  misc_feature (1216)..(1216): n is a, c, g, or t
  misc_feature (1238)..(1275): n is a, c, g, or t
  misc_feature (1280)..(1280): n is a, c, g, or t
  misc_feature (1288)..(1288): n is a, c, g, or t
  misc_feature (1294)..(1294): n is a, c, g, or t
  misc_feature (1301)..(1301): n is a, c, g, or t
  misc_feature (1314)..(1314): n is a, c, g, or t
  misc_feature (1336)..(1336): n is a, c, g, or t
  misc_feature (1344)..(1344): n is a, c, g, or t
  misc_feature (1350)..(1350): n is a, c, g, or t
  misc_feature (1355)..(1376): n is a, c, g, or t

SEQ ID NO: 383894 - DNA, 469 bp, Homo Sapiens; identical to SEQ ID NO: 352066

SEQ ID NO: 383895 - DNA, 682 bp, Homo Sapiens; identical to SEQ ID NO: 352067
  misc_feature (39)..(39): n is a, c, g, or t
  misc_feature (46)..(46): n is a, c, g, or t
  misc_feature (84)..(84): n is a, c, g, or t
  misc_feature (96)..(96): n is a, c, g, or t
  misc_feature (160)..(223): n is a, c, g, or t
  misc_feature (382)..(484): n is a, c, g, or t
  misc_feature (620)..(620): n is a, c, g, or t

SEQ ID NO: 383896 - DNA, 353 bp, Homo Sapiens; identical to SEQ ID NO: 352069
  misc_feature (29)..(29): n is a, c, g, or t

SEQ ID NO: 383897 - DNA, 1158 bp, Homo Sapiens; identical to SEQ ID NO: 352070

SEQ ID NO: 383898 - DNA, 794 bp, Homo Sapiens; identical to SEQ ID NO: 352074
  misc_feature (24)..(24): n is a, c, g, or t
  misc_feature (138)..(138): n is a, c, g, or t

SEQ ID NO: 383899 - DNA, 450 bp, Homo Sapiens; identical to SEQ ID NO: 352075

SEQ ID NO: 383900 - DNA, 917 bp, Homo Sapiens; identical to SEQ ID NO: 352076
  misc_feature (760)..(760): n is a, c, g, or t

SEQ ID NO: 383901 - DNA, 2068 bp, Homo Sapiens; identical to SEQ ID NO: 352084
  misc_feature (2052)..(2052): n is a, c, g, or t

SEQ ID NO: 383902 - DNA, 488 bp, Homo Sapiens; identical to SEQ ID NO: 352085
  misc_feature (16)..(16): n is a, c, g, or t
  misc_feature (74)..(74): n is a, c, g, or t
  misc_feature (83)..(83): n is a, c, g, or t
  misc_feature (102)..(102): n is a, c, g, or t

SEQ ID NO: 383903 - DNA, 1011 bp, Homo Sapiens; identical to SEQ ID NO: 352088
  misc_feature (12)..(12): n is a, c, g, or t
  misc_feature (21)..(21): n is a, c, g, or t
  misc_feature (53)..(53): n is a, c, g, or t
  misc_feature (201)..(315): n is a, c, g, or t

SEQ ID NO: 383904 - DNA, 480 bp, Homo Sapiens; identical to SEQ ID NO: 352089

SEQ ID NO: 383905 - DNA, 467 bp, Homo Sapiens; identical to SEQ ID NO: 352090
  misc_feature (379)..(379): n is a, c, g, or t
  misc_feature (439)..(439): n is a, c, g, or t
  misc_feature (451)..(451): n is a, c, g, or t

SEQ ID NO: 383906 - DNA, 470 bp, Homo Sapiens; identical to SEQ ID NO: 352091
  misc_feature (27)..(27): n is a, c, g, or t
  misc_feature (34)..(34): n is a, c, g, or t
  misc_feature (44)..(44): n is a, c, g, or t
  misc_feature (89)..(89): n is a, c, g, or t
  misc_feature (99)..(99): n is a, c, g, or t

SEQ ID NO: 383907 - DNA, 450 bp, Homo Sapiens; identical to SEQ ID NO: 352092

SEQ ID NO: 383908 - DNA, 956 bp, Homo Sapiens; identical to SEQ ID NO: 352094
  misc_feature (671)..(711): n is a, c, g, or t

SEQ ID NO: 383909 - DNA, 1121 bp, Homo Sapiens; identical to SEQ ID NO: 352095
  misc_feature (733)..(773): n is a, c, g, or t

SEQ ID NO: 383910 - DNA, 1044 bp, Homo Sapiens; identical to SEQ ID NO: 352096
  misc_feature (185)..(224): n is a, c, g, or t

SEQ ID NO: 383911 - DNA, 2478 bp, Homo Sapiens; identical to SEQ ID NO: 352097
  misc_feature (2365)..(2365): n is a, c, g, or t
  misc_feature (2427)..(2427): n is a, c, g, or t
  misc_feature (2432)..(2432): n is a, c, g, or t
  misc_feature (2437)..(2437): n is a, c, g, or t
  misc_feature (2459)..(2459): n is a, c, g, or t

SEQ ID NO: 383912 - DNA, 1636 bp, Homo Sapiens; identical to SEQ ID NO: 352098
  misc_feature (742)..(742): n is a, c, g, or t

SEQ ID NO: 383913 - DNA, 1740 bp, Homo Sapiens; identical to SEQ ID NO: 352106

SEQ ID NO: 383914 - DNA, 536 bp, Homo Sapiens; identical to SEQ ID NO: 352107

SEQ ID NO: 383915 - DNA, 486 bp, Homo Sapiens; identical to SEQ ID NO: 352108

SEQ ID NO: 383916 - DNA, 265 bp, Homo Sapiens; identical to SEQ ID NO: 352109
  misc_feature (249)..(249): n is a, c, g, or t

SEQ ID NO: 383917 - DNA, 810 bp, Homo Sapiens; identical to SEQ ID NO: 352110
  misc_feature (595)..(595): n is a, c, g, or t
  misc_feature (615)..(655): n is a, c, g, or t

SEQ ID NO: 383918 - DNA, 759 bp, Homo Sapiens; identical to SEQ ID NO: 352111
  misc_feature (458)..(500): n is a, c, g, or t
  misc_feature (736)..(736): n is a, c, g, or t

SEQ ID NO: 383919 - DNA, 2029 bp, Homo Sapiens; identical to SEQ ID NO: 352112
  misc_feature (93)..(129): n is a, c, g, or t

SEQ ID NO: 383920 - DNA, 1249 bp, Homo Sapiens; identical to SEQ ID NO: 352113
  misc_feature (992)..(992): n is a, c, g, or t

SEQ ID NO: 383921 - DNA, 867 bp, Homo Sapiens; identical to SEQ ID NO: 352114
  misc_feature (413)..(413): n is a, c, g, or t

SEQ ID NO: 383922 - DNA, 281 bp, Homo Sapiens; identical to SEQ ID NO: 352115

SEQ ID NO: 383923 - DNA, 411 bp, Homo Sapiens; identical to SEQ ID NO: 352127
  misc_feature (121)..(180): n is a, c, g, or t
  misc_feature (318)..(318): n is a, c, g, or t

SEQ ID NO: 383924 - DNA, 1960 bp, Homo Sapiens; identical to SEQ ID NO: 352128

SEQ ID NO: 383925 - DNA, 775 bp, Homo Sapiens; identical to SEQ ID NO: 352129

SEQ ID NO: 383926 - DNA, 1155 bp, Homo Sapiens; identical to SEQ ID NO: 352131

SEQ ID NO: 383927 - DNA, 430 bp, Homo Sapiens; identical to SEQ ID NO: 352132
  misc_feature (30)..(30): n is a, c, g, or t
  misc_feature (52)..(52): n is a, c, g, or t
  misc_feature (57)..(57): n is a, c, g, or t
  misc_feature (66)..(66): n is a, c, g, or t
  misc_feature (206)..(206): n is a, c, g, or t
  misc_feature (229)..(229): n is a, c, g, or t
  misc_feature (273)..(273): n is a, c, g, or t
  misc_feature (334)..(334): n is a, c, g, or t

SEQ ID NO: 383928 - DNA, 3131 bp, Homo Sapiens; identical to SEQ ID NO: 352134
  misc_feature (2957)..(2984): n is a, c, g, or t

SEQ ID NO: 383929 - DNA, 1046 bp, Homo Sapiens; identical to SEQ ID NO: 352135

SEQ ID NO: 383930 - DNA, 730 bp, Homo Sapiens; identical to SEQ ID NO: 352136

SEQ ID NO: 383931 - DNA, 663 bp, Homo Sapiens; identical to SEQ ID NO: 352137
  misc_feature (391)..(415): n is a, c, g, or t

SEQ ID NO: 383932 - DNA, 883 bp, Homo Sapiens; identical to SEQ ID NO: 352138

SEQ ID NO: 383933 - DNA, 985 bp, Homo Sapiens; identical to SEQ ID NO: 352139
  misc_feature (45)..(81): n is a, c, g, or t

SEQ ID NO: 383934 - DNA, 500 bp, Homo Sapiens; identical to SEQ ID NO: 352140

SEQ ID NO: 383935 - DNA, 764 bp, Homo Sapiens; identical to SEQ ID NO: 352143
  misc_feature (21)..(21): n is a, c, g, or t
  misc_feature (30)..(30): n is a, c, g, or t
  misc_feature (48)..(48): n is a, c, g, or t
  misc_feature (51)..(51): n is a, c, g, or t
  misc_feature (71)..(71): n is a, c, g, or t
  misc_feature (130)..(130): n is a, c, g, or t
  misc_feature (638)..(658): n is a, c, g, or t

SEQ ID NO: 383936 - DNA, 1704 bp, Homo Sapiens; identical to SEQ ID NO: 352144
  misc_feature (52)..(52): n is a, c, g, or t
  misc_feature (58)..(58): n is a, c, g, or t
  misc_feature (116)..(116): n is a, c, g, or t
  misc_feature (145)..(145): n is a, c, g, or t
  misc_feature (173)..(173): n is a, c, g, or t
  misc_feature (322)..(322): n is a, c, g, or t
  misc_feature (1434)..(1434): n is a, c, g, or t
  misc_feature (1437)..(1438): n is a, c, g, or t
  misc_feature (1454)..(1454): n is a, c, g, or t
  misc_feature (1457)..(1457): n is a, c, g, or t
  misc_feature (1459)..(1459): n is a, c, g, or t
  misc_feature (1477)..(1477): n is a, c, g, or t
  misc_feature (1560)..(1560): n is a, c, g, or t
  misc_feature (1585)..(1585): n is a, c, g, or t
  misc_feature (1588)..(1602): n is a, c, g, or t
  misc_feature (1639)..(1640): n is a, c, g, or t
  misc_feature (1643)..(1643): n is a, c, g, or t
  misc_feature (1667)..(1667): n is a, c, g, or t
  misc_feature (1686)..(1686): n is a, c, g, or t
  misc_feature (1702)..(1702): n is a, c, g, or t

SEQ ID NO: 383937 - DNA, 1573 bp, Homo Sapiens; identical to SEQ ID NO: 352145
  misc_feature (129)..(129): n is a, c, g, or t
  misc_feature (656)..(667): n is a, c, g, or t

SEQ ID NO: 383938 - DNA, 3013 bp, Homo Sapiens; identical to SEQ ID NO: 352146
  misc_feature (89)..(89): n is a, c, g, or t
  misc_feature (146)..(146): n is a, c, g, or t

SEQ ID NO: 383939 - DNA, 736 bp, Homo Sapiens; identical to SEQ ID NO: 352147
  misc_feature (98)..(98): n is a, c, g, or t
  misc_feature (105)..(105): n is a, c, g, or t
  misc_feature (663)..(682): n is a, c, g, or t

SEQ ID NO: 383940 - DNA, 727 bp, Homo Sapiens; identical to SEQ ID NO: 352148
  misc_feature (318)..(342): n is a, c, g, or t
  misc_feature (536)..(603): n is a, c, g, or t

SEQ ID NO: 383941 - DNA, 1630 bp, Homo Sapiens; identical to SEQ ID NO: 352149
  misc_feature (665)..(665): n is a, c, g, or t
  misc_feature (667)..(667): n is a, c, g, or t
  misc_feature (672)..(672): n is a, c, g, or t
  misc_feature (675)..(675): n is a, c, g, or t
  misc_feature (681)..(682): n is a, c, g, or t
  misc_feature (688)..(688): n is a, c, g, or t
  misc_feature (701)..(701): n is a, c, g, or t
  misc_feature (704)..(704): n is a, c, g, or t
  misc_feature (769)..(769): n is a, c, g, or t
  misc_feature (985)..(986): n is a, c, g, or t
  misc_feature (988)..(988): n is a, c, g, or t
  misc_feature (1006)..(1006): n is a, c, g, or t
  misc_feature (1021)..(1033): n is a, c, g, or t
  misc_feature (1035)..(1094): n is a, c, g, or t
  misc_feature (1282)..(1306): n is a, c, g, or t

SEQ ID NO: 383942 - DNA, 2368 bp, Homo Sapiens; identical to SEQ ID NO: 352150
  misc_feature (1947)..(1947): n is a, c, g, or t
  misc_feature (2170)..(2170): n is a, c, g, or t
  misc_feature (2315)..(2315): n is a, c, g, or t

SEQ ID NO: 383943 - DNA, 175 bp, Homo Sapiens; identical to SEQ ID NO: 352151

SEQ ID NO: 383944 - DNA, 1004 bp, Homo Sapiens; identical to SEQ ID NO: 352153
  misc_feature (62)..(62): n is a, c, g, or t
  misc_feature (752)..(752): n is a, c, g, or t
  misc_feature (917)..(953): n is a, c, g, or t

SEQ ID NO: 383945 - DNA, 989 bp, Homo Sapiens; identical to SEQ ID NO: 352154

SEQ ID NO: 383946 - DNA, 2249 bp, Homo Sapiens; identical to SEQ ID NO: 352162
  misc_feature (30)..(33): n is a, c, g, or t
  misc_feature (58)..(59): n is a, c, g, or t
  misc_feature (63)..(63): n is a, c, g, or t
  misc_feature (65)..(66): n is a, c, g, or t
  misc_feature (68)..(69): n is a, c, g, or t
  misc_feature (71)..(74): n is a, c, g, or t
  misc_feature (76)..(77): n is a, c, g, or t
  misc_feature (82)..(82): n is a, c, g, or t
  misc_feature (85)..(85): n is a, c, g, or t
  misc_feature (89)..(89): n is a, c, g, or t
  misc_feature (94)..(95): n is a, c, g, or t
  misc_feature (98)..(98): n is a, c, g, or t
  misc_feature (104)..(105): n is a, c, g, or t
  misc_feature (110)..(111): n is a, c, g, or t
  misc_feature (117)..(117): n is a, c, g, or t
  misc_feature (124)..(124): n is a, c, g, or t
  misc_feature (131)..(131): n is a, c, g, or t
  misc_feature (133)..(189): n is a, c, g, or t

SEQ ID NO: 383947 - DNA, 963 bp, Homo Sapiens; identical to SEQ ID NO: 352163

SEQ ID NO: 383948 - DNA, 1096 bp, Homo Sapiens; identical to SEQ ID NO: 98726
  misc_feature (90)..(131): n is a, c, g, or t
  misc_feature (146)..(202): n is a, c, g, or t
  misc_feature (892)..(892): n is a, c, g, or t

SEQ ID NO: 383949 - DNA, 700 bp, Homo Sapiens; identical to SEQ ID NO: 352165

SEQ ID NO: 383950 - DNA, 990 bp, Homo Sapiens; identical to SEQ ID NO: 352166
  misc_feature (15)..(15): n is a, c, g, or t
  misc_feature (757)..(758): n is a, c, g, or t
  misc_feature (760)..(761): n is a, c, g, or t
  misc_feature (764)..(764): n is a, c, g, or t
  misc_feature (918)..(918): n is a, c, g, or t
  misc_feature (966)..(966): n is a, c, g, or t
  misc_feature (974)..(974): n is a, c, g, or t
  misc_feature (983)..(983): n is a, c, g, or t
  misc_feature (985)..(985): n is a, c, g, or t

SEQ ID NO: 383951 - DNA, 1200 bp, Homo Sapiens; identical to SEQ ID NO: 352167
  misc_feature (976)..(1032): n is a, c, g, or t
  misc_feature (1104)..(1104): n is a, c, g, or t
  misc_feature (1126)..(1126): n is a, c, g, or t

SEQ ID NO: 383952 - DNA, 1122 bp, Homo Sapiens; identical to SEQ ID NO: 352169
  misc_feature (13)..(13): n is a, c, g, or t
  misc_feature (23)..(24): n is a, c, g, or t
  misc_feature (26)..(26): n is a, c, g, or t
  misc_feature (33)..(33): n is a, c, g, or t
  misc_feature (43)..(43): n is a, c, g, or t
  misc_feature (45)..(45): n is a, c, g, or t
  misc_feature (48)..(48): n is a, c, g, or t
  misc_feature (56)..(56): n is a, c, g, or t
  misc_feature (62)..(63): n is a, c, g, or t
  misc_feature (73)..(73): n is a, c, g, or t
  misc_feature (77)..(78): n is a, c, g, or t
  misc_feature (82)..(82): n is a, c, g, or t
  misc_feature (86)..(86): n is a, c, g, or t
  misc_feature (90)..(90): n is a, c, g, or t
  misc_feature (98)..(98): n is a, c, g, or t
  misc_feature (109)..(109): n is a, c, g, or t
  misc_feature (167)..(167): n is a, c, g, or t
  misc_feature (194)..(194): n is a, c, g, or t
  misc_feature (205)..(205): n is a, c, g, or t
  misc_feature (275)..(326): n is a, c, g, or t

SEQ ID NO: 383953 - DNA, 2579 bp, Homo Sapiens; identical to SEQ ID NO: 352170
  misc_feature (5)..(5): n is a, c, g, or t
  misc_feature (11)..(11): n is a, c, g, or t
  misc_feature (33)..(33): n is a, c, g, or t
  misc_feature (48)..(49): n is a, c, g, or t
  misc_feature (51)..(51): n is a, c, g, or t
  misc_feature (59)..(59): n is a, c, g, or t
  misc_feature (70)..(70): n is a, c, g, or t
  misc_feature (74)..(74): n is a, c, g, or t
  misc_feature (86)..(86): n is a, c, g, or t
  misc_feature (99)..(99): n is a, c, g, or t
  misc_feature (101)..(101): n is a, c, g, or t
  misc_feature (215)..(215): n is a, c, g, or t
  misc_feature (323)..(323): n is a, c, g, or t
  misc_feature (1337)..(1363): n is a, c, g, or t
  misc_feature (2501)..(2537): n is a, c, g, or t

SEQ ID NO: 383954 - DNA, 713 bp, Homo Sapiens; identical to SEQ ID NO: 352171

SEQ ID NO: 383955 - DNA, 1108 bp, Homo Sapiens; identical to SEQ ID NO: 352172
  misc_feature (967)..(967): n is a, c, g, or t
  misc_feature (983)..(983): n is a, c, g, or t
  misc_feature (990)..(990): n is a, c, g, or t
  misc_feature (992)..(992): n is a, c, g, or t
  misc_feature (996)..(996): n is a, c, g, or t
  misc_feature (999)..(999): n is a, c, g, or t
  misc_feature (1006)..(1007): n is a, c, g, or t
  misc_feature (1009)..(1009): n is a, c, g, or t
  misc_feature (1014)..(1015): n is a, c, g, or t
  misc_feature (1017)..(1017): n is a, c, g, or t
  misc_feature (1029)..(1029): n is a, c, g, or t
  misc_feature (1032)..(1032): n is a, c, g, or t
  misc_feature (1035)..(1035): n is a, c, g, or t
  misc_feature (1037)..(1037): n is a, c, g, or t
  misc_feature (1039)..(1040): n is a, c, g, or t
  misc_feature (1042)..(1042): n is a, c, g, or t
  misc_feature (1052)..(1053): n is a, c, g, or t
  misc_feature (1072)..(1073): n is a, c, g, or t
  misc_feature (1077)..(1077): n is a, c, g, or t
  misc_feature (1081)..(1081): n is a, c, g, or t
  misc_feature (1099)..(1099): n is a, c, g, or t
  misc_feature (1106)..(1107): n is a, c, g, or t

SEQ ID NO: 383956 - DNA, 1829 bp, Homo Sapiens; identical to SEQ ID NO: 352173
  misc_feature (1033)..(1033): n is a, c, g, or t
  misc_feature (1734)..(1772): n is a, c, g, or t

SEQ ID NO: 383957 - DNA, 1373 bp, Homo Sapiens; identical to SEQ ID NO: 352174
  misc_feature (44)..(44): n is a, c, g, or t
  misc_feature (118)..(118): n is a, c, g, or t
  misc_feature (124)..(124): n is a, c, g, or t
  misc_feature (150)..(150): n is a, c, g, or t
  misc_feature (873)..(873): n is a, c, g, or t
  misc_feature (1152)..(1201): n is a, c, g, or t

SEQ ID NO: 383958 - DNA, 677 bp, Homo Sapiens; identical to SEQ ID NO: 352175

SEQ ID NO: 383959 - DNA, 1903 bp, Homo Sapiens; identical to SEQ ID NO: 352177
  misc_feature (76)..(95): n is a, c, g, or t
  misc_feature (220)..(232): n is a, c, g, or t

SEQ ID NO: 383960 - DNA, 1063 bp, Homo Sapiens; identical to SEQ ID NO: 352178
  misc_feature (199)..(199): n is a, c, g, or t
  misc_feature (212)..(212): n is a, c, g, or t
  misc_feature (287)..(287): n is a, c, g, or t
  misc_feature (563)..(575): n is a, c, g, or t

SEQ ID NO: 383961 - DNA, 1781 bp, Homo Sapiens; identical to SEQ ID NO: 352179
  misc_feature (490)..(502): n is a, c, g, or t
  misc_feature (880)..(880): n is a, c, g, or t
  misc_feature (1409)..(1488): n is a, c, g, or t

SEQ ID NO: 383962 - DNA, 2007 bp, Homo Sapiens; identical to SEQ ID NO: 352180
  misc_feature (1034)..(1056): n is a, c, g, or t

SEQ ID NO: 383963 - DNA, 437 bp, Homo Sapiens; identical to SEQ ID NO: 352181
  misc_feature (224)..(224): n is a, c, g, or t
  misc_feature (334)..(335): n is a, c, g, or t
  misc_feature (382)..(382): n is a, c, g, or t
  misc_feature (391)..(391): n is a, c, g, or t

SEQ ID NO: 383964 - DNA, 1385 bp, Homo Sapiens; identical to SEQ ID NO: 352192
  misc_feature (1144)..(1144): n is a, c, g, or t
  misc_feature (1229)..(1229): n is a, c, g, or t
  misc_feature (1234)..(1234): n is a, c, g, or t
  misc_feature (1236)..(1249): n is a, c, g, or t
  misc_feature (1252)..(1255): n is a, c, g, or t
  misc_feature (1257)..(1257): n is a, c, g, or t
  misc_feature (1259)..(1261): n is a, c, g, or t
  misc_feature (1263)..(1263): n is a, c, g, or t
  misc_feature (1279)..(1279): n is a, c, g, or t
  misc_feature (1354)..(1354): n is a, c, g, or t
  misc_feature (1376)..(1376): n is a, c, g, or t
  misc_feature (1380)..(1380): n is a, c, g, or t

SEQ ID NO: 383965 - DNA, 1390 bp, Homo Sapiens; identical to SEQ ID NO: 352193
  misc_feature (431)..(434): n is a, c, g, or t
  misc_feature (492)..(492): n is a, c, g, or t
  misc_feature (524)..(524): n is a, c, g, or t
  misc_feature (527)..(527): n is a, c, g, or t
  misc_feature (565)..(565): n is a, c, g, or t
  misc_feature (668)..(668): n is a, c, g, or t
  misc_feature (701)..(701): n is a, c, g, or t

SEQ ID NO: 383966 - DNA, 1116 bp, Homo Sapiens; identical to SEQ ID NO: 352196

SEQ ID NO: 383967 - DNA, 2822 bp, Homo Sapiens; identical to SEQ ID NO: 352197

SEQ ID NO: 383968 - DNA, 753 bp, Homo Sapiens; identical to SEQ ID NO: 352198

SEQ ID NO: 383969 - DNA, 2107 bp, Homo Sapiens; identical to SEQ ID NO: 352199
  misc_feature (42)..(78): n is a, c, g, or t

SEQ ID NO: 383970 - DNA, 917 bp, Homo Sapiens; identical to SEQ ID NO: 352200

SEQ ID NO: 383971 - DNA, 452 bp, Homo Sapiens; identical to SEQ ID NO: 352201

SEQ ID NO: 383972 - DNA, 1619 bp, Homo Sapiens; identical to SEQ ID NO: 352202

SEQ ID NO: 383973 - DNA, 554 bp, Homo Sapiens; identical to SEQ ID NO: 352203

SEQ ID NO: 383974 - DNA, 729 bp, Homo Sapiens; identical to SEQ ID NO: 352204

SEQ ID NO: 383975 - DNA, 1089 bp, Homo Sapiens; identical to SEQ ID NO: 352209
  misc_feature (39)..(39): n is a, c, g, or t
  misc_feature (41)..(41): n is a, c, g, or t

SEQ ID NO: 383976 - DNA, 839 bp, Homo Sapiens; identical to SEQ ID NO: 352210

SEQ ID NO: 383977 - DNA, 1314 bp, Homo Sapiens; identical to SEQ ID NO: 352211
  misc_feature (110)..(164): n is a, c, g, or t
  misc_feature (683)..(739): n is a, c, g, or t

SEQ ID NO: 383978 - DNA, 1028 bp, Homo Sapiens; identical to SEQ ID NO: 352212

SEQ ID NO: 383979 - DNA, 1118 bp, Homo Sapiens; identical to SEQ ID NO: 352213
  misc_feature (173)..(173): n is a, c, g, or t
  misc_feature (195)..(195): n is a, c, g, or t
  misc_feature (212)..(212): n is a, c, g, or t
  misc_feature (236)..(236): n is a, c, g, or t
  misc_feature (260)..(260): n is a, c, g, or t
  misc_feature (310)..(310): n is a, c, g, or t
  misc_feature (362)..(362): n is a, c, g, or t
  misc_feature (642)..(642): n is a, c, g, or t
  misc_feature (961)..(979): n is a, c, g, or t
  misc_feature (1008)..(1062): n is a, c, g, or t
  misc_feature (1099)..(1099): n is a, c, g, or t

SEQ ID NO: 383980 - DNA, 1372 bp, Homo Sapiens; identical to SEQ ID NO: 352214

SEQ ID NO: 383981 - DNA, 1609 bp, Homo Sapiens; identical to SEQ ID NO: 352215
  misc_feature (144)..(144): n is a, c, g, or t
  misc_feature (161)..(223): n is a, c, g, or t

SEQ ID NO: 383982 - DNA, 433 bp, Homo Sapiens; identical to SEQ ID NO: 352216

SEQ ID NO: 383983 - DNA, 1013 bp, Homo Sapiens; identical to SEQ ID NO: 352217

SEQ ID NO: 383984 - DNA, 2127 bp, Homo Sapiens; identical to SEQ ID NO: 352223
  misc_feature (766)..(766): n is a, c, g, or t
  misc_feature (1101)..(1126): n is a, c, g, or t
  misc_feature (1402)..(1434): n is a, c, g, or t
  misc_feature (1491)..(1501): n is a, c, g, or t
  misc_feature (1984)..(1984): n is a, c, g, or t
  misc_feature (2056)..(2064): n is a, c, g, or t

SEQ ID NO: 383985 - DNA, 478 bp, Homo Sapiens; identical to SEQ ID NO: 352224
  misc_feature (76)..(137): n is a, c, g, or t

SEQ ID NO: 383986 - DNA, 3793 bp, Homo Sapiens; identical to SEQ ID NO: 352239
  misc_feature (3565)..(3656): n is a, c, g, or t
  misc_feature (3661)..(3661): n is a, c, g, or t
  misc_feature (3693)..(3693): n is a, c, g, or t
  misc_feature (3723)..(3733): n is a, c, g, or t

SEQ ID NO: 383987 - DNA, 707 bp, Homo Sapiens; identical to SEQ ID NO: 352240

SEQ ID NO: 383988 - DNA, 796 bp, Homo Sapiens; identical to SEQ ID NO: 352241
  misc_feature (40)..(40): n is a, c, g, or t
  misc_feature (358)..(366): n is a, c, g, or t
  misc_feature (535)..(535): n is a, c, g, or t
  misc_feature (766)..(766): n is a, c, g, or t

SEQ ID NO: 383989 - DNA, 608 bp, Homo Sapiens; identical to SEQ ID NO: 352242
  misc_feature (140)..(159): n is a, c, g, or t
  misc_feature (171)..(171): n is a, c, g, or t
  misc_feature (187)..(187): n is a, c, g, or t
  misc_feature (207)..(207): n is a, c, g, or t
  misc_feature (209)..(210): n is a, c, g, or t
  misc_feature (266)..(266): n is a, c, g, or t

SEQ ID NO: 383990 - DNA, 1082 bp, Homo Sapiens; identical to SEQ ID NO: 352243
  misc_feature (692)..(692): n is a, c, g, or t
  misc_feature (801)..(801): n is a, c, g, or t

SEQ ID NO: 383991 - DNA, 874 bp, Homo Sapiens; identical to SEQ ID NO: 352244

SEQ ID NO: 383992 - DNA, 451 bp, Homo Sapiens; identical to SEQ ID NO: 352245

SEQ ID NO: 383993 - DNA, 2702 bp, Homo Sapiens; identical to SEQ ID NO: 352253
  misc_feature (426)..(434): n is a, c, g, or t
  misc_feature (453)..(464): n is a, c, g, or t
  misc_feature (1972)..(1972): n is a, c, g, or t

SEQ ID NO: 383994 - DNA, 466 bp, Homo Sapiens; identical to SEQ ID NO: 352254
  misc_feature (68)..(68): n is a, c, g, or t
  misc_feature (372)..(372): n is a, c, g, or t

SEQ ID NO: 383995 - DNA, 441 bp, Homo Sapiens; identical to SEQ ID NO: 352255

SEQ ID NO: 383996 - DNA, 1110 bp, Homo Sapiens; identical to SEQ ID NO: 352264
  misc_feature (82)..(128): n is a, c, g, or t

SEQ ID NO: 383997 - DNA, 2508 bp, Homo Sapiens; identical to SEQ ID NO: 352265

SEQ ID NO: 383998 - DNA, 605 bp, Homo Sapiens; identical to SEQ ID NO: 352266

SEQ ID NO: 383999 - DNA, 1083 bp, Homo Sapiens; identical to SEQ ID NO: 352268
  misc_feature (981)..(981): n is a, c, g, or t
  misc_feature (983)..(983): n is a, c, g, or t
  misc_feature (1007)..(1007): n is a, c, g, or t
  misc_feature (1033)..(1033): n is a, c, g, or t
  misc_feature (1041)..(1042): n is a, c, g, or t
  misc_feature (1055)..(1055): n is a, c, g, or t
  misc_feature (1067)..(1067): n is a, c, g, or t

SEQ ID NO: 384000 - DNA, 1387 bp, Homo Sapiens; identical to SEQ ID NO: 352269
  misc_feature (35)..(35): n is a, c, g, or t
  misc_feature (1148)..(1148): n is a, c, g, or t
  misc_feature (1160)..(1160): n is a, c, g, or t
  misc_feature (1175)..(1175): n is a, c, g, or t
  misc_feature (1293)..(1293): n is a, c, g, or t
  misc_feature (1303)..(1303): n is a, c, g, or t
  misc_feature (1345)..(1345): n is a, c, g, or t

SEQ ID NO: 384001 - DNA, 1147 bp, Homo Sapiens; identical to SEQ ID NO: 352270

SEQ ID NO: 384002 - DNA, 780 bp, Homo Sapiens; identical to SEQ ID NO: 352271

SEQ ID NO: 384003 - DNA, 1147 bp, Homo Sapiens; identical to SEQ ID NO: 352272

SEQ ID NO: 384004 - DNA, 389 bp, Homo Sapiens; identical to SEQ ID NO: 352273

SEQ ID NO: 384005 - DNA, 1966 bp, Homo Sapiens; identical to SEQ ID NO: 352281
  misc_feature (1904)..(1916): n is a, c, g, or t

SEQ ID NO: 384006 - DNA, 2640 bp, Homo Sapiens; identical to SEQ ID NO: 352282
  misc_feature (2282)..(2282): n is a, c, g, or t

SEQ ID NO: 384007 - DNA, 2604 bp, Homo Sapiens; identical to SEQ ID NO: 352283
  misc_feature (428)..(453): n is a, c, g, or t
  misc_feature (2578)..(2578): n is a, c, g, or t

SEQ ID NO: 384008 - DNA, 399 bp, Homo Sapiens; identical to SEQ ID NO: 352284
  misc_feature (365)..(365): n is a, c, g, or t

SEQ ID NO: 384009 - DNA, 1221 bp, Homo Sapiens; identical to SEQ ID NO: 352285
  misc_feature (1145)..(1145): n is a, c, g, or t
  misc_feature (1148)..(1148): n is a, c, g, or t
  misc_feature (1156)..(1156): n is a, c, g, or t
  misc_feature (1219)..(1219): n is a, c, g, or t

SEQ ID NO: 384010 - DNA, 974 bp, Homo Sapiens; identical to SEQ ID NO: 352286

SEQ ID NO: 384011 - DNA, 930 bp, Homo Sapiens; identical to SEQ ID NO: 352287
  misc_feature (852)..(852): n is a, c, g, or t
  misc_feature (902)..(902): n is a, c, g, or t

SEQ ID NO: 384012 - DNA, 1673 bp, Homo Sapiens; identical to SEQ ID NO: 352288
  misc_feature (874)..(874): n is a, c, g, or t
  misc_feature (887)..(887): n is a, c, g, or t
  misc_feature (890)..(890): n is a, c, g, or t
  misc_feature (924)..(924): n is a, c, g, or t
  misc_feature (1004)..(1004): n is a, c, g, or t
  misc_feature (1064)..(1064): n is a, c, g, or t
  misc_feature (1103)..(1141): n is a, c, g, or t
  misc_feature (1179)..(1196): n is a, c, g, or t
  misc_feature (1206)..(1206): n is a, c, g, or t
  misc_feature (1227)..(1235): n is a, c, g, or t
  misc_feature (1288)..(1288): n is a, c, g, or t
  misc_feature (1293)..(1293): n is a, c, g, or t
  misc_feature (1298)..(1298): n is a, c, g, or t
  misc_feature (1300)..(1308): n is a, c, g, or t
  misc_feature (1312)..(1321): n is a, c, g, or t
  misc_feature (1335)..(1372): n is a, c, g, or t
  misc_feature (1416)..(1420): n is a, c, g, or t
  misc_feature (1422)..(1422): n is a, c, g, or t
  misc_feature (1479)..(1479): n is a, c, g, or t
  misc_feature (1564)..(1564): n is a, c, g, or t

SEQ ID NO: 384013 - DNA, 1651 bp, Homo Sapiens; identical to SEQ ID NO: 352289
  misc_feature (1539)..(1600): n is a, c, g, or t

SEQ ID NO: 384014 - DNA, 919 bp, Homo Sapiens; identical to SEQ ID NO: 352290

SEQ ID NO: 384015 - DNA, 962 bp, Homo Sapiens; identical to SEQ ID NO: 352291

SEQ ID NO: 384016 - DNA, 552 bp, Homo Sapiens; identical to SEQ ID NO: 352292
  misc_feature (283)..(283): n is a, c, g, or t
  misc_feature (286)..(286): n is a, c, g, or t

SEQ ID NO: 384017 - DNA, 339 bp, Homo Sapiens; identical to SEQ ID NO: 352293
  misc_feature (306)..(306): n is a, c, g, or t

SEQ ID NO: 384018 - DNA, 1346 bp, Homo Sapiens; identical to SEQ ID NO: 352294
  misc_feature (1269)..(1269): n is a, c, g, or t
  misc_feature (1306)..(1306): n is a, c, g, or t

SEQ ID NO: 384019 - DNA, 464 bp, Homo Sapiens; identical to SEQ ID NO: 352299
  misc_feature (30)..(30): n is a, c, g, or t
  misc_feature (34)..(34): n is a, c, g, or t
  misc_feature (128)..(146): n is a, c, g, or t
  misc_feature (422)..(422): n is a, c, g, or t
  misc_feature (433)..(433): n is a, c, g, or t

SEQ ID NO: 384020 - DNA, 755 bp, Homo Sapiens; identical to SEQ ID NO: 352300

SEQ ID NO: 384021 - DNA, 1087 bp, Homo Sapiens; identical to SEQ ID NO: 352301

SEQ ID NO: 384022 - DNA, 770 bp, Homo Sapiens; identical to SEQ ID NO: 352302

SEQ ID NO: 384023 - DNA, 761 bp, Homo Sapiens; identical to SEQ ID NO: 352303

SEQ ID NO: 384024 - DNA, 1592 bp, Homo Sapiens; identical to SEQ ID NO: 352304

SEQ ID NO: 384025 - DNA, 749 bp, Homo Sapiens; identical to SEQ ID NO: 352305

SEQ ID NO: 384026 - DNA, 485 bp, Homo Sapiens; identical to SEQ ID NO: 352306

SEQ ID NO: 384027 - DNA, 738 bp, Homo Sapiens; identical to SEQ ID NO: 352307
  misc_feature (77)..(77): n is a, c, g, or t
  misc_feature (97)..(159): n is a, c, g, or t

SEQ ID NO: 384028 - DNA, 444 bp, Homo Sapiens; identical to SEQ ID NO: 352308

SEQ ID NO: 384029 - DNA, 778 bp, Homo Sapiens; identical to SEQ ID NO: 352309
  misc_feature (29)..(29): n is a, c, g, or t
  misc_feature (31)..(31): n is a, c, g, or t
  misc_feature (34)..(34): n is a, c, g, or t
  misc_feature (85)..(85): n is a, c, g, or t
  misc_feature (89)..(89): n is a, c, g, or t
  misc_feature (763)..(763): n is a, c, g, or t

SEQ ID NO: 384030 - DNA, 1354 bp, Homo Sapiens; identical to SEQ ID NO: 352310

SEQ ID NO: 384031 - DNA, 446 bp, Homo Sapiens; identical to SEQ ID NO: 352311

SEQ ID NO: 384032 - DNA, 729 bp, Homo Sapiens; identical to SEQ ID NO: 352312
  misc_feature (522)..(550): n is a, c, g, or t

SEQ ID NO: 384033 - DNA, 790 bp, Homo Sapiens; identical to SEQ ID NO: 352318

SEQ ID NO: 384034 - DNA, 988 bp, Homo Sapiens; identical to SEQ ID NO: 352319

SEQ ID NO: 384035 - DNA, 692 bp, Homo Sapiens; identical to SEQ ID NO: 352320

SEQ ID NO: 384036 - DNA, 1016 bp, Homo Sapiens; identical to SEQ ID NO: 352321

SEQ ID NO: 384037 - DNA, 826 bp, Homo Sapiens; identical to SEQ ID NO: 352322
  misc_feature (41)..(41): n is a, c, g, or t
  misc_feature (55)..(55): n is a, c, g, or t
  misc_feature (79)..(79): n is a, c, g, or t

SEQ ID NO: 384038 - DNA, 768 bp, Homo Sapiens; identical to SEQ ID NO: 352323

SEQ ID NO: 384039 - DNA, 1141 bp, Homo Sapiens; identical to SEQ ID NO: 352324

SEQ ID NO: 384040 - DNA, 449 bp, Homo Sapiens; identical to SEQ ID NO: 352329
  misc_feature (224)..(224): n is a, c, g, or t

SEQ ID NO: 384041 - DNA, 578 bp, Homo Sapiens; identical to SEQ ID NO: 352330
  misc_feature (481)..(481): n is a, c, g, or t

SEQ ID NO: 384042 - DNA, 431 bp, Homo Sapiens; identical to SEQ ID NO: 352332

SEQ ID NO: 384043 - DNA, 686 bp, Homo Sapiens; identical to SEQ ID NO: 352333
  misc_feature (540)..(633): n is a, c, g, or t

SEQ ID NO: 384044 - DNA, 1646 bp, Homo Sapiens; identical to SEQ ID NO: 352338
  misc_feature (1208)..(1218): n is a, c, g, or t
  misc_feature (1520)..(1521): n is a, c, g, or t
  misc_feature (1530)..(1534): n is a, c, g, or t
  misc_feature (1536)..(1536): n is a, c, g, or t

SEQ ID NO: 384045 - DNA, 476 bp, Homo Sapiens; identical to SEQ ID NO: 352339
  misc_feature (27)..(27): n is a, c, g, or t
  misc_feature (67)..(67): n is a, c, g, or t
  misc_feature (82)..(82): n is a, c, g, or t
  misc_feature (88)..(88): n is a, c, g, or t
  misc_feature (97)..(97): n is a, c, g, or t
  misc_feature (258)..(258): n is a, c, g, or t
  misc_feature (321)..(321): n is a, c, g, or t
  misc_feature (396)..(396): n is a, c, g, or t

SEQ ID NO: 384046 - DNA, 1038 bp, Homo Sapiens; identical to SEQ ID NO: 352340
  misc_feature (49)..(49): n is a, c, g, or t
  misc_feature (742)..(742): n is a, c, g, or t
  misc_feature (863)..(863): n is a, c, g, or t
  misc_feature (936)..(936): n is a, c, g, or t
  misc_feature (948)..(948): n is a, c, g, or t
  misc_feature (952)..(952): n is a, c, g, or t
  misc_feature (955)..(955): n is a, c, g, or t
  misc_feature (973)..(973): n is a, c, g, or t
  misc_feature (979)..(979): n is a, c, g, or t
  misc_feature (990)..(990): n is a, c, g, or t
  misc_feature (994)..(995): n is a, c, g, or t
  misc_feature (1000)..(1000): n is a, c, g, or t
  misc_feature (1006)..(1006): n is a, c, g, or t
  misc_feature (1011)..(1011): n is a, c, g, or t
  misc_feature (1016)..(1016): n is a, c, g, or t

SEQ ID NO: 384047 - DNA, 1030 bp, Homo Sapiens; identical to SEQ ID NO: 352341
  misc_feature (17)..(17): n is a, c, g, or t
  misc_feature (27)..(27): n is a, c, g, or t
  misc_feature (32)..(32): n is a, c, g, or t
  misc_feature (34)..(34): n is a, c, g, or t
  misc_feature (58)..(58): n is a, c, g, or t
  misc_feature (899)..(935): n is a, c, g, or t

SEQ ID NO: 384048 - DNA, 859 bp, Homo Sapiens; identical to SEQ ID NO: 352342

SEQ ID NO: 384049 - DNA, 885 bp, Homo Sapiens; identical to SEQ ID NO: 352343

SEQ ID NO: 384050 - DNA, 958 bp, Homo Sapiens; identical to SEQ ID NO: 352344

SEQ ID NO: 384051 - DNA, 1494 bp, Homo Sapiens; identical to SEQ ID NO: 352345

SEQ ID NO: 384052 - DNA, 946 bp, Homo Sapiens; identical to SEQ ID NO: 352346

SEQ ID NO: 384053 - DNA, 351 bp, Homo Sapiens; identical to SEQ ID NO: 352347

SEQ ID NO: 384054 - DNA, 2351 bp, Homo Sapiens; identical to SEQ ID NO: 352348

SEQ ID NO: 384055 - DNA, 1179 bp, Homo Sapiens; identical to SEQ ID NO: 352349
  misc_feature (42)..(78): n is a, c, g, or t

SEQ ID NO: 384056 - DNA, 1526 bp, Homo Sapiens; identical to SEQ ID NO: 352352
  misc_feature (146)..(164): n is a, c, g, or t
  misc_feature (374)..(383): n is a, c, g, or t
  misc_feature (1311)..(1311): n is a, c, g, or t
  misc_feature (1384)..(1384): n is a, c, g, or t

SEQ ID NO: 384057 - DNA, 1830 bp, Homo Sapiens; identical to SEQ ID NO: 352353
  misc_feature (1209)..(1426): n is a, c, g, or t
  misc_feature (1531)..(1539): n is a, c, g, or t

SEQ ID NO: 384058 - DNA, 1514 bp, Homo Sapiens; identical to SEQ ID NO: 352357
  misc_feature (446)..(511): n is a, c, g, or t
  misc_feature (1329)..(1329): n is a, c, g, or t
  misc_feature (1333)..(1333): n is a, c, g, or t
  misc_feature (1351)..(1351): n is a, c, g, or t
  misc_feature (1423)..(1423): n is a, c, g, or t
  misc_feature (1463)..(1463): n is a, c, g, or t

SEQ ID NO: 384059 - DNA, 1519 bp, Homo Sapiens; identical to SEQ ID NO: 352358
  misc_feature (49)..(85): n is a, c, g, or t

SEQ ID NO: 384060 - DNA, 1837 bp, Homo Sapiens; identical to SEQ ID NO: 352359

SEQ ID NO: 384061 - DNA, 993 bp, Homo Sapiens; identical to SEQ ID NO: 352360
  misc_feature (802)..(802): n is a, c, g, or t
  misc_feature (866)..(866): n is a, c, g, or t
  misc_feature (942)..(942): n is a, c, g, or t
  misc_feature (977)..(977): n is a, c, g, or t

SEQ ID NO: 384062 - DNA, 789 bp, Homo Sapiens; identical to SEQ ID NO: 352361

SEQ ID NO: 384063 - DNA, 725 bp, Homo Sapiens; identical to SEQ ID NO: 352362
  misc_feature (706)..(706): n is a, c, g, or t

SEQ ID NO: 384064 - DNA, 862 bp, Homo Sapiens; identical to SEQ ID NO: 352363
  misc_feature (743)..(785): n is a, c, g, or t

SEQ ID NO: 384065 - DNA, 2395 bp, Homo Sapiens; identical to SEQ ID NO: 352370
  misc_feature (2158)..(2158): n is a, c, g, or t
  misc_feature (2180)..(2180): n is a, c, g, or t

SEQ ID NO: 384066 - DNA, 1237 bp, Homo Sapiens; identical to SEQ ID NO: 352371

SEQ ID NO: 384067 - DNA, 471 bp, Homo Sapiens; identical to SEQ ID NO: 352372
  misc_feature (55)..(56): n is a, c, g, or t

SEQ ID NO: 384068 - DNA, 2315 bp, Homo Sapiens; identical to SEQ ID NO: 352374

SEQ ID NO: 384069 - DNA, 441 bp, Homo Sapiens; identical to SEQ ID NO: 352375
  misc_feature (11)..(11): n is a, c, g, or t

SEQ ID NO: 384070 - DNA, 1131 bp, Homo Sapiens; identical to SEQ ID NO: 352378
  misc_feature (956)..(956): n is a, c, g, or t
  misc_feature (980)..(983): n is a, c, g, or t
  misc_feature (985)..(985): n is a, c, g, or t
  misc_feature (987)..(987): n is a, c, g, or t
  misc_feature (992)..(992): n is a, c, g, or t
  misc_feature (995)..(995): n is a, c, g, or t
  misc_feature (999)..(999): n is a, c, g, or t
  misc_feature (1001)..(1001): n is a, c, g, or t
  misc_feature (1003)..(1005): n is a, c, g, or t
  misc_feature (1008)..(1008): n is a, c, g, or t
  misc_feature (1010)..(1010): n is a, c, g, or t
  misc_feature (1012)..(1012): n is a, c, g, or t
  misc_feature (1053)..(1053): n is a, c, g, or t
  misc_feature (1061)..(1061): n is a, c, g, or t
  misc_feature (1067)..(1067): n is a, c, g, or t
  misc_feature (1069)..(1069): n is a, c, g, or t
  misc_feature (1073)..(1074): n is a, c, g, or t
  misc_feature (1080)..(1080): n is a, c, g, or t
  misc_feature (1085)..(1085): n is a, c, g, or t
  misc_feature (1088)..(1088): n is a, c, g, or t
  misc_feature (1093)..(1093): n is a, c, g, or t
  misc_feature (1111)..(1111): n is a, c, g, or t

SEQ ID NO: 384071 - DNA, 702 bp, Homo Sapiens; identical to SEQ ID NO: 352379
  misc_feature (8)..(11): n is a, c, g, or t
  misc_feature (31)..(31): n is a, c, g, or t
  misc_feature (41)..(41): n is a, c, g, or t
  misc_feature (60)..(60): n is a, c, g, or t
  misc_feature (68)..(68): n is a, c, g, or t
  misc_feature (78)..(78): n is a, c, g, or t
  misc_feature (95)..(95): n is a, c, g, or t
  misc_feature (105)..(105): n is a, c, g, or t
  misc_feature (110)..(111): n is a, c, g, or t
  misc_feature (113)..(113): n is a, c, g, or t
  misc_feature (118)..(118): n is a, c, g, or t
  misc_feature (120)..(121): n is a, c, g, or t
  misc_feature (124)..(124): n is a, c, g, or t
  misc_feature (128)..(128): n is a, c, g, or t
  misc_feature (168)..(168): n is a, c, g, or t
  misc_feature (177)..(178): n is a, c, g, or t
  misc_feature (180)..(180): n is a, c, g, or t
  misc_feature (186)..(190): n is a, c, g, or t

SEQ ID NO: 384072 - DNA, 710 bp, Homo Sapiens; identical to SEQ ID NO: 352380

SEQ ID NO: 384073 - DNA, 705 bp, Homo Sapiens; identical to SEQ ID NO: 352381

SEQ ID NO: 384074 - DNA, 2933 bp, Homo Sapiens; identical to SEQ ID NO: 352384
  misc_feature (19)..(20): n is a, c, g, or t
  misc_feature (253)..(253): n is a, c, g, or t
  misc_feature (1522)..(1522): n is a, c, g, or t

SEQ ID NO: 384075 - DNA, 881 bp, Homo Sapiens; identical to SEQ ID NO: 352385

SEQ ID NO: 384076 - DNA, 2449 bp, Homo Sapiens; identical to SEQ ID NO: 352386

SEQ ID NO: 384077 - DNA, 1398 bp, Homo Sapiens; identical to SEQ ID NO: 352387
  misc_feature (1247)..(1248): n is a, c, g, or t

SEQ ID NO: 384078 - DNA, 2141 bp, Homo Sapiens; identical to SEQ ID NO: 352392
  misc_feature (1390)..(1429): n is a, c, g, or t

SEQ ID NO: 384079 - DNA, 441 bp, Homo Sapiens; identical to SEQ ID NO: 352393
  misc_feature (310)..(310): n is a, c, g, or t
  misc_feature (393)..(393): n is a, c, g, or t
  misc_feature (395)..(395): n is a, c, g, or t

SEQ ID NO: 384080 - DNA, 646 bp, Homo Sapiens; identical to SEQ ID NO: 352398
  misc_feature (51)..(51): n is a, c, g, or t
  misc_feature (134)..(134): n is a, c, g, or t

SEQ ID NO: 384081 - DNA, 1737 bp, Homo Sapiens; identical to SEQ ID NO: 352399

SEQ ID NO: 384082 - DNA, 1670 bp, Homo Sapiens; identical to SEQ ID NO: 352400
  misc_feature (66)..(116): n is a, c, g, or t
  misc_feature (524)..(524): n is a, c, g, or t
  misc_feature (742)..(742): n is a, c, g, or t

SEQ ID NO: 384083 - DNA, 1207 bp, Homo Sapiens; identical to SEQ ID NO: 352403
  misc_feature (878)..(878): n is a, c, g, or t
  misc_feature (883)..(883): n is a, c, g, or t
  misc_feature (890)..(890): n is a, c, g, or t
  misc_feature (894)..(896): n is a, c, g, or t
  misc_feature (933)..(933): n is a, c, g, or t
  misc_feature (935)..(936): n is a, c, g, or t
  misc_feature (1147)..(1156): n is a, c, g, or t

SEQ ID NO: 384084 - DNA, 1182 bp, Homo Sapiens; identical to SEQ ID NO: 352404
  misc_feature (44)..(47): n is a, c, g, or t
  misc_feature (51)..(51): n is a, c, g, or t
  misc_feature (892)..(914): n is a, c, g, or t
  misc_feature (1126)..(1126): n is a, c, g, or t

SEQ ID NO: 384085 - DNA, 747 bp, Homo Sapiens; identical to SEQ ID NO: 352405

SEQ ID NO: 384086 - DNA, 923 bp, Homo Sapiens; identical to SEQ ID NO: 352406

SEQ ID NO: 384087 - DNA, 900 bp, Homo Sapiens; identical to SEQ ID NO: 352407
  misc_feature (106)..(106): n is a, c, g, or t
  misc_feature (297)..(297): n is a, c, g, or t

SEQ ID NO: 384088 - DNA, 1061 bp, Homo Sapiens; identical to SEQ ID NO: 352408
  misc_feature (982)..(993): n is a, c, g, or t

SEQ ID NO: 384089 - DNA, 428 bp, Homo Sapiens; identical to SEQ ID NO: 352409

SEQ ID NO: 384090 - DNA, 1287 bp, Homo Sapiens; identical to SEQ ID NO: 352413
  misc_feature (234)..(244): n is a, c, g, or t

SEQ ID NO: 384091 - DNA, 1133 bp, Homo Sapiens; identical to SEQ ID NO: 352414

SEQ ID NO: 384092 - DNA, 491 bp, Homo Sapiens; identical to SEQ ID NO: 352417
  misc_feature (233)..(233): n is a, c, g, or t

SEQ ID NO: 384093 - DNA, 970 bp, Homo Sapiens; identical to SEQ ID NO: 352418
  misc_feature (851)..(851): n is a, c, g, or t
  misc_feature (943)..(943): n is a, c, g, or t
  misc_feature (955)..(955): n is a, c, g, or t

SEQ ID NO: 384094 - DNA, 814 bp, Homo Sapiens; identical to SEQ ID NO: 352421
  misc_feature (44)..(80): n is a, c, g, or t

SEQ ID NO: 384095 - DNA, 1376 bp, Homo Sapiens; identical to SEQ ID NO: 352422
  misc_feature (143)..(143): n is a, c, g, or t

SEQ ID NO: 384096 - DNA, 1780 bp, Homo Sapiens; identical to SEQ ID NO: 352428
  misc_feature (85)..(85): n is a, c, g, or t
  misc_feature (104)..(104): n is a, c, g, or t
  misc_feature (477)..(477): n is a, c, g, or t
  misc_feature (526)..(526): n is a, c, g, or t
  misc_feature (578)..(578): n is a, c, g, or t
  misc_feature (582)..(582): n is a, c, g, or t
  misc_feature (584)..(584): n is a, c, g, or t
  misc_feature (588)..(588): n is a, c, g, or t
  misc_feature (595)..(595): n is a, c, g, or t
  misc_feature (600)..(600): n is a, c, g, or t
  misc_feature (606)..(606): n is a, c, g, or t
  misc_feature (611)..(611): n is a, c, g, or t

SEQ ID NO: 384097 - DNA, 840 bp, Homo Sapiens; identical to SEQ ID NO: 352429

SEQ ID NO: 384098 - DNA, 1163 bp, Homo Sapiens; identical to SEQ ID NO: 352431
  misc_feature (623)..(623): n is a, c, g, or t

SEQ ID NO: 384099 - DNA, 909 bp, Homo Sapiens; identical to SEQ ID NO: 352432

SEQ ID NO: 384100 - DNA, 1377 bp, Homo Sapiens; identical to SEQ ID NO: 352433

SEQ ID NO: 384101 - DNA, 1109 bp, Homo Sapiens; identical to SEQ ID NO: 352434
  misc_feature (123)..(123): n is a, c, g, or t

SEQ ID NO: 384102 - DNA, 1347 bp, Homo Sapiens; identical to SEQ ID NO: 352435
  misc_feature (47)..(47): n is a, c, g, or t

SEQ ID NO: 384103 - DNA, 2088 bp, Homo Sapiens; identical to SEQ ID NO: 352436
  misc_feature (1861)..(1865): n is a, c, g, or t
  misc_feature (1936)..(1936): n is a, c, g, or t

SEQ ID NO: 384104 - DNA, 1099 bp, Homo Sapiens; identical to SEQ ID NO: 352437
  misc_feature (87)..(98): n is a, c, g, or t

SEQ ID NO: 384105 - DNA, 695 bp, Homo Sapiens; identical to SEQ ID NO: 352438

SEQ ID NO: 384106 - DNA, 1003 bp, Homo Sapiens; identical to SEQ ID NO: 352439
  misc_feature (9)..(9): n is a, c, g, or t
  misc_feature (23)..(23): n is a, c, g, or t
  misc_feature (29)..(29): n is a, c, g, or t
  misc_feature (33)..(33): n is a, c, g, or t
  misc_feature (56)..(56): n is a, c, g, or t
  misc_feature (70)..(70): n is a, c, g, or t
  misc_feature (78)..(78): n is a, c, g, or t
  misc_feature (121)..(121): n is a, c, g, or t

SEQ ID NO: 384107 - DNA, 725 bp, Homo Sapiens; identical to SEQ ID NO: 352440

SEQ ID NO: 384108 - DNA, 2883 bp, Homo Sapiens; identical to SEQ ID NO: 352441
  misc_feature (2268)..(2268): n is a, c, g, or t
  misc_feature (2831)..(2831): n is a, c, g, or t

SEQ ID NO: 384109 - DNA, 1749 bp, Homo Sapiens; identical to SEQ ID NO: 352442
  misc_feature (1367)..(1429): n is a, c, g, or t
  misc_feature (1492)..(1492): n is a, c, g, or t

SEQ ID NO: 384110 - DNA, 521 bp, Homo Sapiens; identical to SEQ ID NO: 352443
  misc_feature (138)..(138): n is a, c, g, or t

SEQ ID NO: 384111 - DNA, 1038 bp, Homo Sapiens; identical to SEQ ID NO: 352445

SEQ ID NO: 384112 - DNA, 999 bp, Homo Sapiens; identical to SEQ ID NO: 352446
  misc_feature (179)..(179): n is a, c, g, or t
  misc_feature (907)..(942): n is a, c, g, or t

SEQ ID NO: 384113 - DNA, 1098 bp, Homo Sapiens; identical to SEQ ID NO: 352451
  misc_feature (760)..(770): n is a, c, g, or t
  misc_feature (985)..(995): n is a, c, g, or t

SEQ ID NO: 384114 - DNA, 947 bp, Homo Sapiens; identical to SEQ ID NO: 352452
  misc_feature (52)..(88): n is a, c, g, or t

SEQ ID NO: 384115 - DNA, 821 bp, Homo Sapiens; identical to SEQ ID NO: 352453

SEQ ID NO: 384116 - DNA, 1765 bp, Homo Sapiens; identical to SEQ ID NO: 352461
  misc_feature (399)..(399): n is a, c, g, or t
  misc_feature (407)..(407): n is a, c, g, or t
  misc_feature (697)..(718): n is a, c, g, or t
  misc_feature (1231)..(1284): n is a, c, g, or t
  misc_feature (1709)..(1719): n is a, c, g, or t

SEQ ID NO: 384117 - DNA, 541 bp, Homo Sapiens; identical to SEQ ID NO: 352462
  misc_feature (330)..(330): n is a, c, g, or t
  misc_feature (465)..(465): n is a, c, g, or t
  misc_feature (505)..(505): n is a, c, g, or t

SEQ ID NO: 384118 - DNA, 1372 bp, Homo Sapiens; identical to SEQ ID NO: 352463
  misc_feature (106)..(159): n is a, c, g, or t
  misc_feature (584)..(594): n is a, c, g, or t
  misc_feature (651)..(707): n is a, c, g, or t
  misc_feature (859)..(882): n is a, c, g, or t
  misc_feature (1256)..(1256): n is a, c, g, or t
  misc_feature (1332)..(1332): n is a, c, g, or t

SEQ ID NO: 384119 - DNA, 1127 bp, Homo Sapiens; identical to SEQ ID NO: 352464
  misc_feature (274)..(274): n is a, c, g, or t

SEQ ID NO: 384120 - DNA, 1279 bp, Homo Sapiens; identical to SEQ ID NO: 352465
  misc_feature (25)..(25): n is a, c, g, or t
  misc_feature (894)..(894): n is a, c, g, or t
  misc_feature (946)..(946): n is a, c, g, or t
  misc_feature (1003)..(1044): n is a, c, g, or t
  misc_feature (1177)..(1177): n is a, c, g, or t
  misc_feature (1213)..(1213): n is a, c, g, or t

SEQ ID NO: 384121 - DNA, 976 bp, Homo Sapiens; identical to SEQ ID NO: 352466
  misc_feature (30)..(30): n is a, c, g, or t
  misc_feature (705)..(746): n is a, c, g, or t

SEQ ID NO: 384122 - DNA, 1909 bp, Homo Sapiens; identical to SEQ ID NO: 352472
  misc_feature (1852)..(1865): n is a, c, g, or t

SEQ ID NO: 384123 - DNA, 457 bp, Homo Sapiens; identical to SEQ ID NO: 352473
  misc_feature (370)..(370): n is a, c, g, or t

SEQ ID NO: 384124 - DNA, 1301 bp, Homo Sapiens; identical to SEQ ID NO: 352474
  misc_feature (62)..(62): n is a, c, g, or t
  misc_feature (88)..(88): n is a, c, g, or t
  misc_feature (93)..(93): n is a, c, g, or t
  misc_feature (162)..(162): n is a, c, g, or t
  misc_feature (1116)..(1116): n is a, c, g, or t
  misc_feature (1141)..(1141): n is a, c, g, or t
  misc_feature (1201)..(1201): n is a, c, g, or t

SEQ ID NO: 384125 - DNA, 339 bp, Homo Sapiens; identical to SEQ ID NO: 352475
  misc_feature (217)..(217): n is a, c, g, or t

SEQ ID NO: 384126 - DNA, 924 bp, Homo Sapiens; identical to SEQ ID NO: 352476
  misc_feature (154)..(162): n is a, c, g, or t
  misc_feature (231)..(231): n is a, c, g, or t
  misc_feature (557)..(850): n is a, c, g, or t

SEQ ID NO: 384127 - DNA, 1369 bp, Homo Sapiens; identical to SEQ ID NO: 352477
  misc_feature (28)..(28): n is a, c, g, or t
  misc_feature (79)..(79): n is a, c, g, or t
  misc_feature (112)..(178): n is a, c, g, or t
  misc_feature (641)..(701): n is a, c, g, or t
  misc_feature (1018)..(1018): n is a, c, g, or t
  misc_feature (1030)..(1030): n is a, c, g, or t

SEQ ID NO: 384128 - DNA, 864 bp, Homo Sapiens; identical to SEQ ID NO: 352478
  misc_feature (98)..(110): n is a, c, g, or t
  misc_feature (287)..(581): n is a, c, g, or t

SEQ ID NO: 384129 - DNA, 810 bp, Homo Sapiens; identical to SEQ ID NO: 352479
  misc_feature (55)..(55): n is a, c, g, or t

SEQ ID NO: 384130 - DNA, 1688 bp, Homo Sapiens; identical to SEQ ID NO: 352480

SEQ ID NO: 384131 - DNA, 1135 bp, Homo Sapiens; identical to SEQ ID NO: 352481

SEQ ID NO: 384132 - DNA, 562 bp, Homo Sapiens; identical to SEQ ID NO: 352484
  misc_feature (77)..(77): n is a, c, g, or t
  misc_feature (86)..(86): n is a, c, g, or t
  misc_feature (88)..(116): n is a, c, g, or t

SEQ ID NO: 384133 - DNA, 1650 bp, Homo Sapiens; identical to SEQ ID NO: 352485
  misc_feature (1512)..(1512): n is a, c, g, or t
  misc_feature (1633)..(1633): n is a, c, g, or t

SEQ ID NO: 384134 - DNA, 592 bp, Homo Sapiens; identical to SEQ ID NO: 352486
  misc_feature (470)..(470): n is a, c, g, or t
  misc_feature (492)..(492): n is a, c, g, or t
  misc_feature (562)..(562): n is a, c, g, or t
  misc_feature (580)..(580): n is a, c, g, or t

SEQ ID NO: 384135 - DNA, 1117 bp, Homo Sapiens; identical to SEQ ID NO: 352487
  misc_feature (13)..(13): n is a, c, g, or t
  misc_feature (73)..(73): n is a, c, g, or t
  misc_feature (539)..(566): n is a, c, g, or t

SEQ ID NO: 384136 - DNA, 1009 bp, Homo Sapiens; identical to SEQ ID NO: 352490
  misc_feature (3)..(3): n is a, c, g, or t
  misc_feature (8)..(8): n is a, c, g, or t
  misc_feature (13)..(13): n is a, c, g, or t
  misc_feature (15)..(15): n is a, c, g, or t
  misc_feature (18)..(18): n is a, c, g, or t
  misc_feature (20)..(21): n is a, c, g, or t
  misc_feature (23)..(23): n is a, c, g, or t
  misc_feature (25)..(25): n is a, c, g, or t
  misc_feature (28)..(28): n is a, c, g, or t
  misc_feature (44)..(44): n is a, c, g, or t
  misc_feature (48)..(48): n is a, c, g, or t
  misc_feature (85)..(86): n is a, c, g, or t
  misc_feature (101)..(101): n is a, c, g, or t
  misc_feature (111)..(111): n is a, c, g, or t
  misc_feature (278)..(278): n is a, c, g, or t
  misc_feature (314)..(314): n is a, c, g, or t

SEQ ID NO: 384137 - DNA, 1072 bp, Homo Sapiens; identical to SEQ ID NO: 352491
  misc_feature (121)..(184): n is a, c, g, or t
  misc_feature (493)..(493): n is a, c, g, or t

SEQ ID NO: 384138 - DNA, 757 bp, Homo Sapiens; identical to SEQ ID NO: 352492

SEQ ID NO: 384139 - DNA, 1142 bp, Homo Sapiens; identical to SEQ ID NO: 352493
  misc_feature (797)..(797): n is a, c, g, or t
  misc_feature (875)..(875): n is a, c, g, or t

SEQ ID NO: 384140 - DNA, 880 bp, Homo Sapiens; identical to SEQ ID NO: 352512
  misc_feature (416)..(425): n is a, c, g, or t

SEQ ID NO: 384141 - DNA, 883 bp, Homo Sapiens; identical to SEQ ID NO: 352513
  misc_feature (44)..(80): n is a, c, g, or t

SEQ ID NO: 384142 - DNA, 1635 bp, Homo Sapiens; identical to SEQ ID NO: 352516
  misc_feature (1393)..(1393): n is a, c, g, or t
  misc_feature (1399)..(1399): n is a, c, g, or t
  misc_feature (1415)..(1415): n is a, c, g, or t
  misc_feature (1451)..(1451): n is a, c, g, or t
  misc_feature (1510)..(1510): n is a, c, g, or t
  misc_feature (1573)..(1573): n is a, c, g, or t

SEQ ID NO: 384143 - DNA, 766 bp, Homo Sapiens; identical to SEQ ID NO: 352517

SEQ ID NO: 384144 - DNA, 815 bp, Homo Sapiens; identical to SEQ ID NO: 352526
  misc_feature (785)..(785): n is a, c, g, or t

SEQ ID NO: 384145 - DNA, 1360 bp, Homo Sapiens; identical to SEQ ID NO: 352527
  misc_feature (6)..(6): n is a, c, g, or t
  misc_feature (14)..(14): n is a, c, g, or t
  misc_feature (32)..(32): n is a, c, g, or t
  misc_feature (41)..(41): n is a, c, g, or t
  misc_feature (51)..(51): n is a, c, g, or t
  misc_feature (58)..(59): n is a, c, g, or t
  misc_feature (74)..(74): n is a, c, g, or t
  misc_feature (82)..(82): n is a, c, g, or t
  misc_feature (86)..(86): n is a, c, g, or t
  misc_feature (92)..(92): n is a, c, g, or t
  misc_feature (94)..(94): n is a, c, g, or t
  misc_feature (102)..(102): n is a, c, g, or t
  misc_feature (121)..(121): n is a, c, g, or t
  misc_feature (132)..(132): n is a, c, g, or t
  misc_feature (179)..(179): n is a, c, g, or t
  misc_feature (186)..(186): n is a, c, g, or t
  misc_feature (189)..(233): n is a, c, g, or t
  misc_feature (400)..(415): n is a, c, g, or t
  misc_feature (691)..(691): n is a, c, g, or t
  misc_feature (703)..(703): n is a, c, g, or t
  misc_feature (710)..(710): n is a, c, g, or t
  misc_feature (793)..(793): n is a, c, g, or t
  misc_feature (795)..(795): n is a, c, g, or t
  misc_feature (797)..(797): n is a, c, g, or t
  misc_feature (799)..(800): n is a, c, g, or t
  misc_feature (802)..(802): n is a, c, g, or t
  misc_feature (811)..(813): n is a, c, g, or t
  misc_feature (815)..(816): n is a, c, g, or t
  misc_feature (818)..(818): n is a, c, g, or t
  misc_feature (841)..(841): n is a, c, g, or t
  misc_feature (843)..(843): n is a, c, g, or t
  misc_feature (845)..(845): n is a, c, g, or t
  misc_feature (847)..(847): n is a, c, g, or t
  misc_feature (875)..(875): n is a, c, g, or t
  misc_feature (888)..(888): n is a, c, g, or t
  misc_feature (894)..(894): n is a, c, g, or t
  misc_feature (936)..(936): n is a, c, g, or t

SEQ ID NO: 384146 - DNA, 892 bp, Homo Sapiens; identical to SEQ ID NO: 352528
  misc_feature (203)..(218): n is a, c, g, or t

SEQ ID NO: 384147 - DNA, 740 bp, Homo Sapiens; identical to SEQ ID NO: 352533
  misc_feature (184)..(198): n is a, c, g, or t
  misc_feature (412)..(412): n is a, c, g, or t
  misc_feature (650)..(658): n is a, c, g, or t

SEQ ID NO: 384148 - DNA, 537 bp, Homo Sapiens; identical to SEQ ID NO: 352534

SEQ ID NO: 384149 - DNA, 2262 bp, Homo Sapiens; identical to SEQ ID NO: 352535
  misc_feature (22)..(22): n is a, c, g, or t
  misc_feature (248)..(256): n is a, c, g, or t
  misc_feature (359)..(383): n is a, c, g, or t
  misc_feature (390)..(579): n is a, c, g, or t

SEQ ID NO: 384150 - DNA, 438 bp, Homo Sapiens; identical to SEQ ID NO: 352536

SEQ ID NO: 384151 - DNA, 547 bp, Homo Sapiens; identical to SEQ ID NO: 352542

SEQ ID NO: 384152 - DNA, 435 bp, Homo Sapiens; identical to SEQ ID NO: 352543
  misc_feature (105)..(105): n is a, c, g, or t

SEQ ID NO: 384153 - DNA, 1040 bp, Homo Sapiens; identical to SEQ ID NO: 352550
  misc_feature (44)..(44): n is a, c, g, or t
  misc_feature (131)..(131): n is a, c, g, or t

SEQ ID NO: 384154 - DNA, 1128 bp, Homo Sapiens; identical to SEQ ID NO: 352551
  misc_feature (973)..(1031): n is a, c, g, or t

SEQ ID NO: 384155 - DNA, 913 bp, Homo Sapiens; identical to SEQ ID NO: 352552
  misc_feature (50)..(86): n is a, c, g, or t

SEQ ID NO: 384156 - DNA, 634 bp, Homo Sapiens; identical to SEQ ID NO: 352556
  misc_feature (107)..(107): n is a, c, g, or t
  misc_feature (151)..(151): n is a, c, g, or t

SEQ ID NO: 384157 - DNA, 1535 bp, Homo Sapiens; identical to SEQ ID NO: 352557

SEQ ID NO: 384158 - DNA, 712 bp, Homo Sapiens; identical to SEQ ID NO: 352559
  misc_feature (478)..(478): n is a, c, g, or t

SEQ ID NO: 384159 - DNA, 1321 bp, Homo Sapiens; identical to SEQ ID NO: 352560

SEQ ID NO: 384160 - DNA, 470 bp, Homo Sapiens; identical to SEQ ID NO: 352561
  misc_feature (14)..(14): n is a, c, g, or t
  misc_feature (37)..(37): n is a, c, g, or t
  misc_feature (384)..(384): n is a, c, g, or t
  misc_feature (386)..(386): n is a, c, g, or t

SEQ ID NO: 384161 - DNA, 2433 bp, Homo Sapiens; identical to SEQ ID NO: 352564

SEQ ID NO: 384162 - DNA, 758 bp, Homo Sapiens; identical to SEQ ID NO: 352565

SEQ ID NO: 384163 - DNA, 823 bp, Homo Sapiens; identical to SEQ ID NO: 255261

SEQ ID NO: 384164 - DNA, 2435 bp, Homo Sapiens; identical to SEQ ID NO: 352567
  misc_feature (1402)..(1415): n is a, c, g, or t
  misc_feature (1488)..(1497): n is a, c, g, or t
  misc_feature (1718)..(1726): n is a, c, g, or t
  misc_feature (1846)..(1846): n is a, c, g, or t
  misc_feature (1911)..(1911): n is a, c, g, or t
  misc_feature (2011)..(2011): n is a, c, g, or t
  misc_feature (2033)..(2033): n is a, c, g, or t
  misc_feature (2083)..(2083): n is a, c, g, or t
  misc_feature (2144)..(2144): n is a, c, g, or t
  misc_feature (2149)..(2149): n is a, c, g, or t
  misc_feature (2176)..(2176): n is a, c, g, or t
  misc_feature (2218)..(2218): n is a, c, g, or t
  misc_feature (2272)..(2272): n is a, c, g, or t
  misc_feature (2348)..(2348): n is a, c, g, or t

SEQ ID NO: 384165 - DNA, 1056 bp, Homo Sapiens; identical to SEQ ID NO: 352568
  misc_feature (1013)..(1013): n is a, c, g, or t

SEQ ID NO: 384166 - DNA, 823 bp, Homo Sapiens; identical to SEQ ID NO: 352572

SEQ ID NO: 384167 - DNA, 1434 bp, Homo Sapiens; identical to SEQ ID NO: 352573

SEQ ID NO: 384168 - DNA, 1052 bp, Homo Sapiens; identical to SEQ ID NO: 352574
  misc_feature (970)..(1006): n is a, c, g, or t

SEQ ID NO: 384169 - DNA, 462 bp, Homo Sapiens; identical to SEQ ID NO: 352575
  misc_feature (26)..(26): n is a, c, g, or t

SEQ ID NO: 384170 - DNA, 1626 bp, Homo Sapiens; identical to SEQ ID NO: 352582
  misc_feature (74)..(93): n is a, c, g, or t
  misc_feature (215)..(260): n is a, c, g, or t
  misc_feature (1459)..(1510): n is a, c, g, or t
  misc_feature (1528)..(1573): n is a, c, g, or t
  misc_feature (1616)..(1616): n is a, c, g, or t

SEQ ID NO: 384171 - DNA, 762 bp, Homo Sapiens; identical to SEQ ID NO: 352583
  misc_feature (271)..(385): n is a, c, g, or t
  misc_feature (615)..(615): n is a, c, g, or t

SEQ ID NO: 384172 - DNA, 529 bp, Homo Sapiens; identical to SEQ ID NO: 352586

SEQ ID NO: 384173 - DNA, 1373 bp, Homo Sapiens; identical to SEQ ID NO: 352587
  misc_feature (46)..(82): n is a, c, g, or t

SEQ ID NO: 384174 - DNA, 1604 bp, Homo Sapiens; identical to SEQ ID NO: 352588
  misc_feature (257)..(357): n is a, c, g, or t
  misc_feature (675)..(686): n is a, c, g, or t
  misc_feature (1505)..(1505): n is a, c, g, or t

SEQ ID NO: 384175 - DNA, 926 bp, Homo Sapiens; identical to SEQ ID NO: 352591

SEQ ID NO: 384176 - DNA, 1585 bp, Homo Sapiens; identical to SEQ ID NO: 352592
  misc_feature (19)..(19): n is a, c, g, or t
  misc_feature (808)..(808): n is a, c, g, or t
  misc_feature (810)..(810): n is a, c, g, or t
  misc_feature (816)..(816): n is a, c, g, or t
  misc_feature (821)..(821): n is a, c, g, or t
  misc_feature (836)..(836): n is a, c, g, or t
  misc_feature (869)..(869): n is a, c, g, or t
  misc_feature (877)..(877): n is a, c, g, or t
  misc_feature (879)..(879): n is a, c, g, or t
  misc_feature (881)..(882): n is a, c, g, or t
  misc_feature (893)..(893): n is a, c, g, or t
  misc_feature (910)..(910): n is a, c, g, or t
  misc_feature (935)..(935): n is a, c, g, or t
  misc_feature (970)..(970): n is a, c, g, or t
  misc_feature (976)..(976): n is a, c, g, or t
  misc_feature (988)..(989): n is a, c, g, or t
  misc_feature (995)..(995): n is a, c, g, or t
  misc_feature (1002)..(1002): n is a, c, g, or t
  misc_feature (1038)..(1038): n is a, c, g, or t
  misc_feature (1098)..(1099): n is a, c, g, or t

SEQ ID NO: 384177 - DNA, 1337 bp, Homo Sapiens; identical to SEQ ID NO: 352594
  misc_feature (4)..(4): n is a, c, g, or t
  misc_feature (7)..(7): n is a, c, g, or t
  misc_feature (16)..(17): n is a, c, g, or t
  misc_feature (25)..(25): n is a, c, g, or t
  misc_feature (29)..(29): n is a, c, g, or t
  misc_feature (48)..(48): n is a, c, g, or t
  misc_feature (61)..(61): n is a, c, g, or t
  misc_feature (73)..(73): n is a, c, g, or t
  misc_feature (90)..(90): n is a, c, g, or t
  misc_feature (95)..(95): n is a, c, g, or t
  misc_feature (1159)..(1223): n is a, c, g, or t
  misc_feature (1324)..(1324): n is a, c, g, or t

SEQ ID NO: 384178 - DNA, 2233 bp, Homo Sapiens; identical to SEQ ID NO: 352595
  misc_feature (2191)..(2191): n is a, c, g, or t
  misc_feature (2199)..(2199): n is a, c, g, or t
  misc_feature (2218)..(2218): n is a, c, g, or t

SEQ ID NO: 384179 - DNA, 978 bp, Homo Sapiens; identical to SEQ ID NO: 352604
  misc_feature (869)..(916): n is a, c, g, or t
  misc_feature (947)..(947): n is a, c, g, or t

SEQ ID NO: 384180 - DNA, 1305 bp, Homo Sapiens; identical to SEQ ID NO: 352605

SEQ ID NO: 384181 - DNA, 1744 bp, Homo Sapiens; identical to SEQ ID NO: 352606

SEQ ID NO: 384182 - DNA, 852 bp, Homo Sapiens; identical to SEQ ID NO: 352607

SEQ ID NO: 384183 - DNA, 463 bp, Homo Sapiens; identical to SEQ ID NO: 352608

SEQ ID NO: 384184 - DNA, 1736 bp, Homo Sapiens; identical to SEQ ID NO: 352610
  misc_feature (198)..(245): n is a, c, g, or t
  misc_feature (303)..(303): n is a, c, g, or t
  misc_feature (1594)..(1659): n is a, c, g, or t

SEQ ID NO: 384185 - DNA, 666 bp, Homo Sapiens; identical to SEQ ID NO: 352611
  misc_feature (591)..(591): n is a, c, g, or t

SEQ ID NO: 384186 - DNA, 914 bp, Homo Sapiens; identical to SEQ ID NO: 352613
  misc_feature (127)..(127): n is a, c, g, or t
  misc_feature (129)..(179): n is a, c, g, or t
  misc_feature (185)..(188): n is a, c, g, or t
  misc_feature (269)..(330): n is a, c, g, or t
  misc_feature (497)..(558): n is a, c, g, or t

SEQ ID NO: 384187 - DNA, 986 bp, Homo Sapiens; identical to SEQ ID NO: 352614
  misc_feature (137)..(199): n is a, c, g, or t
  misc_feature (201)..(201): n is a, c, g, or t
  misc_feature (213)..(213): n is a, c, g, or t
  misc_feature (225)..(225): n is a, c, g, or t
  misc_feature (238)..(238): n is a, c, g, or t
  misc_feature (248)..(248): n is a, c, g, or t
  misc_feature (276)..(276): n is a, c, g, or t
  misc_feature (476)..(485): n is a, c, g, or t
  misc_feature (848)..(848): n is a, c, g, or t

SEQ ID NO: 384188 - DNA, 1072 bp, Homo Sapiens; identical to SEQ ID NO: 352615

SEQ ID NO: 384189 - DNA, 711 bp, Homo Sapiens; identical to SEQ ID NO: 352616

SEQ ID NO: 384190 - DNA, 1048 bp, Homo Sapiens; identical to SEQ ID NO: 352629

SEQ ID NO: 384191 - DNA, 2198 bp, Homo Sapiens; identical to SEQ ID NO: 352630
  misc_feature (2021)..(2035): n is a, c, g, or t

SEQ ID NO: 384192 - DNA, 829 bp, Homo Sapiens; identical to SEQ ID NO: 352636
  misc_feature (174)..(234): n is a, c, g, or t

SEQ ID NO: 384193 - DNA, 884 bp, Homo Sapiens; identical to SEQ ID NO: 352637
  misc_feature (548)..(608): n is a, c, g, or t
  misc_feature (782)..(793): n is a, c, g, or t

SEQ ID NO: 384194 - DNA, 405 bp, Homo Sapiens; identical to SEQ ID NO: 352645

SEQ ID NO: 384195 - DNA, 501 bp, Homo Sapiens; identical to SEQ ID NO: 352646
  misc_feature (57)..(57): n is a, c, g, or t
  misc_feature (143)..(143): n is a, c, g, or t
  misc_feature (153)..(153): n is a, c, g, or t
  misc_feature (339)..(339): n is a, c, g, or t
  misc_feature (353)..(353): n is a, c, g, or t
  misc_feature (377)..(377): n is a, c, g, or t
  misc_feature (385)..(385): n is a, c, g, or t
  misc_feature (437)..(437): n is a, c, g, or t

SEQ ID NO: 384196 - DNA, 750 bp, Homo Sapiens; identical to SEQ ID NO: 352650
  misc_feature (161)..(223): n is a, c, g, or t

SEQ ID NO: 384197 - DNA, 620 bp, Homo Sapiens; identical to SEQ ID NO: 352651
  misc_feature (199)..(199): n is a, c, g, or t

SEQ ID NO: 384198 - DNA, 521 bp, Homo Sapiens; identical to SEQ ID NO: 352655

SEQ ID NO: 384199 - DNA, 1480 bp, Homo Sapiens; identical to SEQ ID NO: 352656
  misc_feature (1470)..(1470): n is a, c, g, or t

SEQ ID NO: 384200 - DNA, 2213 bp, Homo Sapiens; identical to SEQ ID NO: 352664

SEQ ID NO: 384201 - DNA, 882 bp, Homo Sapiens; identical to SEQ ID NO: 352665
  misc_feature (752)..(778): n is a, c, g, or t

SEQ ID NO: 384202 - DNA, 844 bp, Homo Sapiens; identical to SEQ ID NO: 352666
  misc_feature (567)..(596): n is a, c, g, or t

SEQ ID NO: 384203 - DNA, 1901 bp, Homo Sapiens; identical to SEQ ID NO: 352671

SEQ ID NO: 384204 - DNA, 943 bp, Homo Sapiens; identical to SEQ ID NO: 352672

SEQ ID NO: 384205 - DNA, 1785 bp, Homo Sapiens; identical to SEQ ID NO: 352676

SEQ ID NO: 384206 - DNA, 935 bp, Homo Sapiens; identical to SEQ ID NO: 352677

SEQ ID NO: 384207 - DNA, 1094 bp, Homo Sapiens; identical to SEQ ID NO: 352678
  misc_feature (756)..(756): n is a, c, g, or t
  misc_feature (760)..(760): n is a, c, g, or t

SEQ ID NO: 384208 - DNA, 857 bp, Homo Sapiens; identical to SEQ ID NO: 352706

SEQ ID NO: 384209 - DNA, 927 bp, Homo Sapiens; identical to SEQ ID NO: 352707

SEQ ID NO: 384210 - DNA, 310 bp, Homo Sapiens; identical to SEQ ID NO: 352708

SEQ ID NO: 384211 - DNA, 970 bp, Homo Sapiens; identical to SEQ ID NO: 352709

SEQ ID NO: 384212 - DNA, 1133 bp, Homo Sapiens; identical to SEQ ID NO: 352712

SEQ ID NO: 384213 - DNA, 484 bp, Homo Sapiens; identical to SEQ ID NO: 352713

SEQ ID NO: 384214 - DNA, 235 bp, Homo Sapiens; identical to SEQ ID NO: 352716

SEQ ID NO: 384215 - DNA, 353 bp, Homo Sapiens; identical to SEQ ID NO: 352717

SEQ ID NO: 384216 - DNA, 858 bp, Homo Sapiens; identical to SEQ ID NO: 352719

SEQ ID NO: 384217 - DNA, 920 bp, Homo Sapiens; identical to SEQ ID NO: 352720

SEQ ID NO: 384218 - DNA, 1189 bp, Homo Sapiens; identical to SEQ ID NO: 352735
  misc_feature (602)..(637): n is a, c, g, or t
  misc_feature (799)..(809): n is a, c, g, or t

SEQ ID NO: 384219 - DNA, 1325 bp, Homo Sapiens; identical to SEQ ID NO: 352736
  misc_feature (130)..(166): n is a, c, g, or t
  misc_feature (327)..(336): n is a, c, g, or t

SEQ ID NO: 384220 - DNA, 1127 bp, Homo Sapiens; identical to SEQ ID NO: 352740
  misc_feature (336)..(336): n is a, c, g, or t
  misc_feature (608)..(608): n is a, c, g, or t
  misc_feature (658)..(658): n is a, c, g, or t
  misc_feature (676)..(676): n is a, c, g, or t
  misc_feature (727)..(727): n is a, c, g, or t
  misc_feature (797)..(797): n is a, c, g, or t
  misc_feature (839)..(839): n is a, c, g, or t
  misc_feature (866)..(866): n is a, c, g, or t
  misc_feature (868)..(868): n is a, c, g, or t
  misc_feature (926)..(926): n is a, c, g, or t
  misc_feature (940)..(940): n is a, c, g, or t
  misc_feature (991)..(991): n is a, c, g, or t

SEQ ID NO: 384221 - DNA, 1585 bp, Homo Sapiens; identical to SEQ ID NO: 352741
  misc_feature (7)..(7): n is a, c, g, or t
  misc_feature (10)..(10): n is a, c, g, or t
  misc_feature (24)..(24): n is a, c, g, or t
  misc_feature (30)..(30): n is a, c, g, or t
  misc_feature (48)..(48): n is a, c, g, or t
  misc_feature (158)..(158): n is a, c, g, or t
  misc_feature (168)..(168): n is a, c, g, or t
  misc_feature (947)..(958): n is a, c, g, or t

SEQ ID NO: 384222 - DNA, 693 bp, Homo Sapiens; identical to SEQ ID NO: 352742
  misc_feature (15)..(15): n is a, c, g, or t
  misc_feature (60)..(60): n is a, c, g, or t

SEQ ID NO: 384223 - DNA, 2503 bp, Homo Sapiens; identical to SEQ ID NO: 352743

SEQ ID NO: 384224 - DNA, 755 bp, Homo Sapiens; identical to SEQ ID NO: 352744

SEQ ID NO: 384225 - DNA, 1078 bp, Homo Sapiens; identical to SEQ ID NO: 352745
  misc_feature (824)..(920): n is a, c, g, or t
  misc_feature (946)..(946): n is a, c, g, or t
  misc_feature (1061)..(1061): n is a, c, g, or t

SEQ ID NO: 384226 - DNA, 865 bp, Homo Sapiens; identical to SEQ ID NO: 352752

SEQ ID NO: 384227 - DNA, 879 bp, Homo Sapiens; identical to SEQ ID NO: 352753

SEQ ID NO: 384228 - DNA, 1437 bp, Homo Sapiens; identical to SEQ ID NO: 352759

SEQ ID NO: 384229 - DNA, 369 bp, Homo Sapiens; identical to SEQ ID NO: 352760

SEQ ID NO: 384230 - DNA, 1310 bp, Homo Sapiens; identical to SEQ ID NO: 352764

SEQ ID NO: 384231 - DNA, 688 bp, Homo Sapiens; identical to SEQ ID NO: 352765

SEQ ID NO: 384232 - DNA, 824 bp, Homo Sapiens; identical to SEQ ID NO: 352768

SEQ ID NO: 384233 - DNA, 1150 bp, Homo Sapiens; identical to SEQ ID NO: 352769

SEQ ID NO: 384234 - DNA, 1039 bp, Homo Sapiens; identical to SEQ ID NO: 352772
  misc_feature (995)..(995): n is a, c, g, or t

SEQ ID NO: 384235 - DNA, 676 bp, Homo Sapiens; identical to SEQ ID NO: 352773
  misc_feature (13)..(13): n is a, c, g, or t
  misc_feature (60)..(60): n is a, c, g, or t

SEQ ID NO: 384236 - DNA, 325 bp, Homo Sapiens; identical to SEQ ID NO: 352796

SEQ ID NO: 384237 - DNA, 2348 bp, Homo Sapiens; identical to SEQ ID NO: 352797
  misc_feature (1794)..(1794): n is a, c, g, or t
  misc_feature (1812)..(1812): n is a, c, g, or t
  misc_feature (1865)..(1865): n is a, c, g, or t
  misc_feature (1886)..(1886): n is a, c, g, or t
  misc_feature (1888)..(1888): n is a, c, g, or t

SEQ ID NO: 384238 - DNA, 842 bp, Homo Sapiens; identical to SEQ ID NO: 352799
  misc_feature (96)..(96): n is a, c, g, or t
  misc_feature (273)..(561): n is a, c, g, or t

SEQ ID NO: 384239 - DNA, 1231 bp, Homo Sapiens; identical to SEQ ID NO: 352800

SEQ ID NO: 384240 - DNA, 1447 bp, Homo Sapiens; identical to SEQ ID NO: 352804
  misc_feature (52)..(230): n is a, c, g, or t
  misc_feature (1315)..(1315): n is a, c, g, or t
  misc_feature (1370)..(1370): n is a, c, g, or t
  misc_feature (1377)..(1377): n is a, c, g, or t
  misc_feature (1381)..(1381): n is a, c, g, or t
  misc_feature (1395)..(1395): n is a, c, g, or t

SEQ ID NO: 384241 - DNA, 1772 bp, Homo Sapiens; identical to SEQ ID NO: 352805
  misc_feature (1405)..(1405): n is a, c, g, or t

SEQ ID NO: 384242 - DNA, 810 bp, Homo Sapiens; identical to SEQ ID NO: 352806
  misc_feature (87)..(87): n is a, c, g, or t
  misc_feature (107)..(107): n is a, c, g, or t
  misc_feature (261)..(261): n is a, c, g, or t
  misc_feature (303)..(303): n is a, c, g, or t

SEQ ID NO: 384243 - DNA, 1343 bp, Homo Sapiens; identical to SEQ ID NO: 352807
  misc_feature (13)..(13): n is a, c, g, or t

SEQ ID NO: 384244 - DNA, 1474 bp, Homo Sapiens; identical to SEQ ID NO: 352812
  misc_feature (16)..(16): n is a, c, g, or t
  misc_feature (21)..(21): n is a, c, g, or t
  misc_feature (30)..(30): n is a, c, g, or t
  misc_feature (35)..(35): n is a, c, g, or t
  misc_feature (37)..(37): n is a, c, g, or t
  misc_feature (52)..(53): n is a, c, g, or t
  misc_feature (68)..(71): n is a, c, g, or t
  misc_feature (74)..(76): n is a, c, g, or t
  misc_feature (80)..(82): n is a, c, g, or t
  misc_feature (84)..(84): n is a, c, g, or t
  misc_feature (95)..(96): n is a, c, g, or t
  misc_feature (99)..(99): n is a, c, g, or t
  misc_feature (104)..(104): n is a, c, g, or t
  misc_feature (113)..(113): n is a, c, g, or t
  misc_feature (119)..(119): n is a, c, g, or t
  misc_feature (130)..(130): n is a, c, g, or t
  misc_feature (135)..(135): n is a, c, g, or t
  misc_feature (142)..(142): n is a, c, g, or t
  misc_feature (144)..(144): n is a, c, g, or t
  misc_feature (148)..(148): n is a, c, g, or t
  misc_feature (152)..(153): n is a, c, g, or t
  misc_feature (163)..(163): n is a, c, g, or t
  misc_feature (166)..(166): n is a, c, g, or t

SEQ ID NO: 384245 - DNA, 1379 bp, Homo Sapiens; identical to SEQ ID NO: 352813

SEQ ID NO: 384246 - DNA, 1822 bp, Homo Sapiens; identical to SEQ ID NO: 352816

SEQ ID NO: 384247 - DNA, 448 bp, Homo Sapiens; identical to SEQ ID NO: 352817
  misc_feature (414)..(414): n is a, c, g, or t
  misc_feature (424)..(424): n is a, c, g, or t

SEQ ID NO: 384248 - DNA, 459 bp, Homo Sapiens; identical to SEQ ID NO: 352818
  misc_feature (393)..(393): n is a, c, g, or t

SEQ ID NO: 384249 - DNA, 310 bp, Homo Sapiens; identical to SEQ ID NO: 352819

SEQ ID NO: 384250 - DNA, 1058 bp, Homo Sapiens; identical to SEQ ID NO: 352820
  misc_feature (756)..(771): n is a, c, g, or t
  misc_feature (784)..(822): n is a, c, g, or t
  misc_feature (870)..(944): n is a, c, g, or t
  misc_feature (986)..(994): n is a, c, g, or t

SEQ ID NO: 384251 - DNA, 1722 bp, Homo Sapiens; identical to SEQ ID NO: 352821
  misc_feature (1602)..(1644): n is a, c, g, or t

SEQ ID NO: 384252 - DNA, 405 bp, Homo Sapiens; identical to SEQ ID NO: 352822
  misc_feature (294)..(344): n is a, c, g, or t

SEQ ID NO: 384253 - DNA, 278 bp, Homo Sapiens; identical to SEQ ID NO: 352830

SEQ ID NO: 384254 - DNA, 1314 bp, Homo Sapiens; identical to SEQ ID NO: 352831
  misc_feature (999)..(999): n is a, c, g, or t
  misc_feature (1175)..(1175): n is a, c, g, or t
  misc_feature (1186)..(1186): n is a, c, g, or t

SEQ ID NO: 384255 - DNA, 882 bp, Homo Sapiens; identical to SEQ ID NO: 352837

SEQ ID NO: 384256 - DNA, 219 bp, Homo Sapiens; identical to SEQ ID NO: 352838

SEQ ID NO: 384257 - DNA, 493 bp, Homo Sapiens; identical to SEQ ID NO: 352847
  misc_feature (34)..(34): n is a, c, g, or t

SEQ ID NO: 384258 - DNA, 2299 bp, Homo Sapiens; identical to SEQ ID NO: 352848
  misc_feature (1765)..(1786): n is a, c, g, or t
  misc_feature (1969)..(1996): n is a, c, g, or t

SEQ ID NO: 384259 - DNA, 908 bp, Homo Sapiens; identical to SEQ ID NO: 352853
  misc_feature (54)..(62): n is a, c, g, or t

SEQ ID NO: 384260 - DNA, 1799 bp, Homo Sapiens; identical to SEQ ID NO: 352854
  misc_feature (566)..(566): n is a, c, g, or t
  misc_feature (1728)..(1728): n is a, c, g, or t

SEQ ID NO: 384261 - DNA, 1009 bp, Homo Sapiens; identical to SEQ ID NO: 352855
  misc_feature (49)..(85): n is a, c, g, or t
  misc_feature (856)..(857): n is a, c, g, or t

SEQ ID NO: 384262 - DNA, 1207 bp, Homo Sapiens; identical to SEQ ID NO: 352865
  misc_feature (33)..(34): n is a, c, g, or t
  misc_feature (58)..(58): n is a, c, g, or t
  misc_feature (65)..(65): n is a, c, g, or t
  misc_feature (75)..(75): n is a, c, g, or t
  misc_feature (124)..(124): n is a, c, g, or t
  misc_feature (160)..(161): n is a, c, g, or t
  misc_feature (247)..(247): n is a, c, g, or t
  misc_feature (510)..(520): n is a, c, g, or t

SEQ ID NO: 384263 - DNA, 898 bp, Homo Sapiens; identical to SEQ ID NO: 352866

SEQ ID NO: 384264 - DNA, 408 bp, Homo Sapiens; identical to SEQ ID NO: 352867

SEQ ID NO: 384265 - DNA, 2031 bp, Homo Sapiens; identical to SEQ ID NO: 352869
  misc_feature (175)..(175): n is a, c, g, or t
  misc_feature (372)..(410): n is a, c, g, or t
  misc_feature (961)..(987): n is a, c, g, or t

SEQ ID NO: 384266 - DNA, 484 bp, Homo Sapiens; identical to SEQ ID NO: 352870
  misc_feature (14)..(14): n is a, c, g, or t
  misc_feature (73)..(73): n is a, c, g, or t
  misc_feature (107)..(107): n is a, c, g, or t

SEQ ID NO: 384267 - DNA, 954 bp, Homo Sapiens; identical to SEQ ID NO: 352875
  misc_feature (3)..(3): n is a, c, g, or t
  misc_feature (10)..(10): n is a, c, g, or t
  misc_feature (15)..(15): n is a, c, g, or t
  misc_feature (19)..(19): n is a, c, g, or t
  misc_feature (23)..(23): n is a, c, g, or t
  misc_feature (27)..(27): n is a, c, g, or t
  misc_feature (29)..(29): n is a, c, g, or t
  misc_feature (37)..(37): n is a, c, g, or t
  misc_feature (43)..(43): n is a, c, g, or t
  misc_feature (46)..(46): n is a, c, g, or t
  misc_feature (58)..(59): n is a, c, g, or t
  misc_feature (75)..(75): n is a, c, g, or t
  misc_feature (79)..(79): n is a, c, g, or t
  misc_feature (282)..(282): n is a, c, g, or t
  misc_feature (284)..(284): n is a, c, g, or t
  misc_feature (286)..(286): n is a, c, g, or t
  misc_feature (292)..(292): n is a, c, g, or t
  misc_feature (294)..(294): n is a, c, g, or t
  misc_feature (296)..(296): n is a, c, g, or t
  misc_feature (298)..(298): n is a, c, g, or t
  misc_feature (304)..(304): n is a, c, g, or t
  misc_feature (306)..(306): n is a, c, g, or t

SEQ ID NO: 384268 - DNA, 1661 bp, Homo Sapiens; identical to SEQ ID NO: 352876
  misc_feature (40)..(40): n is a, c, g, or t
  misc_feature (1070)..(1103): n is a, c, g, or t
  misc_feature (1578)..(1614): n is a, c, g, or t

SEQ ID NO: 384269 - DNA, 879 bp, Homo Sapiens; identical to SEQ ID NO: 352877

SEQ ID NO: 384270 - DNA, 642 bp, Homo Sapiens; identical to SEQ ID NO: 352889
  misc_feature (26)..(26): n is a, c, g, or t
  misc_feature (49)..(49): n is a, c, g, or t

SEQ ID NO: 384271 - DNA, 402 bp, Homo Sapiens; identical to SEQ ID NO: 352890
  misc_feature (18)..(18): n is a, c, g, or t

SEQ ID NO: 384272 - DNA, 979 bp, Homo Sapiens; identical to SEQ ID NO: 352892
  misc_feature (96)..(96): n is a, c, g, or t
  misc_feature (446)..(446): n is a, c, g, or t

SEQ ID NO: 384273 - DNA, 2222 bp, Homo Sapiens; identical to SEQ ID NO: 352893
  misc_feature (481)..(544): n is a, c, g, or t
  misc_feature (672)..(672): n is a, c, g, or t
  misc_feature (885)..(885): n is a, c, g, or t
  misc_feature (1045)..(1045): n is a, c, g, or t
  misc_feature (1053)..(1053): n is a, c, g, or t
  misc_feature (1121)..(1121): n is a, c, g, or t
  misc_feature (1134)..(1134): n is a, c, g, or t
  misc_feature (1136)..(1136): n is a, c, g, or t
  misc_feature (1152)..(1154): n is a, c, g, or t
  misc_feature (1157)..(1158): n is a, c, g, or t
  misc_feature (1169)..(1169): n is a, c, g, or t
  misc_feature (1176)..(1176): n is a, c, g, or t
  misc_feature (1203)..(1203): n is a, c, g, or t
  misc_feature (1327)..(1327): n is a, c, g, or t
  misc_feature (1340)..(1340): n is a, c, g, or t
  misc_feature (1347)..(1347): n is a, c, g, or t
  misc_feature (1361)..(1364): n is a, c, g, or t
  misc_feature (1366)..(1367): n is a, c, g, or t
  misc_feature (1379)..(1379): n is a, c, g, or t
  misc_feature (1389)..(1389): n is a, c, g, or t
  misc_feature (1400)..(1400): n is a, c, g, or t
  misc_feature (1407)..(1408): n is a, c, g, or t
  misc_feature (1413)..(1413): n is a, c, g, or t
  misc_feature (2181)..(2182): n is a, c, g, or t

SEQ ID NO: 384274 - DNA, 756 bp, Homo Sapiens; identical to SEQ ID NO: 352902
  misc_feature (133)..(133): n is a, c, g, or t
  misc_feature (282)..(282): n is a, c, g, or t
  misc_feature (324)..(418): n is a, c, g, or t

SEQ ID NO: 384275 - DNA, 561 bp, Homo Sapiens; identical to SEQ ID NO: 352903
  misc_feature (66)..(190): n is a, c, g, or t

SEQ ID NO: 384276 - DNA, 1661 bp, Homo Sapiens; identical to SEQ ID NO: 352904
  misc_feature (796)..(855): n is a, c, g, or t
  misc_feature (1213)..(1213): n is a, c, g, or t
  misc_feature (1298)..(1298): n is a, c, g, or t

SEQ ID NO: 384277 - DNA, 887 bp, Homo Sapiens; identical to SEQ ID NO: 352905
  misc_feature (278)..(278): n is a, c, g, or t

SEQ ID NO: 384278 - DNA, 481 bp, Homo Sapiens; identical to SEQ ID NO: 352906

SEQ ID NO: 384279 - DNA, 1228 bp, Homo Sapiens; identical to SEQ ID NO: 352908

SEQ ID NO: 384280 - DNA, 652 bp, Homo Sapiens; identical to SEQ ID NO: 352909
  misc_feature (249)..(249): n is a, c, g, or t

SEQ ID NO: 384281 - DNA, 1073 bp, Homo Sapiens; identical to SEQ ID NO: 352917

SEQ ID NO: 384282 - DNA, 1221 bp, Homo Sapiens; identical to SEQ ID NO: 352918
  misc_feature (111)..(150): n is a, c, g, or t
  misc_feature (336)..(346): n is a, c, g, or t
  misc_feature (1179)..(1179): n is a, c, g, or t

SEQ ID NO: 384283 - DNA, 2325 bp, Homo Sapiens; identical to SEQ ID NO: 352920
  misc_feature (2020)..(2058): n is a, c, g, or t

SEQ ID NO: 384284 - DNA, 1286 bp, Homo Sapiens; identical to SEQ ID NO: 352921
  misc_feature (1217)..(1217): n is a, c, g, or t

SEQ ID NO: 384285 - DNA, 960 bp, Homo Sapiens; identical to SEQ ID NO: 352923
  misc_feature (120)..(197): n is a, c, g, or t

SEQ ID NO: 384286 - DNA, 1461 bp, Homo Sapiens; identical to SEQ ID NO: 352924
  misc_feature (563)..(637): n is a, c, g, or t

SEQ ID NO: 384287 - DNA, 441 bp, Homo Sapiens; identical to SEQ ID NO: 352926
  misc_feature (123)..(123): n is a, c, g, or t
  misc_feature (428)..(428): n is a, c, g, or t

SEQ ID NO: 384288 - DNA, 889 bp, Homo Sapiens; identical to SEQ ID NO: 352927
  misc_feature (327)..(348): n is a, c, g, or t
  misc_feature (664)..(689): n is a, c, g, or t
  misc_feature (736)..(736): n is a, c, g, or t
  misc_feature (783)..(786): n is a, c, g, or t
  misc_feature (788)..(788): n is a, c, g, or t
  misc_feature (806)..(806): n is a, c, g, or t

SEQ ID NO: 384289 - DNA, 881 bp, Homo Sapiens; identical to SEQ ID NO: 352928

SEQ ID NO: 384290 - DNA, 647 bp, Homo Sapiens; identical to SEQ ID NO: 4629

SEQ ID NO: 384291 - DNA, 833 bp, Homo Sapiens; identical to SEQ ID NO: 352941
  misc_feature (742)..(742): n is a, c, g, or t

SEQ ID NO: 384292 - DNA, 1433 bp, Homo Sapiens; identical to SEQ ID NO: 352942
  misc_feature (844)..(980): n is a, c, g, or t
  misc_feature (989)..(1127): n is a, c, g, or t
  misc_feature (1231)..(1239): n is a, c, g, or t
  misc_feature (1305)..(1313): n is a, c, g, or t

SEQ ID NO: 384293 - DNA, 442 bp, Homo Sapiens; identical to SEQ ID NO: 352943
  misc_feature (21)..(21): n is a, c, g, or t
  misc_feature (26)..(26): n is a, c, g, or t
  misc_feature (41)..(41): n is a, c, g, or t
  misc_feature (47)..(47): n is a, c, g, or t
  misc_feature (263)..(263): n is a, c, g, or t
  misc_feature (271)..(271): n is a, c, g, or t

SEQ ID NO: 384294 - DNA, 505 bp, Homo Sapiens; identical to SEQ ID NO: 352944
  misc_feature (408)..(408): n is a, c, g, or t
  misc_feature (457)..(457): n is a, c, g, or t
  misc_feature (465)..(465): n is a, c, g, or t

SEQ ID NO: 384295 - DNA, 950 bp, Homo Sapiens; identical to SEQ ID NO: 352945
  misc_feature (230)..(244): n is a, c, g, or t

SEQ ID NO: 384296 - DNA, 2260 bp, Homo Sapiens; identical to SEQ ID NO: 352953

SEQ ID NO: 384297 - DNA, 1084 bp, Homo Sapiens; identical to SEQ ID NO: 352954

SEQ ID NO: 384298 - DNA, 1279 bp, Homo Sapiens; identical to SEQ ID NO: 352955
  misc_feature (1263)..(1263): n is a, c, g, or t

SEQ ID NO: 384299 - DNA, 1575 bp, Homo Sapiens; identical to SEQ ID NO: 352963
  misc_feature (32)..(33): n is a, c, g, or t
  misc_feature (118)..(121): n is a, c, g, or t
  misc_feature (127)..(127): n is a, c, g, or t
  misc_feature (138)..(138): n is a, c, g, or t
  misc_feature (151)..(153): n is a, c, g, or t
  misc_feature (157)..(158): n is a, c, g, or t
  misc_feature (163)..(163): n is a, c, g, or t
  misc_feature (166)..(166): n is a, c, g, or t
  misc_feature (168)..(168): n is a, c, g, or t
  misc_feature (170)..(170): n is a, c, g, or t
  misc_feature (277)..(277): n is a, c, g, or t
  misc_feature (319)..(319): n is a, c, g, or t
  misc_feature (323)..(323): n is a, c, g, or t
  misc_feature (399)..(399): n is a, c, g, or t
  misc_feature (474)..(474): n is a, c, g, or t
  misc_feature (496)..(496): n is a, c, g, or t
  misc_feature (584)..(584): n is a, c, g, or t
  misc_feature (586)..(587): n is a, c, g, or t

SEQ ID NO: 384300 - DNA, 770 bp, Homo Sapiens; identical to SEQ ID NO: 352964

SEQ ID NO: 384301 - DNA, 1390 bp, Homo Sapiens; identical to SEQ ID NO: 352965
  misc_feature (1249)..(1249): n is a, c, g, or t

SEQ ID NO: 384302 - DNA, 836 bp, Homo Sapiens; identical to SEQ ID NO: 352966

SEQ ID NO: 384303 - DNA, 324 bp, Homo Sapiens; identical to SEQ ID NO: 352967

SEQ ID NO: 384304 - DNA, 364 bp, Homo Sapiens; identical to SEQ ID NO: 352968
  misc_feature (3)..(3): n is a, c, g, or t

SEQ ID NO: 384305 - DNA, 350 bp, Homo Sapiens; identical to SEQ ID NO: 352973
  misc_feature (49)..(49): n is a, c, g, or t
  misc_feature (70)..(70): n is a, c, g, or t
  misc_feature (75)..(101): n is a, c, g, or t

SEQ ID NO: 384306 - DNA, 747 bp, Homo Sapiens; identical to SEQ ID NO: 352974
  misc_feature (55)..(81): n is a, c, g, or t
  misc_feature (481)..(505): n is a, c, g, or t

SEQ ID NO: 384307 - DNA, 1030 bp, Homo Sapiens; identical to SEQ ID NO: 352975
  misc_feature (280)..(280): n is a, c, g, or t

SEQ ID NO: 384308 - DNA, 1447 bp, Homo Sapiens; identical to SEQ ID NO: 352976
  misc_feature (22)..(22): n is a, c, g, or t
  misc_feature (32)..(32): n is a, c, g, or t
  misc_feature (41)..(41): n is a, c, g, or t
  misc_feature (44)..(44): n is a, c, g, or t
  misc_feature (59)..(59): n is a, c, g, or t
  misc_feature (70)..(70): n is a, c, g, or t
  misc_feature (76)..(76): n is a, c, g, or t
  misc_feature (115)..(115): n is a, c, g, or t
  misc_feature (442)..(955): n is a, c, g, or t
  misc_feature (1389)..(1398): n is a, c, g, or t

SEQ ID NO: 384309 - DNA, 795 bp, Homo Sapiens; identical to SEQ ID NO: 353002
  misc_feature (116)..(341): n is a, c, g, or t
  misc_feature (345)..(345): n is a, c, g, or t
  misc_feature (441)..(449): n is a, c, g, or t
  misc_feature (524)..(571): n is a, c, g, or t
  misc_feature (794)..(794): n is a, c, g, or t

SEQ ID NO: 384310 - DNA, 1634 bp, Homo Sapiens; identical to SEQ ID NO: 353003
  misc_feature (762)..(774): n is a, c, g, or t
  misc_feature (1134)..(1175): n is a, c, g, or t
  misc_feature (1279)..(1280): n is a, c, g, or t
  misc_feature (1360)..(1410): n is a, c, g, or t
  misc_feature (1615)..(1615): n is a, c, g, or t

SEQ ID NO: 384311 - DNA, 740 bp, Homo Sapiens; identical to SEQ ID NO: 353013
  misc_feature (115)..(232): n is a, c, g, or t

SEQ ID NO: 384312 - DNA, 384 bp, Homo Sapiens; identical to SEQ ID NO: 353014

SEQ ID NO: 384313 - DNA, 448 bp, Homo Sapiens; identical to SEQ ID NO: 353015
  misc_feature (387)..(387): n is a, c, g, or t
  misc_feature (426)..(426): n is a, c, g, or t

SEQ ID NO: 384314 - DNA, 962 bp, Homo Sapiens; identical to SEQ ID NO: 353016
  misc_feature (65)..(143): n is a, c, g, or t
  misc_feature (261)..(316): n is a, c, g, or t
  misc_feature (325)..(376): n is a, c, g, or t

SEQ ID NO: 384315 - DNA, 2061 bp, Homo Sapiens; identical to SEQ ID NO: 353027
  misc_feature (46)..(46): n is a, c, g, or t
  misc_feature (79)..(79): n is a, c, g, or t
  misc_feature (89)..(89): n is a, c, g, or t
  misc_feature (94)..(94): n is a, c, g, or t
  misc_feature (96)..(96): n is a, c, g, or t
  misc_feature (99)..(99): n is a, c, g, or t
  misc_feature (103)..(104): n is a, c, g, or t
  misc_feature (106)..(106): n is a, c, g, or t
  misc_feature (117)..(117): n is a, c, g, or t
  misc_feature (119)..(119): n is a, c, g, or t
  misc_feature (124)..(124): n is a, c, g, or t
  misc_feature (127)..(127): n is a, c, g, or t
  misc_feature (150)..(150): n is a, c, g, or t
  misc_feature (165)..(165): n is a, c, g, or t
  misc_feature (173)..(173): n is a, c, g, or t
  misc_feature (179)..(179): n is a, c, g, or t
  misc_feature (182)..(182): n is a, c, g, or t
  misc_feature (210)..(210): n is a, c, g, or t
  misc_feature (213)..(213): n is a, c, g, or t
  misc_feature (215)..(215): n is a, c, g, or t
  misc_feature (217)..(217): n is a, c, g, or t
  misc_feature (225)..(225): n is a, c, g, or t
  misc_feature (229)..(229): n is a, c, g, or t
  misc_feature (981)..(993): n is a, c, g, or t
  misc_feature (1022)..(1022): n is a, c, g, or t

SEQ ID NO: 384316 - DNA, 455 bp, Homo Sapiens; identical to SEQ ID NO: 353028
  misc_feature (19)..(19): n is a, c, g, or t
  misc_feature (50)..(50): n is a, c, g, or t

SEQ ID NO: 384317 - DNA, 1246 bp, Homo Sapiens; identical to SEQ ID NO: 353032
  misc_feature (677)..(677): n is a, c, g, or t
  misc_feature (688)..(688): n is a, c, g, or t
  misc_feature (690)..(690): n is a, c, g, or t
  misc_feature (825)..(825): n is a, c, g, or t
  misc_feature (834)..(834): n is a, c, g, or t
  misc_feature (840)..(840): n is a, c, g, or t
  misc_feature (843)..(843): n is a, c, g, or t
  misc_feature (862)..(862): n is a, c, g, or t
  misc_feature (873)..(873): n is a, c, g, or t
  misc_feature (878)..(881): n is a, c, g, or t
  misc_feature (883)..(883): n is a, c, g, or t
  misc_feature (888)..(888): n is a, c, g, or t
  misc_feature (893)..(893): n is a, c, g, or t
  misc_feature (895)..(897): n is a, c, g, or t
  misc_feature (899)..(899): n is a, c, g, or t
  misc_feature (918)..(918): n is a, c, g, or t
  misc_feature (925)..(926): n is a, c, g, or t
  misc_feature (929)..(931): n is a, c, g, or t
  misc_feature (939)..(940): n is a, c, g, or t
  misc_feature (942)..(942): n is a, c, g, or t
  misc_feature (949)..(949): n is a, c, g, or t
  misc_feature (952)..(952): n is a, c, g, or t
  misc_feature (1004)..(1004): n is a, c, g, or t
  misc_feature (1023)..(1023): n is a, c, g, or t
  misc_feature (1029)..(1029): n is a, c, g, or t
  misc_feature (1060)..(1060): n is a, c, g, or t
  misc_feature (1067)..(1067): n is a, c, g, or t
  misc_feature (1071)..(1072): n is a, c, g, or t
  misc_feature (1093)..(1093): n is a, c, g, or t
  misc_feature (1096)..(1096): n is a, c, g, or t
  misc_feature (1122)..(1122): n is a, c, g, or t
  misc_feature (1146)..(1146): n is a, c, g, or t
  misc_feature (1212)..(1212): n is a, c, g, or t
  misc_feature (1220)..(1220): n is a, c, g, or t
  misc_feature (1237)..(1237): n is a, c, g, or t

SEQ ID NO: 384318 - DNA, 771 bp, Homo Sapiens; identical to SEQ ID NO: 353033

SEQ ID NO: 384319 - DNA, 782 bp, Homo Sapiens; identical to SEQ ID NO: 353052

SEQ ID NO: 384320 - DNA, 393 bp, Homo Sapiens; identical to SEQ ID NO: 353053

SEQ ID NO: 384321 - DNA, 1503 bp, Homo Sapiens; identical to SEQ ID NO: 353076
  misc_feature (111)..(119): n is a, c, g, or t
  misc_feature (1099)..(1148): n is a, c, g, or t

SEQ ID NO: 384322 - DNA, 1401 bp, Homo Sapiens; identical to SEQ ID NO: 353077

SEQ ID NO: 384323 - DNA, 951 bp, Homo Sapiens; identical to SEQ ID NO: 353078
  misc_feature (49)..(85): n is a, c, g, or t

SEQ ID NO: 384324 - DNA, 1209 bp, Homo Sapiens; identical to SEQ ID NO: 353080
  misc_feature (7)..(7): n is a, c, g, or t
  misc_feature (15)..(15): n is a, c, g, or t
  misc_feature (21)..(21): n is a, c, g, or t
  misc_feature (28)..(29): n is a, c, g, or t
  misc_feature (40)..(40): n is a, c, g, or t
  misc_feature (47)..(47): n is a, c, g, or t
  misc_feature (52)..(52): n is a, c, g, or t
  misc_feature (57)..(57): n is a, c, g, or t
  misc_feature (86)..(88): n is a, c, g, or t
  misc_feature (96)..(96): n is a, c, g, or t
  misc_feature (100)..(100): n is a, c, g, or t
  misc_feature (106)..(106): n is a, c, g, or t
  misc_feature (133)..(133): n is a, c, g, or t
  misc_feature (168)..(176): n is a, c, g, or t
  misc_feature (179)..(205): n is a, c, g, or t
  misc_feature (427)..(435): n is a, c, g, or t
  misc_feature (466)..(486): n is a, c, g, or t

SEQ ID NO: 384325 - DNA, 2248 bp, Homo Sapiens; identical to SEQ ID NO: 353081
  misc_feature (1990)..(1998): n is a, c, g, or t
  misc_feature (2221)..(2221): n is a, c, g, or t

SEQ ID NO: 384326 - DNA, 894 bp, Homo Sapiens; identical to SEQ ID NO: 353082
  misc_feature (65)..(65): n is a, c, g, or t
  misc_feature (68)..(68): n is a, c, g, or t
  misc_feature (75)..(75): n is a, c, g, or t
  misc_feature (88)..(88): n is a, c, g, or t
  misc_feature (99)..(99): n is a, c, g, or t
  misc_feature (136)..(136): n is a, c, g, or t
  misc_feature (156)..(156): n is a, c, g, or t
  misc_feature (182)..(182): n is a, c, g, or t
  misc_feature (193)..(193): n is a, c, g, or t
  misc_feature (195)..(195): n is a, c, g, or t
  misc_feature (282)..(282): n is a, c, g, or t
  misc_feature (733)..(733): n is a, c, g, or t

SEQ ID NO: 384327 - DNA, 372 bp, Homo Sapiens; identical to SEQ ID NO: 353087

SEQ ID NO: 384328 - DNA, 1185 bp, Homo Sapiens; identical to SEQ ID NO: 353088

SEQ ID NO: 384329 - DNA, 1209 bp, Homo Sapiens; identical to SEQ ID NO: 353090
  misc_feature (504)..(504): n is a, c, g, or t
  misc_feature (753)..(753): n is a, c, g, or t
  misc_feature (1184)..(1184): n is a, c, g, or t
  misc_feature (1209)..(1209): n is a, c, g, or t

SEQ ID NO: 384330 - DNA, 461 bp, Homo Sapiens; identical to SEQ ID NO: 353091
  misc_feature (23)..(23): n is a, c, g, or t
  misc_feature (56)..(56): n is a, c, g, or t
  misc_feature (105)..(105): n is a, c, g, or t
  misc_feature (120)..(120): n is a, c, g, or t

SEQ ID NO: 384331 - DNA, 1104 bp, Homo Sapiens; identical to SEQ ID NO: 353094

SEQ ID NO: 384332 - DNA, 1138 bp, Homo Sapiens; identical to SEQ ID NO: 353095
  misc_feature (42)..(42): n is a, c, g, or t
  misc_feature (50)..(50): n is a, c, g, or t
  misc_feature (1071)..(1071): n is a, c, g, or t
  misc_feature (1091)..(1091): n is a, c, g, or t

SEQ ID NO: 384333 - DNA, 1888 bp, Homo Sapiens; identical to SEQ ID NO: 353102
  misc_feature (96)..(96): n is a, c, g, or t
  misc_feature (153)..(153): n is a, c, g, or t
  misc_feature (268)..(338): n is a, c, g, or t
  misc_feature (384)..(421): n is a, c, g, or t
  misc_feature (1767)..(1767): n is a, c, g, or t
  misc_feature (1855)..(1855): n is a, c, g, or t

SEQ ID NO: 384334 - DNA, 1521 bp, Homo Sapiens; identical to SEQ ID NO: 353103
  misc_feature (830)..(866): n is a, c, g, or t
  misc_feature (950)..(978): n is a, c, g, or t

SEQ ID NO: 384335 - DNA, 1337 bp, Homo Sapiens; identical to SEQ ID NO: 353109
  misc_feature (666)..(674): n is a, c, g, or t
  misc_feature (771)..(820): n is a, c, g, or t
  misc_feature (1171)..(1204): n is a, c, g, or t
  misc_feature (1299)..(1299): n is a, c, g, or t

SEQ ID NO: 384336 - DNA, 663 bp, Homo Sapiens; identical to SEQ ID NO: 353110
  misc_feature (133)..(167): n is a, c, g, or t
  misc_feature (518)..(569): n is a, c, g, or t

SEQ ID NO: 384337 - DNA, 758 bp, Homo Sapiens; identical to SEQ ID NO: 353112

SEQ ID NO: 384338 - DNA, 1304 bp, Homo Sapiens; identical to SEQ ID NO: 353113
  misc_feature (158)..(197): n is a, c, g, or t

SEQ ID NO: 384339 - DNA, 1602 bp, Homo Sapiens; identical to SEQ ID NO: 353114
  misc_feature (981)..(1066): n is a, c, g, or t

SEQ ID NO: 384340 - DNA, 2135 bp, Homo Sapiens; identical to SEQ ID NO: 353128
  misc_feature (2108)..(2108): n is a, c, g, or t

SEQ ID NO: 384341 - DNA, 987 bp, Homo Sapiens; identical to SEQ ID NO: 353129
  misc_feature (684)..(704): n is a, c, g, or t

SEQ ID NO: 384342 - DNA, 163 bp, Homo Sapiens; identical to SEQ ID NO: 353132

SEQ ID NO: 384343 - DNA, 477 bp, Homo Sapiens; identical to SEQ ID NO: 353133
  misc_feature (35)..(37): n is a, c, g, or t
  misc_feature (44)..(44): n is a, c, g, or t
  misc_feature (49)..(49): n is a, c, g, or t
  misc_feature (52)..(52): n is a, c, g, or t

SEQ ID NO: 384344 - DNA, 787 bp, Homo Sapiens; identical to SEQ ID NO: 353135
  misc_feature (765)..(765): n is a, c, g, or t

SEQ ID NO: 384345 - DNA, 439 bp, Homo Sapiens; identical to SEQ ID NO: 353136

SEQ ID NO: 384346 - DNA, 894 bp, Homo Sapiens; identical to SEQ ID NO: 353139
  misc_feature (201)..(247): n is a, c, g, or t
  misc_feature (327)..(343): n is a, c, g, or t

SEQ ID NO: 384347 - DNA, 431 bp, Homo Sapiens; identical to SEQ ID NO: 353140
  misc_feature (16)..(16): n is a, c, g, or t
  misc_feature (28)..(28): n is a, c, g, or t
  misc_feature (51)..(51): n is a, c, g, or t

SEQ ID NO: 384348 - DNA, 1089 bp, Homo Sapiens; identical to SEQ ID NO: 353144
  misc_feature (33)..(33): n is a, c, g, or t

SEQ ID NO: 384349 - DNA, 1002 bp, Homo Sapiens; identical to SEQ ID NO: 353145
  misc_feature (314)..(314): n is a, c, g, or t

SEQ ID NO: 384350 - DNA, 2785 bp, Homo Sapiens; identical to SEQ ID NO: 353151
  misc_feature (405)..(405): n is a, c, g, or t
  misc_feature (409)..(410): n is a, c, g, or t

SEQ ID NO: 384351 - DNA, 683 bp, Homo Sapiens; identical to SEQ ID NO: 353152
  misc_feature (62)..(218): n is a, c, g, or t

SEQ ID NO: 384352 - DNA, 634 bp, Homo Sapiens; identical to SEQ ID NO: 353153

SEQ ID NO: 384353 - DNA, 466 bp, Homo Sapiens; identical to SEQ ID NO: 353154
  misc_feature (126)..(126): n is a, c, g, or t
  misc_feature (129)..(129): n is a, c, g, or t
  misc_feature (455)..(455): n is a, c, g, or t

SEQ ID NO: 384354 - DNA, 448 bp, Homo Sapiens; identical to SEQ ID NO: 353159
  misc_feature (28)..(28): n is a, c, g, or t
  misc_feature (73)..(73): n is a, c, g, or t
  misc_feature (91)..(91): n is a, c, g, or t

SEQ ID NO: 384355 - DNA, 493 bp, Homo Sapiens; identical to SEQ ID NO: 353160
  misc_feature (209)..(209): n is a, c, g, or t

SEQ ID NO: 384356 - DNA, 1080 bp, Homo Sapiens; identical to SEQ ID NO: 353161

SEQ ID NO: 384357 - DNA, 707 bp, Homo Sapiens; identical to SEQ ID NO: 353162

SEQ ID NO: 384358 - DNA, 1785 bp, Homo Sapiens; identical to SEQ ID NO: 353171
  misc_feature (389)..(401): n is a, c, g, or t

SEQ ID NO: 384359 - DNA, 417 bp, Homo Sapiens; identical to SEQ ID NO: 353172

SEQ ID NO: 384360 - DNA, 773 bp, Homo Sapiens; identical to SEQ ID NO: 353176

SEQ ID NO: 384361 - DNA, 721 bp, Homo Sapiens; identical to SEQ ID NO: 353177
  misc_feature (373)..(373): n is a, c, g, or t

SEQ ID NO: 384362 - DNA, 477 bp, Homo Sapiens; identical to SEQ ID NO: 353178
  misc_feature (24)..(24): n is a, c, g, or t
  misc_feature (44)..(44): n is a, c, g, or t
  misc_feature (51)..(51): n is a, c, g, or t
  misc_feature (63)..(63): n is a, c, g, or t
  misc_feature (80)..(80): n is a, c, g, or t

SEQ ID NO: 384363 - DNA, 2108 bp, Homo Sapiens; identical to SEQ ID NO: 353186
  misc_feature (55)..(55): n is a, c, g, or t
  misc_feature (108)..(290): n is a, c, g, or t
  misc_feature (1528)..(1528): n is a, c, g, or t
  misc_feature (1537)..(1537): n is a, c, g, or t
  misc_feature (1583)..(1583): n is a, c, g, or t
  misc_feature (1634)..(1634): n is a, c, g, or t
  misc_feature (1648)..(1648): n is a, c, g, or t
  misc_feature (1653)..(1653): n is a, c, g, or t
  misc_feature (1655)..(1655): n is a, c, g, or t
  misc_feature (1668)..(1668): n is a, c, g, or t
  misc_feature (1670)..(1670): n is a, c, g, or t
  misc_feature (1674)..(1674): n is a, c, g, or t
  misc_feature (1678)..(1678): n is a, c, g, or t
  misc_feature (1683)..(1683): n is a, c, g, or t
  misc_feature (1694)..(1694): n is a, c, g, or t
  misc_feature (1705)..(1708): n is a, c, g, or t
  misc_feature (1717)..(1718): n is a, c, g, or t
  misc_feature (1720)..(1720): n is a, c, g, or t
  misc_feature (1723)..(1724): n is a, c, g, or t
  misc_feature (1734)..(1734): n is a, c, g, or t
  misc_feature (1743)..(1743): n is a, c, g, or t
  misc_feature (1756)..(1756): n is a, c, g, or t
  misc_feature (1759)..(1759): n is a, c, g, or t
  misc_feature (1763)..(1763): n is a, c, g, or t
  misc_feature (1778)..(1779): n is a, c, g, or t
  misc_feature (1784)..(1784): n is a, c, g, or t
  misc_feature (1788)..(1788): n is a, c, g, or t
  misc_feature (1801)..(1801): n is a, c, g, or t
  misc_feature (1879)..(1879): n is a, c, g, or t
  misc_feature (1971)..(1971): n is a, c, g, or t
  misc_feature (1986)..(1986): n is a, c, g, or t
  misc_feature (1995)..(1995): n is a, c, g, or t
  misc_feature (2008)..(2008): n is a, c, g, or t
  misc_feature (2016)..(2016): n is a, c, g, or t
  misc_feature (2036)..(2036): n is a, c, g, or t
  misc_feature (2048)..(2048): n is a, c, g, or t
  misc_feature (2063)..(2063): n is a, c, g, or t
  misc_feature (2066)..(2067): n is a, c, g, or t
  misc_feature (2093)..(2093): n is a, c, g, or t
  misc_feature (2101)..(2101): n is a, c, g, or t
  misc_feature (2103)..(2104): n is a, c, g, or t

SEQ ID NO: 384364 - DNA, 316 bp, Homo Sapiens; identical to SEQ ID NO: 353187
  misc_feature (13)..(13): n is a, c, g, or t
  misc_feature (213)..(213): n is a, c, g, or t
  misc_feature (222)..(222): n is a, c, g, or t
  misc_feature (285)..(285): n is a, c, g, or t

SEQ ID NO: 384365 - DNA, 788 bp, Homo Sapiens; identical to SEQ ID NO: 353194

SEQ ID NO: 384366 - DNA, 1226 bp, Homo Sapiens; identical to SEQ ID NO: 353195
  misc_feature (465)..(465): n is a, c, g, or t
  misc_feature (1045)..(1059): n is a, c, g, or t

SEQ ID NO: 384367 - DNA, 853 bp, Homo Sapiens; identical to SEQ ID NO: 353202
  misc_feature (786)..(797): n is a, c, g, or t

SEQ ID NO: 384368 - DNA, 579 bp, Homo Sapiens; identical to SEQ ID NO: 353203
  misc_feature (431)..(442): n is a, c, g, or t

SEQ ID NO: 384369 - DNA, 370 bp, Homo Sapiens; identical to SEQ ID NO: 353206
  misc_feature (170)..(170): n is a, c, g, or t
  misc_feature (193)..(267): n is a, c, g, or t
  misc_feature (335)..(335): n is a, c, g, or t
  misc_feature (357)..(357): n is a, c, g, or t

SEQ ID NO: 384370 - DNA, 556 bp, Homo Sapiens; identical to SEQ ID NO: 353207
  misc_feature (73)..(73): n is a, c, g, or t
  misc_feature (90)..(90): n is a, c, g, or t

SEQ ID NO: 384371 - DNA, 1104 bp, Homo Sapiens; identical to SEQ ID NO: 353226

SEQ ID NO: 384372 - DNA, 1140 bp, Homo Sapiens; identical to SEQ ID NO: 353227
  misc_feature (960)..(961): n is a, c, g, or t
  misc_feature (1000)..(1000): n is a, c, g, or t

SEQ ID NO: 384373 - DNA, 685 bp, Homo Sapiens; identical to SEQ ID NO: 353232
  misc_feature (266)..(280): n is a, c, g, or t
  misc_feature (612)..(612): n is a, c, g, or t

SEQ ID NO: 384374 - DNA, 1582 bp, Homo Sapiens; identical to SEQ ID NO: 353233
  misc_feature (457)..(457): n is a, c, g, or t

SEQ ID NO: 384375 - DNA, 1275 bp, Homo Sapiens; identical to SEQ ID NO: 353238
  misc_feature (906)..(943): n is a, c, g, or t

SEQ ID NO: 384376 - DNA, 853 bp, Homo Sapiens; identical to SEQ ID NO: 353239
  misc_feature (798)..(806): n is a, c, g, or t

SEQ ID NO: 384377 - DNA, 2363 bp, Homo Sapiens; identical to SEQ ID NO: 353240
  misc_feature (372)..(372): n is a, c, g, or t
  misc_feature (1082)..(1296): n is a, c, g, or t
  misc_feature (1405)..(1415): n is a, c, g, or t
  misc_feature (1949)..(1949): n is a, c, g, or t
  misc_feature (1953)..(1953): n is a, c, g, or t

SEQ ID NO: 384378 - DNA, 463 bp, Homo Sapiens; identical to SEQ ID NO: 353241

SEQ ID NO: 384379 - DNA, 593 bp, Homo Sapiens; identical to SEQ ID NO: 353245

SEQ ID NO: 384380 - DNA, 505 bp, Homo Sapiens; identical to SEQ ID NO: 353246
  misc_feature (22)..(22): n is a, c, g, or t
  misc_feature (34)..(34): n is a, c, g, or t
  misc_feature (87)..(87): n is a, c, g, or t
  misc_feature (106)..(106): n is a, c, g, or t

SEQ ID NO: 384381 - DNA, 907 bp, Homo Sapiens; identical to SEQ ID NO: 353247
  misc_feature (787)..(787): n is a, c, g, or t

SEQ ID NO: 384382 - DNA, 795 bp, Homo Sapiens; identical to SEQ ID NO: 82499

SEQ ID NO: 384383 - DNA, 1526 bp, Homo Sapiens; identical to SEQ ID NO: 353249
  misc_feature (804)..(812): n is a, c, g, or t
  misc_feature (913)..(1017): n is a, c, g, or t
  misc_feature (1161)..(1186): n is a, c, g, or t
  misc_feature (1372)..(1380): n is a, c, g, or t

SEQ ID NO: 384384 - DNA, 1102 bp, Homo Sapiens; identical to SEQ ID NO: 353250

SEQ ID NO: 384385 - DNA, 959 bp, Homo Sapiens; identical to SEQ ID NO: 353251
  misc_feature (422)..(440): n is a, c, g, or t
  misc_feature (604)..(685): n is a, c, g, or t

SEQ ID NO: 384386 - DNA, 719 bp, Homo Sapiens; identical to SEQ ID NO: 353252

SEQ ID NO: 384387 - DNA, 1159 bp, Homo Sapiens; identical to SEQ ID NO: 353253
  misc_feature (581)..(750): n is a, c, g, or t
  misc_feature (758)..(774): n is a, c, g, or t
  misc_feature (812)..(893): n is a, c, g, or t
  misc_feature (1072)..(1080): n is a, c, g, or t

SEQ ID NO: 384388 - DNA, 639 bp, Homo Sapiens; identical to SEQ ID NO: 353264

SEQ ID NO: 384389 - DNA, 408 bp, Homo Sapiens; identical to SEQ ID NO: 353265
  misc_feature (99)..(99): n is a, c, g, or t
  misc_feature (370)..(370): n is a, c, g, or t
  misc_feature (375)..(375): n is a, c, g, or t
  misc_feature (398)..(398): n is a, c, g, or t

SEQ ID NO: 384390 - DNA, 466 bp, Homo Sapiens; identical to SEQ ID NO: 353295
  misc_feature (27)..(27): n is a, c, g, or t
  misc_feature (34)..(34): n is a, c, g, or t
  misc_feature (39)..(39): n is a, c, g, or t

SEQ ID NO: 384391 - DNA, 1237 bp, Homo Sapiens; identical to SEQ ID NO: 353296

SEQ ID NO: 384392 - DNA, 1212 bp, Homo Sapiens; identical to SEQ ID NO: 353298
  misc_feature (42)..(78): n is a, c, g, or t
  misc_feature (1035)..(1036): n is a, c, g, or t
  misc_feature (1039)..(1040): n is a, c, g, or t
  misc_feature (1042)..(1052): n is a, c, g, or t
  misc_feature (1054)..(1054): n is a, c, g, or t
  misc_feature (1057)..(1060): n is a, c, g, or t

SEQ ID NO: 384393 - DNA, 594 bp, Homo Sapiens; identical to SEQ ID NO: 353299

SEQ ID NO: 384394 - DNA, 1142 bp, Homo Sapiens; identical to SEQ ID NO: 353302
  misc_feature (13)..(13): n is a, c, g, or t
  misc_feature (37)..(37): n is a, c, g, or t
  misc_feature (39)..(39): n is a, c, g, or t
  misc_feature (59)..(59): n is a, c, g, or t
  misc_feature (62)..(62): n is a, c, g, or t
  misc_feature (66)..(66): n is a, c, g, or t
  misc_feature (68)..(68): n is a, c, g, or t
  misc_feature (72)..(72): n is a, c, g, or t
  misc_feature (74)..(74): n is a, c, g, or t
  misc_feature (76)..(76): n is a, c, g, or t
  misc_feature (80)..(80): n is a, c, g, or t
  misc_feature (87)..(87): n is a, c, g, or t
  misc_feature (90)..(90): n is a, c, g, or t
  misc_feature (94)..(94): n is a, c, g, or t

SEQ ID NO: 384395 - DNA, 456 bp, Homo Sapiens; identical to SEQ ID NO: 353303
  misc_feature (31)..(31): n is a, c, g, or t
  misc_feature (61)..(61): n is a, c, g, or t
  misc_feature (68)..(68): n is a, c, g, or t
  misc_feature (271)..(271): n is a, c, g, or t

SEQ ID NO: 384396 - DNA, 1712 bp, Homo Sapiens; identical to SEQ ID NO: 353321
  misc_feature (397)..(459): n is a, c, g, or t
  misc_feature (711)..(711): n is a, c, g, or t

SEQ ID NO: 384397 - DNA, 1364 bp, Homo Sapiens; identical to SEQ ID NO: 353322
  misc_feature (1265)..(1273): n is a, c, g, or t
  misc_feature (1325)..(1325): n is a, c, g, or t
  misc_feature (1334)..(1334): n is a, c, g, or t

SEQ ID NO: 384398 - DNA, 1961 bp, Homo Sapiens; identical to SEQ ID NO: 353323

SEQ ID NO: 384399 - DNA, 1632 bp, Homo Sapiens; identical to SEQ ID NO: 353324

SEQ ID NO: 384400 - DNA, 353 bp, Homo Sapiens; identical to SEQ ID NO: 353325
  misc_feature (66)..(129): n is a, c, g, or t

SEQ ID NO: 384401 - DNA, 951 bp, Homo Sapiens; identical to SEQ ID NO: 353326
  misc_feature (16)..(16): n is a, c, g, or t
  misc_feature (97)..(160): n is a, c, g, or t
  misc_feature (385)..(479): n is a, c, g, or t
  misc_feature (562)..(625): n is a, c, g, or t

SEQ ID NO: 384402 - DNA, 807 bp, Homo Sapiens; identical to SEQ ID NO: 353327

SEQ ID NO: 384403 - DNA, 1606 bp, Homo Sapiens; identical to SEQ ID NO: 353328
  misc_feature (621)..(630): n is a, c, g, or t
  misc_feature (1228)..(1228): n is a, c, g, or t
  misc_feature (1491)..(1491): n is a, c, g, or t

SEQ ID NO: 384404 - DNA, 598 bp, Homo Sapiens; identical to SEQ ID NO: 353329
  misc_feature (2)..(2): n is a, c, g, or t

SEQ ID NO: 384405 - DNA, 434 bp, Homo Sapiens; identical to SEQ ID NO: 353330
  misc_feature (65)..(65): n is a, c, g, or t
  misc_feature (95)..(95): n is a, c, g, or t
  misc_feature (200)..(200): n is a, c, g, or t
  misc_feature (262)..(262): n is a, c, g, or t

SEQ ID NO: 384406 - DNA, 473 bp, Homo Sapiens; identical to SEQ ID NO: 353332
  misc_feature (410)..(429): n is a, c, g, or t

SEQ ID NO: 384407 - DNA, 991 bp, Homo Sapiens; identical to SEQ ID NO: 353333
  misc_feature (282)..(282): n is a, c, g, or t

SEQ ID NO: 384408 - DNA, 1277 bp, Homo Sapiens; identical to SEQ ID NO: 353339
  misc_feature (1275)..(1275): n is a, c, g, or t

SEQ ID NO: 384409 - DNA, 618 bp, Homo Sapiens; identical to SEQ ID NO: 353340
  misc_feature (17)..(17): n is a, c, g, or t
  misc_feature (37)..(37): n is a, c, g, or t
  misc_feature (47)..(47): n is a, c, g, or t
  misc_feature (159)..(195): n is a, c, g, or t
  misc_feature (286)..(313): n is a, c, g, or t

SEQ ID NO: 384410 - DNA, 1221 bp, Homo Sapiens; identical to SEQ ID NO: 353341
  misc_feature (36)..(36): n is a, c, g, or t
  misc_feature (202)..(202): n is a, c, g, or t
  misc_feature (716)..(716): n is a, c, g, or t

SEQ ID NO: 384411 - DNA, 426 bp, Homo Sapiens; identical to SEQ ID NO: 353342

SEQ ID NO: 384412 - DNA, 2353 bp, Homo Sapiens; identical to SEQ ID NO: 353344
  misc_feature (154)..(164): n is a, c, g, or t
  misc_feature (1976)..(1976): n is a, c, g, or t
  misc_feature (1979)..(1979): n is a, c, g, or t
  misc_feature (2028)..(2028): n is a, c, g, or t
  misc_feature (2215)..(2215): n is a, c, g, or t
  misc_feature (2310)..(2310): n is a, c, g, or t

SEQ ID NO: 384413 - DNA, 742 bp, Homo Sapiens; identical to SEQ ID NO: 353345
  misc_feature (206)..(217): n is a, c, g, or t

SEQ ID NO: 384414 - DNA, 1453 bp, Homo Sapiens; identical to SEQ ID NO: 353350

SEQ ID NO: 384415 - DNA, 401 bp, Homo Sapiens; identical to SEQ ID NO: 353351
  misc_feature (36)..(36): n is a, c, g, or t

SEQ ID NO: 384416 - DNA, 198 bp, Homo Sapiens; identical to SEQ ID NO: 353359

SEQ ID NO: 384417 - DNA, 495 bp, Homo Sapiens; identical to SEQ ID NO: 353360

SEQ ID NO: 384418 - DNA, 710 bp, Homo Sapiens; identical to SEQ ID NO: 353361
  misc_feature (17)..(17): n is a, c, g, or t
  misc_feature (28)..(28): n is a, c, g, or t
  misc_feature (43)..(43): n is a, c, g, or t
  misc_feature (412)..(412): n is a, c, g, or t
  misc_feature (665)..(665): n is a, c, g, or t
  misc_feature (670)..(670): n is a, c, g, or t
  misc_feature (695)..(695): n is a, c, g, or t

SEQ ID NO: 384419 - DNA, 1220 bp, Homo Sapiens; identical to SEQ ID NO: 353362
  misc_feature (189)..(321): n is a, c, g, or t

SEQ ID NO: 384420 - DNA, 932 bp, Homo Sapiens; identical to SEQ ID NO: 353363

SEQ ID NO: 384421 - DNA, 1634 bp, Homo Sapiens; identical to SEQ ID NO: 353366

SEQ ID NO: 384422 - DNA, 287 bp, Homo Sapiens; identical to SEQ ID NO: 353367

SEQ ID NO: 384423 - DNA, 620 bp, Homo Sapiens; identical to SEQ ID NO: 353370
  misc_feature (492)..(520): n is a, c, g, or t

SEQ ID NO: 384424 - DNA, 672 bp, Homo Sapiens; identical to SEQ ID NO: 353371
  misc_feature (138)..(166): n is a, c, g, or t

SEQ ID NO: 384425 - DNA, 572 bp, Homo Sapiens; identical to SEQ ID NO: 353372
  misc_feature (137)..(137): n is a, c, g, or t
  misc_feature (401)..(401): n is a, c, g, or t
  misc_feature (455)..(455): n is a, c, g, or t
  misc_feature (459)..(459): n is a, c, g, or t
  misc_feature (528)..(528): n is a, c, g, or t

SEQ ID NO: 384426 - DNA, 433 bp, Homo Sapiens; identical to SEQ ID NO: 353373

SEQ ID NO: 384427 - DNA, 1106 bp, Homo Sapiens; identical to SEQ ID NO: 353384
  misc_feature (12)..(12): n is a, c, g, or t
  misc_feature (21)..(23): n is a, c, g, or t
  misc_feature (32)..(32): n is a, c, g, or t
  misc_feature (50)..(50): n is a, c, g, or t

SEQ ID NO: 384428 - DNA, 516 bp, Homo Sapiens; identical to SEQ ID NO: 353385
  misc_feature (30)..(30): n is a, c, g, or t
  misc_feature (75)..(75): n is a, c, g, or t
  misc_feature (215)..(215): n is a, c, g, or t

SEQ ID NO: 384429 - DNA, 496 bp, Homo Sapiens; identical to SEQ ID NO: 353391
  misc_feature (104)..(124): n is a, c, g, or t

SEQ ID NO: 384430 - DNA, 460 bp, Homo Sapiens; identical to SEQ ID NO: 353392
  misc_feature (35)..(35): n is a, c, g, or t
  misc_feature (50)..(50): n is a, c, g, or t
  misc_feature (58)..(84): n is a, c, g, or t
  misc_feature (90)..(90): n is a, c, g, or t
  misc_feature (137)..(137): n is a, c, g, or t
  misc_feature (156)..(156): n is a, c, g, or t

SEQ ID NO: 384431 - DNA, 755 bp, Homo Sapiens; identical to SEQ ID NO: 353393

SEQ ID NO: 384432 - DNA, 402 bp, Homo Sapiens; identical to SEQ ID NO: 353394
  misc_feature (42)..(42): n is a, c, g, or t

SEQ ID NO: 384433 - DNA, 306 bp, Homo Sapiens; identical to SEQ ID NO: 353406

SEQ ID NO: 384434 - DNA, 545 bp, Homo Sapiens; identical to SEQ ID NO: 353407
  misc_feature (436)..(436): n is a, c, g, or t
  misc_feature (471)..(471): n is a, c, g, or t
  misc_feature (478)..(478): n is a, c, g, or t
  misc_feature (501)..(501): n is a, c, g, or t
  misc_feature (513)..(513): n is a, c, g, or t
  misc_feature (523)..(523): n is a, c, g, or t

SEQ ID NO: 384435 - DNA, 314 bp, Homo Sapiens; identical to SEQ ID NO: 353408
  misc_feature (4)..(4): n is a, c, g, or t
  misc_feature (51)..(51): n is a, c, g, or t
  misc_feature (170)..(170): n is a, c, g, or t
  misc_feature (180)..(180): n is a, c, g, or t

SEQ ID NO: 384436 - DNA, 1667 bp, Homo Sapiens; identical to SEQ ID NO: 353409
  misc_feature (64)..(64): n is a, c, g, or t
  misc_feature (419)..(419): n is a, c, g, or t

SEQ ID NO: 384437 - DNA, 1789 bp, Homo Sapiens; identical to SEQ ID NO: 353410

SEQ ID NO: 384438 - DNA, 584 bp, Homo Sapiens; identical to SEQ ID NO: 353415
  misc_feature (313)..(313): n is a, c, g, or t
  misc_feature (543)..(543): n is a, c, g, or t

SEQ ID NO: 384439 - DNA, 512 bp, Homo Sapiens; identical to SEQ ID NO: 353416
  misc_feature (36)..(36): n is a, c, g, or t
  misc_feature (48)..(48): n is a, c, g, or t

SEQ ID NO: 384440 - DNA, 1094 bp, Homo Sapiens; identical to SEQ ID NO: 353423
  misc_feature (444)..(551): n is a, c, g, or t
  misc_feature (600)..(638): n is a, c, g, or t
  misc_feature (802)..(802): n is a, c, g, or t

SEQ ID NO: 384441 - DNA, 614 bp, Homo Sapiens; identical to SEQ ID NO: 353424
  misc_feature (596)..(596): n is a, c, g, or t

SEQ ID NO: 384442 - DNA, 383 bp, Homo Sapiens; identical to SEQ ID NO: 353425
  misc_feature (83)..(169): n is a, c, g, or t
  misc_feature (285)..(334): n is a, c, g, or t
  misc_feature (372)..(372): n is a, c, g, or t

SEQ ID NO: 384443 - DNA, 458 bp, Homo Sapiens; identical to SEQ ID NO: 353426
  misc_feature (1)..(1): n is a, c, g, or t
  misc_feature (34)..(34): n is a, c, g, or t
  misc_feature (37)..(37): n is a, c, g, or t
  misc_feature (54)..(54): n is a, c, g, or t
  misc_feature (454)..(454): n is a, c, g, or t

SEQ ID NO: 384444 - DNA, 425 bp, Homo Sapiens; identical to SEQ ID NO: 353427
  misc_feature (49)..(49): n is a, c, g, or t
  misc_feature (85)..(85): n is a, c, g, or t
  misc_feature (91)..(140): n is a, c, g, or t
  misc_feature (184)..(184): n is a, c, g, or t
  misc_feature (196)..(196): n is a, c, g, or t
  misc_feature (257)..(343): n is a, c, g, or t

SEQ ID NO: 384445 - DNA, 592 bp, Homo Sapiens; identical to SEQ ID NO: 353428

SEQ ID NO: 384446 - DNA, 3297 bp, Homo Sapiens; identical to SEQ ID NO: 353432
  misc_feature (2735)..(2828): n is a, c, g, or t
  misc_feature (2985)..(3208): n is a, c, g, or t

SEQ ID NO: 384447 - DNA, 460 bp, Homo Sapiens; identical to SEQ ID NO: 353433
  misc_feature (383)..(383): n is a, c, g, or t

SEQ ID NO: 384448 - DNA, 568 bp, Homo Sapiens; identical to SEQ ID NO: 353439
  misc_feature (41)..(90): n is a, c, g, or t

SEQ ID NO: 384449 - DNA, 764 bp, Homo Sapiens; identical to SEQ ID NO: 353440
  misc_feature (90)..(139): n is a, c, g, or t
  misc_feature (475)..(522): n is a, c, g, or t

SEQ ID NO: 384450 - DNA, 975 bp, Homo Sapiens; identical to SEQ ID NO: 353441
  misc_feature (627)..(672): n is a, c, g, or t

SEQ ID NO: 384451 - DNA, 408 bp, Homo Sapiens; identical to SEQ ID NO: 353442
  misc_feature (25)..(25): n is a, c, g, or t
  misc_feature (54)..(70): n is a, c, g, or t
  misc_feature (292)..(292): n is a, c, g, or t
  misc_feature (321)..(321): n is a, c, g, or t
  misc_feature (335)..(335): n is a, c, g, or t
  misc_feature (349)..(349): n is a, c, g, or t
  misc_feature (375)..(375): n is a, c, g, or t
  misc_feature (381)..(381): n is a, c, g, or t
  misc_feature (392)..(392): n is a, c, g, or t

SEQ ID NO: 384452 - DNA, 2960 bp, Homo Sapiens; identical to SEQ ID NO: 353446
  misc_feature (22)..(22): n is a, c, g, or t
  misc_feature (25)..(25): n is a, c, g, or t
  misc_feature (34)..(34): n is a, c, g, or t
  misc_feature (101)..(153): n is a, c, g, or t
  misc_feature (249)..(267): n is a, c, g, or t

SEQ ID NO: 384453 - DNA, 1026 bp, Homo Sapiens; identical to SEQ ID NO: 353447
  misc_feature (11)..(11): n is a, c, g, or t
  misc_feature (20)..(20): n is a, c, g, or t
  misc_feature (948)..(948): n is a, c, g, or t
  misc_feature (950)..(950): n is a, c, g, or t
  misc_feature (973)..(973): n is a, c, g, or t
  misc_feature (986)..(986): n is a, c, g, or t
  misc_feature (989)..(989): n is a, c, g, or t
  misc_feature (996)..(996): n is a, c, g, or t
  misc_feature (1002)..(1002): n is a, c, g, or t
  misc_feature (1010)..(1010): n is a, c, g, or t
  misc_feature (1018)..(1018): n is a, c, g, or t
  misc_feature (1023)..(1023): n is a, c, g, or t

SEQ ID NO: 384454 - DNA, 1272 bp, Homo Sapiens; identical to SEQ ID NO: 353448
  misc_feature (20)..(20): n is a, c, g, or t
  misc_feature (29)..(29): n is a, c, g, or t
  misc_feature (51)..(51): n is a, c, g, or t
  misc_feature (64)..(64): n is a, c, g, or t
  misc_feature (98)..(98): n is a, c, g, or t

SEQ ID NO: 384455 - DNA, 1009 bp, Homo Sapiens; identical to SEQ ID NO: 353450
  misc_feature (882)..(897): n is a, c, g, or t

SEQ ID NO: 384456 - DNA, 1252 bp, Homo Sapiens; identical to SEQ ID NO: 353451

SEQ ID NO: 384457 - DNA, 1140 bp, Homo Sapiens; identical to SEQ ID NO: 353452
  misc_feature (51)..(51): n is a, c, g, or t
  misc_feature (1011)..(1026): n is a, c, g, or t

SEQ ID NO: 384458 - DNA, 1078 bp, Homo Sapiens; identical to SEQ ID NO: 353453
  misc_feature (483)..(592): n is a, c, g, or t
  misc_feature (936)..(936): n is a, c, g, or t
  misc_feature (945)..(945): n is a, c, g, or t
  misc_feature (961)..(961): n is a, c, g, or t
  misc_feature (982)..(994): n is a, c, g, or t

SEQ ID NO: 384459 - DNA, 1043 bp, Homo Sapiens; identical to SEQ ID NO: 353455
  misc_feature (969)..(969): n is a, c, g, or t
  misc_feature (983)..(983): n is a, c, g, or t
  misc_feature (985)..(985): n is a, c, g, or t
  misc_feature (995)..(995): n is a, c, g, or t
  misc_feature (1001)..(1001): n is a, c, g, or t
  misc_feature (1004)..(1007): n is a, c, g, or t
  misc_feature (1028)..(1028): n is a, c, g, or t

SEQ ID NO: 384460 - DNA, 1840 bp, Homo Sapiens; identical to SEQ ID NO: 353456

SEQ ID NO: 384461 - DNA, 2657 bp, Homo Sapiens; identical to SEQ ID NO: 353457
  misc_feature (33)..(33): n is a, c, g, or t
  misc_feature (667)..(677): n is a, c, g, or t
  misc_feature (751)..(764): n is a, c, g, or t

SEQ ID NO: 384462 - DNA, 813 bp, Homo Sapiens; identical to SEQ ID NO: 353458
  misc_feature (23)..(23): n is a, c, g, or t
  misc_feature (41)..(41): n is a, c, g, or t
  misc_feature (109)..(111): n is a, c, g, or t
  misc_feature (118)..(118): n is a, c, g, or t
  misc_feature (156)..(156): n is a, c, g, or t
  misc_feature (169)..(170): n is a, c, g, or t
  misc_feature (193)..(193): n is a, c, g, or t
  misc_feature (232)..(232): n is a, c, g, or t

SEQ ID NO: 384463 - DNA, 510 bp, Homo Sapiens; identical to SEQ ID NO: 353460

SEQ ID NO: 384464 - DNA, 1284 bp, Homo Sapiens; identical to SEQ ID NO: 353461

SEQ ID NO: 384465 - DNA, 2139 bp, Homo Sapiens; identical to SEQ ID NO: 353462
  misc_feature (863)..(896): n is a, c, g, or t
  misc_feature (1947)..(1947): n is a, c, g, or t
  misc_feature (2063)..(2063): n is a, c, g, or t

SEQ ID NO: 384466 - DNA, 454 bp, Homo Sapiens; identical to SEQ ID NO: 353463
  misc_feature (399)..(399): n is a, c, g, or t

SEQ ID NO: 384467 - DNA, 308 bp, Homo Sapiens; identical to SEQ ID NO: 353467
  misc_feature (268)..(268): n is a, c, g, or t

SEQ ID NO: 384468 - DNA, 1147 bp, Homo Sapiens; identical to SEQ ID NO: 353468

SEQ ID NO: 384469 - DNA, 1117 bp, Homo Sapiens; identical to SEQ ID NO: 353469
  misc_feature (7)..(7): n is a, c, g, or t
  misc_feature (13)..(13): n is a, c, g, or t
  misc_feature (61)..(61): n is a, c, g, or t
  misc_feature (73)..(73): n is a, c, g, or t
  misc_feature (79)..(79): n is a, c, g, or t
  misc_feature (113)..(113): n is a, c, g, or t
  misc_feature (163)..(163): n is a, c, g, or t
  misc_feature (210)..(210): n is a, c, g, or t
  misc_feature (298)..(298): n is a, c, g, or t
  misc_feature (300)..(300): n is a, c, g, or t
  misc_feature (329)..(330): n is a, c, g, or t
  misc_feature (332)..(332): n is a, c, g, or t
  misc_feature (336)..(336): n is a, c, g, or t
  misc_feature (340)..(340): n is a, c, g, or t
  misc_feature (350)..(350): n is a, c, g, or t
  misc_feature (352)..(352): n is a, c, g, or t
  misc_feature (362)..(362): n is a, c, g, or t
  misc_feature (395)..(395): n is a, c, g, or t
  misc_feature (399)..(399): n is a, c, g, or t
  misc_feature (402)..(402): n is a, c, g, or t
  misc_feature (412)..(412): n is a, c, g, or t
  misc_feature (414)..(414): n is a, c, g, or t
  misc_feature (421)..(424): n is a, c, g, or t
  misc_feature (427)..(427): n is a, c, g, or t
  misc_feature (437)..(437): n is a, c, g, or t
  misc_feature (446)..(447): n is a, c, g, or t
  misc_feature (451)..(452): n is a, c, g, or t
  misc_feature (455)..(455): n is a, c, g, or t
  misc_feature (457)..(457): n is a, c, g, or t
  misc_feature (459)..(463): n is a, c, g, or t
  misc_feature (465)..(465): n is a, c, g, or t

SEQ ID NO: 384470 - DNA, 1588 bp, Homo Sapiens; identical to SEQ ID NO: 353470
  misc_feature (78)..(160): n is a, c, g, or t

SEQ ID NO: 384471 - DNA, 1008 bp, Homo Sapiens; identical to SEQ ID NO: 353471
  misc_feature (798)..(937): n is a, c, g, or t

SEQ ID NO: 384472 - DNA, 930 bp, Homo Sapiens; identical to SEQ ID NO: 353473
  misc_feature (792)..(809): n is a, c, g, or t

SEQ ID NO: 384473 - DNA, 503 bp, Homo Sapiens; identical to SEQ ID NO: 353474
  misc_feature (484)..(484): n is a, c, g, or t

SEQ ID NO: 384474 - DNA, 1860 bp, Homo Sapiens; identical to SEQ ID NO: 353475
  misc_feature (89)..(89): n is a, c, g, or t
  misc_feature (169)..(169): n is a, c, g, or t

SEQ ID NO: 384475 - DNA, 791 bp, Homo Sapiens; identical to SEQ ID NO: 353476
  misc_feature (763)..(763): n is a, c, g, or t

SEQ ID NO: 384476 - DNA, 632 bp, Homo Sapiens; identical to SEQ ID NO: 353477

SEQ ID NO: 384477 - DNA, 619 bp, Homo Sapiens; identical to SEQ ID NO: 353478
  misc_feature (127)..(127): n is a, c, g, or t
  misc_feature (142)..(151): n is a, c, g, or t

SEQ ID NO: 384478 - DNA, 815 bp, Homo Sapiens; identical to SEQ ID NO: 353481

SEQ ID NO: 384479 - DNA, 860 bp, Homo Sapiens; identical to SEQ ID NO: 353482

SEQ ID NO: 384480 - DNA, 2309 bp, Homo Sapiens; identical to SEQ ID NO: 353483
  misc_feature (47)..(146): n is a, c, g, or t

SEQ ID NO: 384481 - DNA, 493 bp, Homo Sapiens; identical to SEQ ID NO: 353484
  misc_feature (21)..(21): n is a, c, g, or t
  misc_feature (29)..(29): n is a, c, g, or t
  misc_feature (38)..(38): n is a, c, g, or t
  misc_feature (54)..(54): n is a, c, g, or t
  misc_feature (81)..(81): n is a, c, g, or t
  misc_feature (121)..(121): n is a, c, g, or t
  misc_feature (201)..(201): n is a, c, g, or t
  misc_feature (241)..(241): n is a, c, g, or t
  misc_feature (246)..(246): n is a, c, g, or t

SEQ ID NO: 384482 - DNA, 1412 bp, Homo Sapiens; identical to SEQ ID NO: 353486

SEQ ID NO: 384483 - DNA, 801 bp, Homo Sapiens; identical to SEQ ID NO: 353487

SEQ ID NO: 384484 - DNA, 1140 bp, Homo Sapiens; identical to SEQ ID NO: 353488

SEQ ID NO: 384485 - DNA, 1159 bp, Homo Sapiens; identical to SEQ ID NO: 353489
  misc_feature (648)..(685): n is a, c, g, or t
  misc_feature (692)..(692): n is a, c, g, or t
  misc_feature (701)..(701): n is a, c, g, or t

SEQ ID NO: 384486 - DNA, 445 bp, Homo Sapiens; identical to SEQ ID NO: 353490

SEQ ID NO: 384487 - DNA, 1592 bp, Homo Sapiens; identical to SEQ ID NO: 353492
  misc_feature (46)..(82): n is a, c, g, or t
  misc_feature (1396)..(1404): n is a, c, g, or t
  misc_feature (1490)..(1490): n is a, c, g, or t
  misc_feature (1521)..(1521): n is a, c, g, or t

SEQ ID NO: 384488 - DNA, 1847 bp, Homo Sapiens; identical to SEQ ID NO: 353493
  misc_feature (1173)..(1699): n is a, c, g, or t

SEQ ID NO: 384489 - DNA, 1385 bp, Homo Sapiens; identical to SEQ ID NO: 353494

SEQ ID NO: 384490 - DNA, 1485 bp, Homo Sapiens; identical to SEQ ID NO: 353497
  misc_feature (1376)..(1376): n is a, c, g, or t
  misc_feature (1388)..(1434): n is a, c, g, or t
  misc_feature (1443)..(1443): n is a, c, g, or t
  misc_feature (1446)..(1446): n is a, c, g, or t
  misc_feature (1470)..(1471): n is a, c, g, or t
  misc_feature (1475)..(1475): n is a, c, g, or t

SEQ ID NO: 384491 - DNA, 1234 bp, Homo Sapiens; identical to SEQ ID NO: 353498

SEQ ID NO: 384492 - DNA, 251 bp, Homo Sapiens; identical to SEQ ID NO: 353499

SEQ ID NO: 384493 - DNA, 345 bp, Homo Sapiens; identical to SEQ ID NO: 353502
  misc_feature (4)..(5): n is a, c, g, or t
  misc_feature (12)..(12): n is a, c, g, or t
  misc_feature (21)..(22): n is a, c, g, or t
  misc_feature (27)..(27): n is a, c, g, or t
  misc_feature (38)..(38): n is a, c, g, or t
  misc_feature (47)..(47): n is a, c, g, or t
  misc_feature (67)..(67): n is a, c, g, or t
  misc_feature (81)..(81): n is a, c, g, or t
  misc_feature (89)..(89): n is a, c, g, or t
  misc_feature (154)..(154): n is a, c, g, or t

SEQ ID NO: 384494 - DNA, 1613 bp, Homo Sapiens; identical to SEQ ID NO: 353503
  misc_feature (929)..(929): n is a, c, g, or t
  misc_feature (932)..(932): n is a, c, g, or t
  misc_feature (940)..(940): n is a, c, g, or t
  misc_feature (948)..(948): n is a, c, g, or t
  misc_feature (977)..(977): n is a, c, g, or t
  misc_feature (1007)..(1007): n is a, c, g, or t
  misc_feature (1035)..(1035): n is a, c, g, or t
  misc_feature (1279)..(1279): n is a, c, g, or t
  misc_feature (1294)..(1294): n is a, c, g, or t
  misc_feature (1315)..(1315): n is a, c, g, or t
  misc_feature (1323)..(1325): n is a, c, g, or t
  misc_feature (1343)..(1343): n is a, c, g, or t
  misc_feature (1355)..(1362): n is a, c, g, or t
  misc_feature (1364)..(1364): n is a, c, g, or t
  misc_feature (1366)..(1366): n is a, c, g, or t
  misc_feature (1371)..(1372): n is a, c, g, or t
  misc_feature (1381)..(1384): n is a, c, g, or t
  misc_feature (1387)..(1387): n is a, c, g, or t
  misc_feature (1403)..(1403): n is a, c, g, or t
  misc_feature (1478)..(1478): n is a, c, g, or t
  misc_feature (1545)..(1545): n is a, c, g, or t
  misc_feature (1548)..(1548): n is a, c, g, or t
  misc_feature (1558)..(1558): n is a, c, g, or t
  misc_feature (1610)..(1610): n is a, c, g, or t

SEQ ID NO: 384495 - DNA, 916 bp, Homo Sapiens; identical to SEQ ID NO: 353510

SEQ ID NO: 384496 - DNA, 372 bp, Homo Sapiens; identical to SEQ ID NO: 353511
  misc_feature (11)..(11): n is a, c, g, or t

SEQ ID NO: 384497 - DNA, 1283 bp, Homo Sapiens; identical to SEQ ID NO: 353514
  misc_feature (10)..(10): n is a, c, g, or t
  misc_feature (12)..(12): n is a, c, g, or t
  misc_feature (15)..(15): n is a, c, g, or t
  misc_feature (39)..(39): n is a, c, g, or t
  misc_feature (142)..(142): n is a, c, g, or t

SEQ ID NO: 384498 - DNA, 1262 bp, Homo Sapiens; identical to SEQ ID NO: 353515
  misc_feature (16)..(16): n is a, c, g, or t
  misc_feature (29)..(29): n is a, c, g, or t
  misc_feature (55)..(55): n is a, c, g, or t
  misc_feature (1189)..(1189): n is a, c, g, or t
  misc_feature (1217)..(1217): n is a, c, g, or t

SEQ ID NO: 384499 - DNA, 490 bp, Homo Sapiens; identical to SEQ ID NO: 353516
  misc_feature (27)..(27): n is a, c, g, or t
  misc_feature (41)..(41): n is a, c, g, or t

SEQ ID NO: 384500 - DNA, 1043 bp, Homo Sapiens; identical to SEQ ID NO: 353518
  misc_feature (11)..(11): n is a, c, g, or t
  misc_feature (18)..(18): n is a, c, g, or t
  misc_feature (26)..(26): n is a, c, g, or t
  misc_feature (36)..(36): n is a, c, g, or t
  misc_feature (38)..(38): n is a, c, g, or t
  misc_feature (42)..(42): n is a, c, g, or t
  misc_feature (44)..(44): n is a, c, g, or t
  misc_feature (50)..(50): n is a, c, g, or t
  misc_feature (88)..(88): n is a, c, g, or t
  misc_feature (92)..(92): n is a, c, g, or t
  misc_feature (101)..(101): n is a, c, g, or t
  misc_feature (250)..(306): n is a, c, g, or t
  misc_feature (550)..(550): n is a, c, g, or t

SEQ ID NO: 384501 - DNA, 999 bp, Homo Sapiens; identical to SEQ ID NO: 353519
  misc_feature (33)..(33): n is a, c, g, or t
  misc_feature (37)..(37): n is a, c, g, or t
  misc_feature (40)..(40): n is a, c, g, or t
  misc_feature (48)..(48): n is a, c, g, or t
  misc_feature (54)..(54): n is a, c, g, or t
  misc_feature (58)..(58): n is a, c, g, or t
  misc_feature (72)..(73): n is a, c, g, or t
  misc_feature (109)..(109): n is a, c, g, or t
  misc_feature (241)..(241): n is a, c, g, or t
  misc_feature (551)..(608): n is a, c, g, or t

SEQ ID NO: 384502 - DNA, 746 bp, Homo Sapiens; identical to SEQ ID NO: 353520
  misc_feature (25)..(25): n is a, c, g, or t
  misc_feature (27)..(27): n is a, c, g, or t
  misc_feature (272)..(272): n is a, c, g, or t

SEQ ID NO: 384503 - DNA, 838 bp, Homo Sapiens; identical to SEQ ID NO: 353521

SEQ ID NO: 384504 - DNA, 1658 bp, Homo Sapiens; identical to SEQ ID NO: 353522
  misc_feature (1431)..(1499): n is a, c, g, or t
  misc_feature (1530)..(1558): n is a, c, g, or t

SEQ ID NO: 384505 - DNA, 325 bp, Homo Sapiens; identical to SEQ ID NO: 353523
  misc_feature (99)..(138): n is a, c, g, or t
  misc_feature (199)..(226): n is a, c, g, or t
  misc_feature (303)..(303): n is a, c, g, or t

SEQ ID NO: 384506 - DNA, 923 bp, Homo Sapiens; identical to SEQ ID NO: 353540

SEQ ID NO: 384507 - DNA, 3425 bp, Homo Sapiens; identical to SEQ ID NO: 353541
  misc_feature (1143)..(1143): n is a, c, g, or t
  misc_feature (2814)..(2934): n is a, c, g, or t
  misc_feature (2951)..(3011): n is a, c, g, or t
  misc_feature (3016)..(3167): n is a, c, g, or t
  misc_feature (3179)..(3190): n is a, c, g, or t
  misc_feature (3207)..(3331): n is a, c, g, or t

SEQ ID NO: 384508 - DNA, 1522 bp, Homo Sapiens; identical to SEQ ID NO: 353547
  misc_feature (1519)..(1519): n is a, c, g, or t

SEQ ID NO: 384509 - DNA, 808 bp, Homo Sapiens; identical to SEQ ID NO: 353548
  misc_feature (276)..(276): n is a, c, g, or t

SEQ ID NO: 384510 - DNA, 2365 bp, Homo Sapiens; identical to SEQ ID NO: 353550
  misc_feature (2361)..(2361): n is a, c, g, or t

SEQ ID NO: 384511 - DNA, 988 bp, Homo Sapiens; identical to SEQ ID NO: 353551

SEQ ID NO: 384512 - DNA, 958 bp, Homo Sapiens; identical to SEQ ID NO: 353554
  misc_feature (913)..(913): n is a, c, g, or t

SEQ ID NO: 384513 - DNA, 1952 bp, Homo Sapiens; identical to SEQ ID NO: 353555

SEQ ID NO: 384514 - DNA, 1742 bp, Homo Sapiens; identical to SEQ ID NO: 353558
  misc_feature (1441)..(1477): n is a, c, g, or t

SEQ ID NO: 384515 - DNA, 465 bp, Homo Sapiens; identical to SEQ ID NO: 353559
  misc_feature (19)..(19): n is a, c, g, or t

SEQ ID NO: 384516 - DNA, 935 bp, Homo Sapiens; identical to SEQ ID NO: 353560

SEQ ID NO: 384517 - DNA, 904 bp, Homo Sapiens; identical to SEQ ID NO: 353561
  misc_feature (451)..(488): n is a, c, g, or t
  misc_feature (800)..(800): n is a, c, g, or t

SEQ ID NO: 384518 - DNA, 825 bp, Homo Sapiens; identical to SEQ ID NO: 353562
  misc_feature (45)..(45): n is a, c, g, or t
  misc_feature (220)..(258): n is a, c, g, or t

SEQ ID NO: 384519 - DNA, 1251 bp, Homo Sapiens; identical to SEQ ID NO: 353564

SEQ ID NO: 384520 - DNA, 644 bp, Homo Sapiens; identical to SEQ ID NO: 353565
  misc_feature (22)..(22): n is a, c, g, or t
  misc_feature (27)..(27): n is a, c, g, or t
  misc_feature (144)..(144): n is a, c, g, or t

SEQ ID NO: 384521 - DNA, 517 bp, Homo Sapiens; identical to SEQ ID NO: 353567
  misc_feature (104)..(130): n is a, c, g, or t

SEQ ID NO: 384522 - DNA, 1240 bp, Homo Sapiens; identical to SEQ ID NO: 353568
  misc_feature (377)..(403): n is a, c, g, or t

SEQ ID NO: 384523 - DNA, 1503 bp, Homo Sapiens; identical to SEQ ID NO: 353569
  misc_feature (257)..(320): n is a, c, g, or t

SEQ ID NO: 384524 - DNA, 872 bp, Homo Sapiens; identical to SEQ ID NO: 353570
  misc_feature (52)..(88): n is a, c, g, or t

SEQ ID NO: 384525 - DNA, 273 bp, Homo Sapiens; identical to SEQ ID NO: 353571

SEQ ID NO: 384526 - DNA, 263 bp, Homo Sapiens; identical to SEQ ID NO: 353572
  misc_feature (55)..(55): n is a, c, g, or t

SEQ ID NO: 384527 - DNA, 1144 bp, Homo Sapiens; identical to SEQ ID NO: 353576
  misc_feature (13)..(13): n is a, c, g, or t

SEQ ID NO: 384528 - DNA, 518 bp, Homo Sapiens; identical to SEQ ID NO: 353577
  misc_feature (26)..(26): n is a, c, g, or t
  misc_feature (46)..(46): n is a, c, g, or t
  misc_feature (74)..(74): n is a, c, g, or t
  misc_feature (81)..(81): n is a, c, g, or t

SEQ ID NO: 384529 - DNA, 1375 bp, Homo Sapiens; identical to SEQ ID NO: 353579
  misc_feature (9)..(11): n is a, c, g, or t
  misc_feature (13)..(13): n is a, c, g, or t

SEQ ID NO: 384530 - DNA, 509 bp, Homo Sapiens; identical to SEQ ID NO: 353580

SEQ ID NO: 384531 - DNA, 638 bp, Homo Sapiens; identical to SEQ ID NO: 353581

SEQ ID NO: 384532 - DNA, 723 bp, Homo Sapiens; identical to SEQ ID NO: 353582

SEQ ID NO: 384533 - DNA, 1145 bp, Homo Sapiens; identical to SEQ ID NO: 353583
  misc_feature (29)..(29): n is a, c, g, or t

SEQ ID NO: 384534 - DNA, 702 bp, Homo Sapiens; identical to SEQ ID NO: 353584

SEQ ID NO: 384535 - DNA, 1213 bp, Homo Sapiens; identical to SEQ ID NO: 353586

SEQ ID NO: 384536 - DNA, 2461 bp, Homo Sapiens; identical to SEQ ID NO: 353587

SEQ ID NO: 384537 - DNA, 361 bp, Homo Sapiens; identical to SEQ ID NO: 353588

SEQ ID NO: 384538 - DNA, 1334 bp, Homo Sapiens; identical to SEQ ID NO: 353591

SEQ ID NO: 384539 - DNA, 1245 bp, Homo Sapiens; identical to SEQ ID NO: 353592
  misc_feature (881)..(890): n is a, c, g, or t
  misc_feature (1233)..(1233): n is a, c, g, or t

SEQ ID NO: 384540 - DNA, 404 bp, Homo Sapiens; identical to SEQ ID NO: 353593
  misc_feature (248)..(248): n is a, c, g, or t

SEQ ID NO: 384541 - DNA, 1121 bp, Homo Sapiens; identical to SEQ ID NO: 353595
  misc_feature (82)..(139): n is a, c, g, or t

SEQ ID NO: 384542 - DNA, 1531 bp, Homo Sapiens; identical to SEQ ID NO: 353596
  misc_feature (37)..(37): n is a, c, g, or t
  misc_feature (46)..(46): n is a, c, g, or t

SEQ ID NO: 384543 - DNA, 1196 bp, Homo Sapiens; identical to SEQ ID NO: 353598
  misc_feature (3)..(3): n is a, c, g, or t
  misc_feature (20)..(20): n is a, c, g, or t
  misc_feature (27)..(27): n is a, c, g, or t
  misc_feature (31)..(31): n is a, c, g, or t
  misc_feature (44)..(44): n is a, c, g, or t
  misc_feature (48)..(48): n is a, c, g, or t
  misc_feature (51)..(51): n is a, c, g, or t
  misc_feature (56)..(56): n is a, c, g, or t
  misc_feature (71)..(72): n is a, c, g, or t
  misc_feature (76)..(76): n is a, c, g, or t
  misc_feature (83)..(84): n is a, c, g, or t
  misc_feature (87)..(87): n is a, c, g, or t
  misc_feature (91)..(91): n is a, c, g, or t
  misc_feature (98)..(99): n is a, c, g, or t
  misc_feature (101)..(101): n is a, c, g, or t
  misc_feature (106)..(107): n is a, c, g, or t
  misc_feature (113)..(113): n is a, c, g, or t
  misc_feature (121)..(121): n is a, c, g, or t
  misc_feature (123)..(123): n is a, c, g, or t
  misc_feature (127)..(127): n is a, c, g, or t
  misc_feature (146)..(146): n is a, c, g, or t
  misc_feature (148)..(148): n is a, c, g, or t
  misc_feature (156)..(156): n is a, c, g, or t
  misc_feature (166)..(178): n is a, c, g, or t
  misc_feature (232)..(233): n is a, c, g, or t
  misc_feature (296)..(296): n is a, c, g, or t
  misc_feature (833)..(856): n is a, c, g, or t

SEQ ID NO: 384544 - DNA, 869 bp, Homo Sapiens; identical to SEQ ID NO: 353599

SEQ ID NO: 384545 - DNA, 1829 bp, Homo Sapiens; identical to SEQ ID NO: 353600
  misc_feature (55)..(55): n is a, c, g, or t

SEQ ID NO: 384546 - DNA, 995 bp, Homo Sapiens; identical to SEQ ID NO: 353608
  misc_feature (17)..(17): n is a, c, g, or t
  misc_feature (19)..(20): n is a, c, g, or t
  misc_feature (28)..(28): n is a, c, g, or t
  misc_feature (48)..(48): n is a, c, g, or t
  misc_feature (50)..(51): n is a, c, g, or t
  misc_feature (54)..(54): n is a, c, g, or t
  misc_feature (56)..(56): n is a, c, g, or t
  misc_feature (59)..(59): n is a, c, g, or t
  misc_feature (68)..(68): n is a, c, g, or t
  misc_feature (74)..(74): n is a, c, g, or t
  misc_feature (79)..(79): n is a, c, g, or t
  misc_feature (95)..(95): n is a, c, g, or t
  misc_feature (101)..(101): n is a, c, g, or t

SEQ ID NO: 384547 - DNA, 1795 bp, Homo Sapiens; identical to SEQ ID NO: 353609
  misc_feature (1159)..(1159): n is a, c, g, or t

SEQ ID NO: 384548 - DNA, 1805 bp, Homo Sapiens; identical to SEQ ID NO: 353615
  misc_feature (15)..(15): n is a, c, g, or t
  misc_feature (62)..(62): n is a, c, g, or t
  misc_feature (1314)..(1325): n is a, c, g, or t

SEQ ID NO: 384549 - DNA, 440 bp, Homo Sapiens; identical to SEQ ID NO: 353616
  misc_feature (362)..(362): n is a, c, g, or t
  misc_feature (415)..(415): n is a, c, g, or t

SEQ ID NO: 384550 - DNA, 1946 bp, Homo Sapiens; identical to SEQ ID NO: 353617
  misc_feature (690)..(699): n is a, c, g, or t
  misc_feature (1168)..(1168): n is a, c, g, or t
  misc_feature (1216)..(1216): n is a, c, g, or t
  misc_feature (1238)..(1238): n is a, c, g, or t
  misc_feature (1277)..(1277): n is a, c, g, or t
  misc_feature (1302)..(1302): n is a, c, g, or t
  misc_feature (1391)..(1391): n is a, c, g, or t
  misc_feature (1412)..(1412): n is a, c, g, or t
  misc_feature (1425)..(1425): n is a, c, g, or t
  misc_feature (1442)..(1443): n is a, c, g, or t
  misc_feature (1470)..(1470): n is a, c, g, or t
  misc_feature (1491)..(1491): n is a, c, g, or t
  misc_feature (1520)..(1520): n is a, c, g, or t
  misc_feature (1570)..(1571): n is a, c, g, or t
  misc_feature (1642)..(1642): n is a, c, g, or t
  misc_feature (1664)..(1664): n is a, c, g, or t
  misc_feature (1713)..(1713): n is a, c, g, or t
  misc_feature (1720)..(1720): n is a, c, g, or t
  misc_feature (1722)..(1722): n is a, c, g, or t
  misc_feature (1728)..(1728): n is a, c, g, or t
  misc_feature (1753)..(1753): n is a, c, g, or t
  misc_feature (1873)..(1873): n is a, c, g, or t

SEQ ID NO: 384551 - DNA, 1963 bp, Homo Sapiens; identical to SEQ ID NO: 353618
  misc_feature (782)..(808): n is a, c, g, or t

SEQ ID NO: 384552 - DNA, 1148 bp, Homo Sapiens; identical to SEQ ID NO: 353620
  misc_feature (404)..(412): n is a, c, g, or t

SEQ ID NO: 384553 - DNA, 1578 bp, Homo Sapiens; identical to SEQ ID NO: 353621
  misc_feature (983)..(997): n is a, c, g, or t
  misc_feature (1442)..(1442): n is a, c, g, or t
  misc_feature (1518)..(1518): n is a, c, g, or t
  misc_feature (1534)..(1534): n is a, c, g, or t

SEQ ID NO: 384554 - DNA, 1260 bp, Homo Sapiens; identical to SEQ ID NO: 353622

SEQ ID NO: 384555 - DNA, 714 bp, Homo Sapiens; identical to SEQ ID NO: 353623
  misc_feature (676)..(676): n is a, c, g, or t
  misc_feature (680)..(680): n is a, c, g, or t

SEQ ID NO: 384556 - DNA, 585 bp, Homo Sapiens; identical to SEQ ID NO: 353624
  misc_feature (39)..(39): n is a, c, g, or t

SEQ ID NO: 384557 - DNA, 627 bp, Homo Sapiens; identical to SEQ ID NO: 353630
  misc_feature (596)..(596): n is a, c, g, or t

SEQ ID NO: 384558 - DNA, 1794 bp, Homo Sapiens; identical to SEQ ID NO: 353631

SEQ ID NO: 384559 - DNA, 1423 bp, Homo Sapiens; identical to SEQ ID NO: 353632

SEQ ID NO: 384560 - DNA, 1174 bp, Homo Sapiens; identical to SEQ ID NO: 353633

SEQ ID NO: 384561 - DNA, 1231 bp, Homo Sapiens; identical to SEQ ID NO: 353637
  misc_feature (5)..(5): n is a, c, g, or t
  misc_feature (1150)..(1186): n is a, c, g, or t

SEQ ID NO: 384562 - DNA, 1666 bp, Homo Sapiens; identical to SEQ ID NO: 353638
  misc_feature (10)..(10): n is a, c, g, or t
  misc_feature (16)..(16): n is a, c, g, or t
  misc_feature (35)..(36): n is a, c, g, or t
  misc_feature (40)..(40): n is a, c, g, or t
  misc_feature (49)..(49): n is a, c, g, or t
  misc_feature (53)..(53): n is a, c, g, or t
  misc_feature (59)..(59): n is a, c, g, or t
  misc_feature (63)..(63): n is a, c, g, or t
  misc_feature (71)..(72): n is a, c, g, or t
  misc_feature (87)..(87): n is a, c, g, or t
  misc_feature (94)..(94): n is a, c, g, or t
  misc_feature (102)..(102): n is a, c, g, or t
  misc_feature (104)..(104): n is a, c, g, or t
  misc_feature (106)..(106): n is a, c, g, or t
  misc_feature (126)..(126): n is a, c, g, or t
  misc_feature (129)..(129): n is a, c, g, or t
  misc_feature (134)..(134): n is a, c, g, or t
  misc_feature (141)..(141): n is a, c, g, or t
  misc_feature (151)..(151): n is a, c, g, or t
  misc_feature (153)..(153): n is a, c, g, or t
  misc_feature (157)..(157): n is a, c, g, or t
  misc_feature (159)..(159): n is a, c, g, or t
  misc_feature (178)..(178): n is a, c, g, or t
  misc_feature (186)..(186): n is a, c, g, or t
  misc_feature (192)..(192): n is a, c, g, or t
  misc_feature (198)..(198): n is a, c, g, or t
  misc_feature (222)..(222): n is a, c, g, or t
  misc_feature (239)..(239): n is a, c, g, or t
  misc_feature (247)..(247): n is a, c, g, or t
  misc_feature (251)..(252): n is a, c, g, or t
  misc_feature (260)..(260): n is a, c, g, or t
  misc_feature (268)..(268): n is a, c, g, or t
  misc_feature (274)..(274): n is a, c, g, or t
  misc_feature (285)..(285): n is a, c, g, or t
  misc_feature (290)..(291): n is a, c, g, or t
  misc_feature (302)..(302): n is a, c, g, or t
  misc_feature (314)..(314): n is a, c, g, or t
  misc_feature (326)..(326): n is a, c, g, or t
  misc_feature (328)..(328): n is a, c, g, or t
  misc_feature (343)..(343): n is a, c, g, or t
  misc_feature (347)..(347): n is a, c, g, or t
  misc_feature (350)..(350): n is a, c, g, or t
  misc_feature (359)..(359): n is a, c, g, or t
  misc_feature (365)..(365): n is a, c, g, or t
  misc_feature (371)..(371): n is a, c, g, or t
  misc_feature (374)..(374): n is a, c, g, or t
  misc_feature (381)..(381): n is a, c, g, or t
  misc_feature (384)..(384): n is a, c, g, or t
  misc_feature (389)..(390): n is a, c, g, or t
  misc_feature (406)..(406): n is a, c, g, or t
  misc_feature (414)..(414): n is a, c, g, or t
  misc_feature (424)..(424): n is a, c, g, or t
  misc_feature (428)..(428): n is a, c, g, or t
  misc_feature (438)..(438): n is a, c, g, or t
  misc_feature (466)..(466): n is a, c, g, or t
  misc_feature (478)..(478): n is a, c, g, or t
  misc_feature (485)..(486): n is a, c, g, or t
  misc_feature (491)..(491): n is a, c, g, or t
  misc_feature (493)..(493): n is a, c, g, or t
  misc_feature (500)..(500): n is a, c, g, or t
  misc_feature (504)..(505): n is a, c, g, or t
  misc_feature (515)..(515): n is a, c, g, or t
  misc_feature (526)..(526): n is a, c, g, or t
  misc_feature (528)..(528): n is a, c, g, or t
  misc_feature (536)..(536): n is a, c, g, or t
  misc_feature (552)..(553): n is a, c, g, or t
  misc_feature (559)..(559): n is a, c, g, or t
  misc_feature (614)..(628): n is a, c, g, or t
  misc_feature (633)..(754): n is a, c, g, or t
  misc_feature (759)..(759): n is a, c, g, or t
  misc_feature (763)..(764): n is a, c, g, or t
  misc_feature (767)..(767): n is a, c, g, or t
  misc_feature (772)..(787): n is a, c, g, or t
  misc_feature (789)..(789): n is a, c, g, or t
  misc_feature (1156)..(1156): n is a, c, g, or t
  misc_feature (1389)..(1414): n is a, c, g, or t

SEQ ID NO: 384563 - DNA, 1105 bp, Homo Sapiens; identical to SEQ ID NO: 353639
  misc_feature (1096)..(1096): n is a, c, g, or t

SEQ ID NO: 384564 - DNA, 1460 bp, Homo Sapiens; identical to SEQ ID NO: 353640
  misc_feature (155)..(162): n is a, c, g, or t
  misc_feature (164)..(166): n is a, c, g, or t
  misc_feature (168)..(170): n is a, c, g, or t
  misc_feature (182)..(449): n is a, c, g, or t

SEQ ID NO: 384565 - DNA, 830 bp, Homo Sapiens; identical to SEQ ID NO: 353641

SEQ ID NO: 384566 - DNA, 637 bp, Homo Sapiens; identical to SEQ ID NO: 353642

SEQ ID NO: 384567 - DNA, 1315 bp, Homo Sapiens; identical to SEQ ID NO: 353648
  misc_feature (705)..(727): n is a, c, g, or t

SEQ ID NO: 384568 - DNA, 541 bp, Homo Sapiens; identical to SEQ ID NO: 353649
  misc_feature (15)..(15): n is a, c, g, or t
  misc_feature (453)..(486): n is a, c, g, or t

SEQ ID NO: 384569 - DNA, 550 bp, Homo Sapiens; identical to SEQ ID NO: 353650
  misc_feature (47)..(71): n is a, c, g, or t

SEQ ID NO: 384570 - DNA, 351 bp, Homo Sapiens; identical to SEQ ID NO: 353651
  misc_feature (104)..(104): n is a, c, g, or t

SEQ ID NO: 384571 - DNA, 1706 bp, Homo Sapiens; identical to SEQ ID NO: 353652
  misc_feature (911)..(935): n is a, c, g, or t

SEQ ID NO: 384572 - DNA, 1000 bp, Homo Sapiens; identical to SEQ ID NO: 353653
  misc_feature (175)..(224): n is a, c, g, or t

SEQ ID NO: 384573 - DNA, 1790 bp, Homo Sapiens; identical to SEQ ID NO: 353654
  misc_feature (485)..(533): n is a, c, g, or t
  misc_feature (988)..(1002): n is a, c, g, or t

SEQ ID NO: 384574 - DNA, 1849 bp, Homo Sapiens; identical to SEQ ID NO: 353655
  misc_feature (49)..(85): n is a, c, g, or t
  misc_feature (126)..(134): n is a, c, g, or t
  misc_feature (158)..(173): n is a, c, g, or t
  misc_feature (1772)..(1781): n is a, c, g, or t

SEQ ID NO: 384575 - DNA, 450 bp, Homo Sapiens; identical to SEQ ID NO: 353656

SEQ ID NO: 384576 - DNA, 2215 bp, Homo Sapiens; identical to SEQ ID NO: 353661

SEQ ID NO: 384577 - DNA, 1397 bp, Homo Sapiens; identical to SEQ ID NO: 353662
  misc_feature (340)..(363): n is a, c, g, or t

SEQ ID NO: 384578 - DNA, 518 bp, Homo Sapiens; identical to SEQ ID NO: 353663
  misc_feature (478)..(478): n is a, c, g, or t

SEQ ID NO: 384579 - DNA, 495 bp, Homo Sapiens; identical to SEQ ID NO: 353664
  misc_feature (456)..(456): n is a, c, g, or t

SEQ ID NO: 384580 - DNA, 1168 bp, Homo Sapiens; identical to SEQ ID NO: 353666

SEQ ID NO: 384581 - DNA, 1757 bp, Homo Sapiens; identical to SEQ ID NO: 353667
  misc_feature (319)..(319): n is a, c, g, or t
  misc_feature (322)..(322): n is a, c, g, or t
  misc_feature (1668)..(1668): n is a, c, g, or t
  misc_feature (1705)..(1705): n is a, c, g, or t

SEQ ID NO: 384582 - DNA, 2002 bp, Homo Sapiens; identical to SEQ ID NO: 353668
  misc_feature (61)..(61): n is a, c, g, or t
  misc_feature (71)..(71): n is a, c, g, or t
  misc_feature (77)..(77): n is a, c, g, or t
  misc_feature (91)..(91): n is a, c, g, or t
  misc_feature (98)..(98): n is a, c, g, or t

SEQ ID NO: 384583 - DNA, 379 bp, Homo Sapiens; identical to SEQ ID NO: 353669
  misc_feature (94)..(94): n is a, c, g, or t
  misc_feature (150)..(150): n is a, c, g, or t
  misc_feature (195)..(195): n is a, c, g, or t

SEQ ID NO: 384584 - DNA, 531 bp, Homo Sapiens; identical to SEQ ID NO: 353670
  misc_feature (465)..(465): n is a, c, g, or t

SEQ ID NO: 384585 - DNA, 1059 bp, Homo Sapiens; identical to SEQ ID NO: 353671
  misc_feature (729)..(769): n is a, c, g, or t
  misc_feature (848)..(880): n is a, c, g, or t
  misc_feature (929)..(937): n is a, c, g, or t

SEQ ID NO: 384586 - DNA, 496 bp, Homo Sapiens; identical to SEQ ID NO: 353672
  misc_feature (132)..(145): n is a, c, g, or t

SEQ ID NO: 384587 - DNA, 994 bp, Homo Sapiens; identical to SEQ ID NO: 353680

SEQ ID NO: 384588 - DNA, 1928 bp, Homo Sapiens; identical to SEQ ID NO: 353681

SEQ ID NO: 384589 - DNA, 462 bp, Homo Sapiens; identical to SEQ ID NO: 353683

SEQ ID NO: 384590 - DNA, 1383 bp, Homo Sapiens; identical to SEQ ID NO: 353684

SEQ ID NO: 384591 - DNA, 192 bp, Homo Sapiens; identical to SEQ ID NO: 353685
  misc_feature (138)..(138): n is a, c, g, or t

SEQ ID NO: 384592 - DNA, 661 bp, Homo Sapiens; identical to SEQ ID NO: 353687

SEQ ID NO: 384593 - DNA, 396 bp, Homo Sapiens; identical to SEQ ID NO: 353688
  misc_feature (25)..(25): n is a, c, g, or t
  misc_feature (43)..(43): n is a, c, g, or t
  misc_feature (74)..(74): n is a, c, g, or t
  misc_feature (78)..(78): n is a, c, g, or t
  misc_feature (98)..(98): n is a, c, g, or t
  misc_feature (107)..(107): n is a, c, g, or t
  misc_feature (117)..(117): n is a, c, g, or t
  misc_feature (132)..(132): n is a, c, g, or t
  misc_feature (135)..(135): n is a, c, g, or t
  misc_feature (138)..(138): n is a, c, g, or t
  misc_feature (144)..(144): n is a, c, g, or t

SEQ ID NO: 384594 - DNA, 1456 bp, Homo Sapiens; identical to SEQ ID NO: 353689
  misc_feature (356)..(379): n is a, c, g, or t

SEQ ID NO: 384595 - DNA, 1849 bp, Homo Sapiens; identical to SEQ ID NO: 353690
  misc_feature (1569)..(1592): n is a, c, g, or t

SEQ ID NO: 384596 - DNA, 960 bp, Homo Sapiens; identical to SEQ ID NO: 353695

SEQ ID NO: 384597 - DNA, 1176 bp, Homo Sapiens; identical to SEQ ID NO: 353696
  misc_feature (369)..(385): n is a, c, g, or t

SEQ ID NO: 384598 - DNA, 585 bp, Homo Sapiens; identical to SEQ ID NO: 353702

SEQ ID NO: 384599 - DNA, 1132 bp, Homo Sapiens; identical to SEQ ID NO: 353703
  misc_feature (101)..(139): n is a, c, g, or t

SEQ ID NO: 384600 - DNA, 294 bp, Homo Sapiens; identical to SEQ ID NO: 353704

SEQ ID NO: 384601 - DNA, 927 bp, Homo Sapiens; identical to SEQ ID NO: 353706
  misc_feature (686)..(749): n is a, c, g, or t
  misc_feature (809)..(809): n is a, c, g, or t
  misc_feature (903)..(903): n is a, c, g, or t

SEQ ID NO: 384602 - DNA, 1569 bp, Homo Sapiens; identical to SEQ ID NO: 353707
  misc_feature (603)..(603): n is a, c, g, or t
  misc_feature (1035)..(1092): n is a, c, g, or t

SEQ ID NO: 384603 - DNA, 391 bp, Homo Sapiens; identical to SEQ ID NO: 353708
  misc_feature (53)..(53): n is a, c, g, or t
  misc_feature (84)..(84): n is a, c, g, or t
  misc_feature (93)..(93): n is a, c, g, or t
  misc_feature (286)..(286): n is a, c, g, or t
  misc_feature (291)..(291): n is a, c, g, or t
  misc_feature (348)..(348): n is a, c, g, or t

SEQ ID NO: 384604 - DNA, 1330 bp, Homo Sapiens; identical to SEQ ID NO: 353709
  misc_feature (1108)..(1108): n is a, c, g, or t
  misc_feature (1124)..(1124): n is a, c, g, or t
  misc_feature (1133)..(1135): n is a, c, g, or t
  misc_feature (1141)..(1141): n is a, c, g, or t
  misc_feature (1165)..(1165): n is a, c, g, or t
  misc_feature (1181)..(1181): n is a, c, g, or t
  misc_feature (1196)..(1196): n is a, c, g, or t
  misc_feature (1217)..(1217): n is a, c, g, or t
  misc_feature (1223)..(1223): n is a, c, g, or t
  misc_feature (1227)..(1227): n is a, c, g, or t
  misc_feature (1229)..(1229): n is a, c, g, or t
  misc_feature (1244)..(1244): n is a, c, g, or t
  misc_feature (1246)..(1247): n is a, c, g, or t
  misc_feature (1269)..(1269): n is a, c, g, or t
  misc_feature (1274)..(1274): n is a, c, g, or t
  misc_feature (1276)..(1277): n is a, c, g, or t
  misc_feature (1285)..(1285): n is a, c, g, or t
  misc_feature (1290)..(1290): n is a, c, g, or t
  misc_feature (1301)..(1301): n is a, c, g, or t
  misc_feature (1303)..(1303): n is a, c, g, or t
  misc_feature (1305)..(1305): n is a, c, g, or t
  misc_feature (1308)..(1308): n is a, c, g, or t
  misc_feature (1325)..(1326): n is a, c, g, or t

SEQ ID NO: 384605 - DNA, 1647 bp, Homo Sapiens; identical to SEQ ID NO: 353710
  misc_feature (90)..(90): n is a, c, g, or t

SEQ ID NO: 384606 - DNA, 429 bp, Homo Sapiens; identical to SEQ ID NO: 353718

SEQ ID NO: 384607 - DNA, 2495 bp, Homo Sapiens; identical to SEQ ID NO: 353719

SEQ ID NO: 384608 - DNA, 801 bp, Homo Sapiens; identical to SEQ ID NO: 353720

SEQ ID NO: 384609 - DNA, 1316 bp, Homo Sapiens; identical to SEQ ID NO: 353722

SEQ ID NO: 384610 - DNA, 1044 bp, Homo Sapiens; identical to SEQ ID NO: 353723
  misc_feature (87)..(96): n is a, c, g, or t
  misc_feature (139)..(167): n is a, c, g, or t

SEQ ID NO: 384611 - DNA, 808 bp, Homo Sapiens; identical to SEQ ID NO: 353724
  misc_feature (677)..(677): n is a, c, g, or t
  misc_feature (777)..(777): n is a, c, g, or t

SEQ ID NO: 384612 - DNA, 336 bp, Homo Sapiens; identical to SEQ ID NO: 353725
  misc_feature (62)..(74): n is a, c, g, or t

SEQ ID NO: 384613 - DNA, 2933 bp, Homo Sapiens; identical to SEQ ID NO: 353726
  misc_feature (594)..(655): n is a, c, g, or t
  misc_feature (1391)..(1436): n is a, c, g, or t
  misc_feature (2314)..(2314): n is a, c, g, or t
  misc_feature (2352)..(2352): n is a, c, g, or t
  misc_feature (2400)..(2400): n is a, c, g, or t
  misc_feature (2492)..(2492): n is a, c, g, or t
  misc_feature (2495)..(2495): n is a, c, g, or t
  misc_feature (2547)..(2547): n is a, c, g, or t
  misc_feature (2807)..(2807): n is a, c, g, or t
  misc_feature (2895)..(2895): n is a, c, g, or t

SEQ ID NO: 384614 - DNA, 1650 bp, Homo Sapiens; identical to SEQ ID NO: 353738
  misc_feature (89)..(89): n is a, c, g, or t
  misc_feature (149)..(205): n is a, c, g, or t
  misc_feature (224)..(246): n is a, c, g, or t
  misc_feature (261)..(261): n is a, c, g, or t
  misc_feature (264)..(264): n is a, c, g, or t

SEQ ID NO: 384615 - DNA, 642 bp, Homo Sapiens; identical to SEQ ID NO: 353739

SEQ ID NO: 384616 - DNA, 387 bp, Homo Sapiens; identical to SEQ ID NO: 353740
  misc_feature (200)..(200): n is a, c, g, or t
  misc_feature (321)..(321): n is a, c, g, or t
  misc_feature (356)..(356): n is a, c, g, or t
  misc_feature (372)..(372): n is a, c, g, or t

SEQ ID NO: 384617 - DNA, 1025 bp, Homo Sapiens; identical to SEQ ID NO: 353745
  misc_feature (49)..(136): n is a, c, g, or t

SEQ ID NO: 384618 - DNA, 543 bp, Homo Sapiens; identical to SEQ ID NO: 353746

SEQ ID NO: 384619 - DNA, 1316 bp, Homo Sapiens; identical to SEQ ID NO: 353752
  misc_feature (620)..(685): n is a, c, g, or t
  misc_feature (853)..(912): n is a, c, g, or t

SEQ ID NO: 384620 - DNA, 839 bp, Homo Sapiens; identical to SEQ ID NO: 353753
  misc_feature (565)..(628): n is a, c, g, or t
  misc_feature (670)..(670): n is a, c, g, or t
  misc_feature (672)..(673): n is a, c, g, or t
  misc_feature (676)..(676): n is a, c, g, or t

SEQ ID NO: 384621 - DNA, 806 bp, Homo Sapiens; identical to SEQ ID NO: 353754
  misc_feature (11)..(11): n is a, c, g, or t

SEQ ID NO: 384622 - DNA, 714 bp, Homo Sapiens; identical to SEQ ID NO: 353755

SEQ ID NO: 384623 - DNA, 1123 bp, Homo Sapiens; identical to SEQ ID NO: 353756
  misc_feature (580)..(641): n is a, c, g, or t
  misc_feature (645)..(646): n is a, c, g, or t
  misc_feature (649)..(651): n is a, c, g, or t
  misc_feature (654)..(655): n is a, c, g, or t
  misc_feature (657)..(835): n is a, c, g, or t
  misc_feature (841)..(882): n is a, c, g, or t
  misc_feature (884)..(884): n is a, c, g, or t
  misc_feature (888)..(888): n is a, c, g, or t
  misc_feature (890)..(890): n is a, c, g, or t
  misc_feature (914)..(914): n is a, c, g, or t
  misc_feature (931)..(942): n is a, c, g, or t
  misc_feature (967)..(967): n is a, c, g, or t
  misc_feature (994)..(994): n is a, c, g, or t
  misc_feature (1018)..(1018): n is a, c, g, or t
  misc_feature (1024)..(1024): n is a, c, g, or t
  misc_feature (1031)..(1031): n is a, c, g, or t
  misc_feature (1043)..(1043): n is a, c, g, or t

SEQ ID NO: 384624 - DNA, 576 bp, Homo Sapiens; identical to SEQ ID NO: 353758
  misc_feature (501)..(501): n is a, c, g, or t

SEQ ID NO: 384625 - DNA, 1830 bp, Homo Sapiens; identical to SEQ ID NO: 353759

SEQ ID NO: 384626 - DNA, 631 bp, Homo Sapiens; identical to SEQ ID NO: 353760

SEQ ID NO: 384627 - DNA, 734 bp, Homo Sapiens; identical to SEQ ID NO: 353763
  misc_feature (22)..(22): n is a, c, g, or t

SEQ ID NO: 384628 - DNA, 867 bp, Homo Sapiens; identical to SEQ ID NO: 353764

SEQ ID NO: 384629 - DNA, 1228 bp, Homo Sapiens; identical to SEQ ID NO: 353766

SEQ ID NO: 384630 - DNA, 900 bp, Homo Sapiens; identical to SEQ ID NO: 353767

SEQ ID NO: 384631 - DNA, 926 bp, Homo Sapiens; identical to SEQ ID NO: 353768
  misc_feature (267)..(344): n is a, c, g, or t
  misc_feature (522)..(523): n is a, c, g, or t

SEQ ID NO: 384632 - DNA, 1373 bp, Homo Sapiens; identical to SEQ ID NO: 353769
  misc_feature (319)..(371): n is a, c, g, or t
  misc_feature (924)..(924): n is a, c, g, or t
  misc_feature (946)..(946): n is a, c, g, or t
  misc_feature (957)..(957): n is a, c, g, or t
  misc_feature (1059)..(1059): n is a, c, g, or t
  misc_feature (1062)..(1063): n is a, c, g, or t
  misc_feature (1102)..(1102): n is a, c, g, or t
  misc_feature (1134)..(1134): n is a, c, g, or t
  misc_feature (1137)..(1137): n is a, c, g, or t
  misc_feature (1171)..(1173): n is a, c, g, or t
  misc_feature (1283)..(1283): n is a, c, g, or t
  misc_feature (1319)..(1319): n is a, c, g, or t
  misc_feature (1322)..(1322): n is a, c, g, or t
  misc_feature (1325)..(1325): n is a, c, g, or t
  misc_feature (1342)..(1343): n is a, c, g, or t
  misc_feature (1347)..(1347): n is a, c, g, or t
  misc_feature (1360)..(1360): n is a, c, g, or t
  misc_feature (1367)..(1367): n is a, c, g, or t
  misc_feature (1369)..(1370): n is a, c, g, or t

SEQ ID NO: 384633 - DNA, 577 bp, Homo Sapiens; identical to SEQ ID NO: 353770
  misc_feature (106)..(106): n is a, c, g, or t

SEQ ID NO: 384634 - DNA, 955 bp, Homo Sapiens; identical to SEQ ID NO: 353771

SEQ ID NO: 384635 - DNA, 2131 bp, Homo Sapiens; identical to SEQ ID NO: 353772
  misc_feature (51)..(87): n is a, c, g, or t
  misc_feature (1158)..(1189): n is a, c, g, or t
  misc_feature (1374)..(1430): n is a, c, g, or t
  misc_feature (1656)..(1656): n is a, c, g, or t
  misc_feature (1933)..(1946): n is a, c, g, or t
  misc_feature (1970)..(1970): n is a, c, g, or t
  misc_feature (1985)..(1985): n is a, c, g, or t
  misc_feature (2064)..(2064): n is a, c, g, or t

SEQ ID NO: 384636 - DNA, 887 bp, Homo Sapiens; identical to SEQ ID NO: 353774
  misc_feature (312)..(353): n is a, c, g, or t
  misc_feature (641)..(733): n is a, c, g, or t

SEQ ID NO: 384637 - DNA, 2885 bp, Homo Sapiens; identical to SEQ ID NO: 353775
  misc_feature (565)..(605): n is a, c, g, or t
  misc_feature (888)..(986): n is a, c, g, or t
  misc_feature (1738)..(1750): n is a, c, g, or t
  misc_feature (1988)..(1988): n is a, c, g, or t

SEQ ID NO: 384638 - DNA, 154 bp, Homo Sapiens; identical to SEQ ID NO: 353776

SEQ ID NO: 384639 - DNA, 730 bp, Homo Sapiens; identical to SEQ ID NO: 353790
  misc_feature (186)..(233): n is a, c, g, or t
  misc_feature (310)..(321): n is a, c, g, or t
  misc_feature (494)..(516): n is a, c, g, or t

SEQ ID NO: 384640 - DNA, 1442 bp, Homo Sapiens; identical to SEQ ID NO: 353791
  misc_feature (560)..(605): n is a, c, g, or t
  misc_feature (921)..(969): n is a, c, g, or t
  misc_feature (1046)..(1057): n is a, c, g, or t
  misc_feature (1194)..(1194): n is a, c, g, or t
  misc_feature (1231)..(1253): n is a, c, g, or t

SEQ ID NO: 384641 - DNA, 1307 bp, Homo Sapiens; identical to SEQ ID NO: 353792

SEQ ID NO: 384642 - DNA, 622 bp, Homo Sapiens; identical to SEQ ID NO: 353808
  misc_feature (474)..(474): n is a, c, g, or t
  misc_feature (517)..(517): n is a, c, g, or t

SEQ ID NO: 384643 - DNA, 2839 bp, Homo Sapiens; identical to SEQ ID NO: 353809

SEQ ID NO: 384644 - DNA, 699 bp, Homo Sapiens; identical to SEQ ID NO: 353810
  misc_feature (393)..(393): n is a, c, g, or t
  misc_feature (575)..(575): n is a, c, g, or t
  misc_feature (578)..(578): n is a, c, g, or t

SEQ ID NO: 384645 - DNA, 1310 bp, Homo Sapiens; identical to SEQ ID NO: 353811
  misc_feature (174)..(213): n is a, c, g, or t
  misc_feature (1057)..(1058): n is a, c, g, or t

SEQ ID NO: 384646 - DNA, 1001 bp, Homo Sapiens; identical to SEQ ID NO: 353812
  misc_feature (424)..(424): n is a, c, g, or t
  misc_feature (768)..(807): n is a, c, g, or t

SEQ ID NO: 384647 - DNA, 760 bp, Homo Sapiens; identical to SEQ ID NO: 353820

SEQ ID NO: 384648 - DNA, 1058 bp, Homo Sapiens; identical to SEQ ID NO: 353821

SEQ ID NO: 384649 - DNA, 3214 bp, Homo Sapiens; identical to SEQ ID NO: 353823
  misc_feature (21)..(21): n is a, c, g, or t
  misc_feature (36)..(36): n is a, c, g, or t
  misc_feature (2307)..(2308): n is a, c, g, or t
  misc_feature (2310)..(2337): n is a, c, g, or t
  misc_feature (2343)..(2343): n is a, c, g, or t
  misc_feature (2550)..(2550): n is a, c, g, or t
  misc_feature (2699)..(2699): n is a, c, g, or t
  misc_feature (2772)..(2772): n is a, c, g, or t
  misc_feature (2795)..(2795): n is a, c, g, or t
  misc_feature (2836)..(2836): n is a, c, g, or t
  misc_feature (2991)..(2991): n is a, c, g, or t
  misc_feature (3005)..(3005): n is a, c, g, or t
  misc_feature (3031)..(3031): n is a, c, g, or t
  misc_feature (3151)..(3151): n is a, c, g, or t
  misc_feature (3167)..(3167): n is a, c, g, or t

SEQ ID NO: 384650 - DNA, 547 bp, Homo Sapiens; identical to SEQ ID NO: 353824
  misc_feature (481)..(481): n is a, c, g, or t
  misc_feature (523)..(523): n is a, c, g, or t
  misc_feature (529)..(529): n is a, c, g, or t

SEQ ID NO: 384651 - DNA, 1056 bp, Homo Sapiens; identical to SEQ ID NO: 353825
  misc_feature (96)..(219): n is a, c, g, or t

SEQ ID NO: 384652 - DNA, 957 bp, Homo Sapiens; identical to SEQ ID NO: 353826
  misc_feature (80)..(188): n is a, c, g, or t
  misc_feature (352)..(369): n is a, c, g, or t

SEQ ID NO: 384653 - DNA, 347 bp, Homo Sapiens; identical to SEQ ID NO: 353827
  misc_feature (130)..(245): n is a, c, g, or t

SEQ ID NO: 384654 - DNA, 447 bp, Homo Sapiens; identical to SEQ ID NO: 353829

SEQ ID NO: 384655 - DNA, 859 bp, Homo Sapiens; identical to SEQ ID NO: 353830

SEQ ID NO: 384656 - DNA, 460 bp, Homo Sapiens; identical to SEQ ID NO: 353832

SEQ ID NO: 384657 - DNA, 459 bp, Homo Sapiens; identical to SEQ ID NO: 353833

SEQ ID NO: 384658 - DNA, 772 bp, Homo Sapiens; identical to SEQ ID NO: 353836
  misc_feature (401)..(422): n is a, c, g, or t
  misc_feature (546)..(573): n is a, c, g, or t

SEQ ID NO: 384659 - DNA, 261 bp, Homo Sapiens; identical to SEQ ID NO: 353837

SEQ ID NO: 384660 - DNA, 770 bp, Homo Sapiens; identical to SEQ ID NO: 353861

SEQ ID NO: 384661 - DNA, 491 bp, Homo Sapiens; identical to SEQ ID NO: 353862

SEQ ID NO: 384662 - DNA, 632 bp, Homo Sapiens; identical to SEQ ID NO: 353863
  misc_feature (234)..(242): n is a, c, g, or t
  misc_feature (360)..(360): n is a, c, g, or t
  misc_feature (519)..(559): n is a, c, g, or t

SEQ ID NO: 384663 - DNA, 1165 bp, Homo Sapiens; identical to SEQ ID NO: 353864

SEQ ID NO: 384664 - DNA, 814 bp, Homo Sapiens; identical to SEQ ID NO: 13834
  misc_feature (507)..(507): n is a, c, g, or t
  misc_feature (512)..(512): n is a, c, g, or t
  misc_feature (514)..(514): n is a, c, g, or t
  misc_feature (516)..(516): n is a, c, g, or t
  misc_feature (518)..(518): n is a, c, g, or t
  misc_feature (521)..(521): n is a, c, g, or t
  misc_feature (523)..(526): n is a, c, g, or t
  misc_feature (528)..(529): n is a, c, g, or t
  misc_feature (532)..(535): n is a, c, g, or t
  misc_feature (689)..(697): n is a, c, g, or t

SEQ ID NO: 384665 - DNA, 440 bp, Homo Sapiens; identical to SEQ ID NO: 353866

SEQ ID NO: 384666 - DNA, 1488 bp, Homo Sapiens; identical to SEQ ID NO: 353869

SEQ ID NO: 384667 - DNA, 726 bp, Homo Sapiens; identical to SEQ ID NO: 353870

SEQ ID NO: 384668 - DNA, 391 bp, Homo Sapiens; identical to SEQ ID NO: 353873

SEQ ID NO: 384669 - DNA, 971 bp, Homo Sapiens; identical to SEQ ID NO: 353874
  misc_feature (508)..(508): n is a, c, g, or t
  misc_feature (510)..(510): n is a, c, g, or t
  misc_feature (519)..(519): n is a, c, g, or t
  misc_feature (521)..(521): n is a, c, g, or t
  misc_feature (523)..(524): n is a, c, g, or t

SEQ ID NO: 384670 - DNA, 1645 bp, Homo Sapiens; identical to SEQ ID NO: 353878
  misc_feature (1168)..(1184): n is a, c, g, or t
  misc_feature (1315)..(1316): n is a, c, g, or t
  misc_feature (1477)..(1491): n is a, c, g, or t

SEQ ID NO: 384671 - DNA, 1075 bp, Homo Sapiens; identical to SEQ ID NO: 353879
  misc_feature (45)..(45): n is a, c, g, or t
  misc_feature (57)..(89): n is a, c, g, or t

SEQ ID NO: 384672 - DNA, 1025 bp, Homo Sapiens; identical to SEQ ID NO: 353881
  misc_feature (607)..(727): n is a, c, g, or t
  misc_feature (946)..(954): n is a, c, g, or t
  misc_feature (971)..(980): n is a, c, g, or t

SEQ ID NO: 384673 - DNA, 998 bp, Homo Sapiens; identical to SEQ ID NO: 353882

SEQ ID NO: 384674 - DNA, 725 bp, Homo Sapiens; identical to SEQ ID NO: 353883
  misc_feature (19)..(19): n is a, c, g, or t

SEQ ID NO: 384675 - DNA, 1972 bp, Homo Sapiens; identical to SEQ ID NO: 353884
  misc_feature (1041)..(1074): n is a, c, g, or t
  misc_feature (1698)..(1709): n is a, c, g, or t
  misc_feature (1954)..(1954): n is a, c, g, or t

SEQ ID NO: 384676 - DNA, 715 bp, Homo Sapiens; identical to SEQ ID NO: 353886
  misc_feature (39)..(39): n is a, c, g, or t
  misc_feature (43)..(43): n is a, c, g, or t
  misc_feature (60)..(60): n is a, c, g, or t
  misc_feature (71)..(71): n is a, c, g, or t
  misc_feature (75)..(75): n is a, c, g, or t
  misc_feature (88)..(88): n is a, c, g, or t
  misc_feature (154)..(201): n is a, c, g, or t

SEQ ID NO: 384677 - DNA, 596 bp, Homo Sapiens; identical to SEQ ID NO: 353887
  misc_feature (371)..(391): n is a, c, g, or t
  misc_feature (596)..(596): n is a, c, g, or t

SEQ ID NO: 384678 - DNA, 2014 bp, Homo Sapiens; identical to SEQ ID NO: 353890
  misc_feature (1447)..(1475): n is a, c, g, or t
  misc_feature (1901)..(1901): n is a, c, g, or t

SEQ ID NO: 384679 - DNA, 681 bp, Homo Sapiens; identical to SEQ ID NO: 353891

SEQ ID NO: 384680 - DNA, 484 bp, Homo Sapiens; identical to SEQ ID NO: 353898

SEQ ID NO: 384681 - DNA, 1830 bp, Homo Sapiens; identical to SEQ ID NO: 353899
  misc_feature (74)..(82): n is a, c, g, or t
  misc_feature (698)..(710): n is a, c, g, or t

SEQ ID NO: 384682 - DNA, 604 bp, Homo Sapiens; identical to SEQ ID NO: 353900
  misc_feature (11)..(11): n is a, c, g, or t
  misc_feature (23)..(23): n is a, c, g, or t
  misc_feature (33)..(33): n is a, c, g, or t
  misc_feature (483)..(509): n is a, c, g, or t

SEQ ID NO: 384683 - DNA, 1004 bp, Homo Sapiens; identical to SEQ ID NO: 353901

SEQ ID NO: 384684 - DNA, 1241 bp, Homo Sapiens; identical to SEQ ID NO: 353902

SEQ ID NO: 384685 - DNA, 785 bp, Homo Sapiens; identical to SEQ ID NO: 353915

SEQ ID NO: 384686 - DNA, 987 bp, Homo Sapiens; identical to SEQ ID NO: 353916

SEQ ID NO: 384687 - DNA, 586 bp, Homo Sapiens; identical to SEQ ID NO: 353917
  misc_feature (34)..(34): n is a, c, g, or t
  misc_feature (58)..(58): n is a, c, g, or t
  misc_feature (104)..(104): n is a, c, g, or t
  misc_feature (123)..(123): n is a, c, g, or t
  misc_feature (142)..(142): n is a, c, g, or t
  misc_feature (157)..(157): n is a, c, g, or t

SEQ ID NO: 384688 - DNA, 421 bp, Homo Sapiens; identical to SEQ ID NO: 353918
  misc_feature (71)..(71): n is a, c, g, or t

SEQ ID NO: 384689 - DNA, 899 bp, Homo Sapiens; identical to SEQ ID NO: 353919
  misc_feature (237)..(493): n is a, c, g, or t

SEQ ID NO: 384690 - DNA, 551 bp, Homo Sapiens; identical to SEQ ID NO: 353920
  misc_feature (18)..(18): n is a, c, g, or t
  misc_feature (37)..(37): n is a, c, g, or t

SEQ ID NO: 384691 - DNA, 484 bp, Homo Sapiens; identical to SEQ ID NO: 353921

SEQ ID NO: 384692 - DNA, 483 bp, Homo Sapiens; identical to SEQ ID NO: 353922

SEQ ID NO: 384693 - DNA, 429 bp, Homo Sapiens; identical to SEQ ID NO: 353923

SEQ ID NO: 384694 - DNA, 1654 bp, Homo Sapiens; identical to SEQ ID NO: 353926
  misc_feature (532)..(542): n is a, c, g, or t
  misc_feature (1021)..(1036): n is a, c, g, or t
  misc_feature (1245)..(1308): n is a, c, g, or t

SEQ ID NO: 384695 - DNA, 922 bp, Homo Sapiens; identical to SEQ ID NO: 353927

SEQ ID NO: 384696 - DNA, 1238 bp, Homo Sapiens; identical to SEQ ID NO: 353933
  misc_feature (230)..(249): n is a, c, g, or t
  misc_feature (604)..(617): n is a, c, g, or t

SEQ ID NO: 384697 - DNA, 726 bp, Homo Sapiens; identical to SEQ ID NO: 353934

SEQ ID NO: 384698 - DNA, 1735 bp, Homo Sapiens; identical to SEQ ID NO: 353940
  misc_feature (1376)..(1384): n is a, c, g, or t

SEQ ID NO: 384699 - DNA, 441 bp, Homo Sapiens; identical to SEQ ID NO: 353941
  misc_feature (23)..(23): n is a, c, g, or t
  misc_feature (28)..(28): n is a, c, g, or t
  misc_feature (37)..(37): n is a, c, g, or t
  misc_feature (53)..(53): n is a, c, g, or t

SEQ ID NO: 384700 - DNA, 940 bp, Homo Sapiens; identical to SEQ ID NO: 353942

SEQ ID NO: 384701 - DNA, 2755 bp, Homo Sapiens; identical to SEQ ID NO: 353943
  misc_feature (2675)..(2675): n is a, c, g, or t

SEQ ID NO: 384702 - DNA, 1168 bp, Homo Sapiens; identical to SEQ ID NO: 353944
  misc_feature (628)..(628): n is a, c, g, or t

SEQ ID NO: 384703 - DNA, 1097 bp, Homo Sapiens; identical to SEQ ID NO: 353945

SEQ ID NO: 384704 - DNA, 1625 bp, Homo Sapiens; identical to SEQ ID NO: 353946

SEQ ID NO: 384705 - DNA, 2241 bp, Homo Sapiens; identical to SEQ ID NO: 353947

SEQ ID NO: 384706 - DNA, 1498 bp, Homo Sapiens; identical to SEQ ID NO: 353949
  misc_feature (72)..(72): n is a, c, g, or t
  misc_feature (90)..(90): n is a, c, g, or t
  misc_feature (563)..(563): n is a, c, g, or t

SEQ ID NO: 384707 - DNA, 791 bp, Homo Sapiens; identical to SEQ ID NO: 353950
  misc_feature (127)..(165): n is a, c, g, or t

SEQ ID NO: 384708 - DNA, 1051 bp, Homo Sapiens; identical to SEQ ID NO: 353951
  misc_feature (425)..(463): n is a, c, g, or t
  misc_feature (603)..(621): n is a, c, g, or t
  misc_feature (674)..(715): n is a, c, g, or t

SEQ ID NO: 384709 - DNA, 1582 bp, Homo Sapiens; identical to SEQ ID NO: 353959
  misc_feature (855)..(863): n is a, c, g, or t
  misc_feature (1001)..(1027): n is a, c, g, or t
  misc_feature (1276)..(1297): n is a, c, g, or t

SEQ ID NO: 384710 - DNA, 536 bp, Homo Sapiens; identical to SEQ ID NO: 353960
  misc_feature (68)..(68): n is a, c, g, or t
  misc_feature (75)..(75): n is a, c, g, or t
  misc_feature (93)..(93): n is a, c, g, or t
  misc_feature (110)..(110): n is a, c, g, or t
  misc_feature (134)..(134): n is a, c, g, or t
  misc_feature (149)..(149): n is a, c, g, or t
  misc_feature (178)..(178): n is a, c, g, or t

SEQ ID NO: 384711 - DNA, 1083 bp, Homo Sapiens; identical to SEQ ID NO: 353968
  misc_feature (933)..(933): n is a, c, g, or t
  misc_feature (1011)..(1012): n is a, c, g, or t
  misc_feature (1066)..(1066): n is a, c, g, or t

SEQ ID NO: 384712 - DNA, 324 bp, Homo Sapiens; identical to SEQ ID NO: 353969
  misc_feature (221)..(221): n is a, c, g, or t
  misc_feature (232)..(232): n is a, c, g, or t
  misc_feature (277)..(278): n is a, c, g, or t

SEQ ID NO: 384713 - DNA, 1388 bp, Homo Sapiens; identical to SEQ ID NO: 353973
  misc_feature (296)..(331): n is a, c, g, or t

SEQ ID NO: 384714 - DNA, 1049 bp, Homo Sapiens; identical to SEQ ID NO: 353974
  misc_feature (27)..(27): n is a, c, g, or t
  misc_feature (32)..(34): n is a, c, g, or t
  misc_feature (36)..(36): n is a, c, g, or t
  misc_feature (48)..(48): n is a, c, g, or t
  misc_feature (55)..(55): n is a, c, g, or t
  misc_feature (75)..(75): n is a, c, g, or t
  misc_feature (77)..(77): n is a, c, g, or t
  misc_feature (108)..(108): n is a, c, g, or t
  misc_feature (178)..(178): n is a, c, g, or t
  misc_feature (194)..(195): n is a, c, g, or t
  misc_feature (200)..(200): n is a, c, g, or t
  misc_feature (242)..(243): n is a, c, g, or t
  misc_feature (253)..(254): n is a, c, g, or t
  misc_feature (265)..(265): n is a, c, g, or t
  misc_feature (271)..(273): n is a, c, g, or t
  misc_feature (281)..(282): n is a, c, g, or t
  misc_feature (285)..(286): n is a, c, g, or t
  misc_feature (288)..(288): n is a, c, g, or t
  misc_feature (290)..(290): n is a, c, g, or t
  misc_feature (296)..(299): n is a, c, g, or t
  misc_feature (303)..(305): n is a, c, g, or t
  misc_feature (309)..(312): n is a, c, g, or t
  misc_feature (314)..(316): n is a, c, g, or t
  misc_feature (318)..(322): n is a, c, g, or t
  misc_feature (324)..(324): n is a, c, g, or t
  misc_feature (327)..(327): n is a, c, g, or t
  misc_feature (364)..(364): n is a, c, g, or t
  misc_feature (373)..(373): n is a, c, g, or t
  misc_feature (420)..(480): n is a, c, g, or t
  misc_feature (495)..(507): n is a, c, g, or t
  misc_feature (509)..(509): n is a, c, g, or t

SEQ ID NO: 384715 - DNA, 224 bp, Homo Sapiens; identical to SEQ ID NO: 353975

SEQ ID NO: 384716 - DNA, 219 bp, Homo Sapiens; identical to SEQ ID NO: 353976

SEQ ID NO: 384717 - DNA, 1548 bp, Homo Sapiens; identical to SEQ ID NO: 353977
  misc_feature (1485)..(1494): n is a, c, g, or t

SEQ ID NO: 384718 - DNA, 232 bp, Homo Sapiens; identical to SEQ ID NO: 353978

SEQ ID NO: 384719 - DNA, 1068 bp, Homo Sapiens; identical to SEQ ID NO: 353981
  misc_feature (505)..(572): n is a, c, g, or t
  misc_feature (890)..(890): n is a, c, g, or t
  misc_feature (918)..(918): n is a, c, g, or t
  misc_feature (940)..(940): n is a, c, g, or t

SEQ ID NO: 384720 - DNA, 822 bp, Homo Sapiens; identical to SEQ ID NO: 353982
  misc_feature (49)..(116): n is a, c, g, or t

SEQ ID NO: 384721 - DNA, 801 bp, Homo Sapiens; identical to SEQ ID NO: 353983

SEQ ID NO: 384722 - DNA, 532 bp, Homo Sapiens; identical to SEQ ID NO: 353989

SEQ ID NO: 384723 - DNA, 1632 bp, Homo Sapiens; identical to SEQ ID NO: 353990

SEQ ID NO: 384724 - DNA, 500 bp, Homo Sapiens; identical to SEQ ID NO: 353991

SEQ ID NO: 384725 - DNA, 565 bp, Homo Sapiens; identical to SEQ ID NO: 353994

SEQ ID NO: 384726 - DNA, 760 bp, Homo Sapiens; identical to SEQ ID NO: 353995

SEQ ID NO: 384727 - DNA, 1915 bp, Homo Sapiens; identical to SEQ ID NO: 353996
  misc_feature (1881)..(1882): n is a, c, g, or t

SEQ ID NO: 384728 - DNA, 774 bp, Homo Sapiens; identical to SEQ ID NO: 164484

SEQ ID NO: 384729 - DNA, 1026 bp, Homo Sapiens; identical to SEQ ID NO: 353998
  misc_feature (785)..(785): n is a, c, g, or t

SEQ ID NO: 384730 - DNA, 2191 bp, Homo Sapiens; identical to SEQ ID NO: 354002
  misc_feature (131)..(139): n is a, c, g, or t
  misc_feature (1938)..(1959): n is a, c, g, or t

SEQ ID NO: 384731 - DNA, 644 bp, Homo Sapiens; identical to SEQ ID NO: 178345
  misc_feature (281)..(300): n is a, c, g, or t

SEQ ID NO: 384732 - DNA, 3809 bp, Homo Sapiens; identical to SEQ ID NO: 354004
  misc_feature (102)..(121): n is a, c, g, or t
  misc_feature (265)..(265): n is a, c, g, or t
  misc_feature (545)..(545): n is a, c, g, or t
  misc_feature (571)..(571): n is a, c, g, or t
  misc_feature (633)..(642): n is a, c, g, or t
  misc_feature (2674)..(2716): n is a, c, g, or t

SEQ ID NO: 384733 - DNA, 412 bp, Homo Sapiens; identical to SEQ ID NO: 354005
  misc_feature (16)..(16): n is a, c, g, or t

SEQ ID NO: 384734 - DNA, 1803 bp, Homo Sapiens; identical to SEQ ID NO: 354006

SEQ ID NO: 384735 - DNA, 605 bp, Homo Sapiens; identical to SEQ ID NO: 354007

SEQ ID NO: 384736 - DNA, 749 bp, Homo Sapiens; identical to SEQ ID NO: 354016

SEQ ID NO: 384737 - DNA, 1330 bp, Homo Sapiens; identical to SEQ ID NO: 354017
  misc_feature (42)..(42): n is a, c, g, or t
  misc_feature (60)..(99): n is a, c, g, or t
  misc_feature (102)..(137): n is a, c, g, or t
  misc_feature (184)..(194): n is a, c, g, or t

SEQ ID NO: 384738 - DNA, 1322 bp, Homo Sapiens; identical to SEQ ID NO: 354020
  misc_feature (941)..(977): n is a, c, g, or t

SEQ ID NO: 384739 - DNA, 1267 bp, Homo Sapiens; identical to SEQ ID NO: 354021

SEQ ID NO: 384740 - DNA, 513 bp, Homo Sapiens; identical to SEQ ID NO: 354022

SEQ ID NO: 384741 - DNA, 465 bp, Homo Sapiens; identical to SEQ ID NO: 354023
  misc_feature (11)..(11): n is a, c, g, or t
  misc_feature (68)..(68): n is a, c, g, or t
  misc_feature (242)..(242): n is a, c, g, or t

SEQ ID NO: 384742 - DNA, 1034 bp, Homo Sapiens; identical to SEQ ID NO: 354037
  misc_feature (38)..(38): n is a, c, g, or t
  misc_feature (52)..(52): n is a, c, g, or t
  misc_feature (87)..(87): n is a, c, g, or t
  misc_feature (136)..(154): n is a, c, g, or t
  misc_feature (162)..(163): n is a, c, g, or t
  misc_feature (451)..(511): n is a, c, g, or t
  misc_feature (515)..(515): n is a, c, g, or t
  misc_feature (820)..(820): n is a, c, g, or t
  misc_feature (987)..(987): n is a, c, g, or t
  misc_feature (1005)..(1005): n is a, c, g, or t
  misc_feature (1009)..(1009): n is a, c, g, or t
  misc_feature (1025)..(1025): n is a, c, g, or t
  misc_feature (1028)..(1028): n is a, c, g, or t
  misc_feature (1033)..(1033): n is a, c, g, or t

SEQ ID NO: 384743 - DNA, 186 bp, Homo Sapiens; identical to SEQ ID NO: 354038

SEQ ID NO: 384744 - DNA, 1633 bp, Homo Sapiens; identical to SEQ ID NO: 354042
  misc_feature (9)..(10): n is a, c, g, or t
  misc_feature (27)..(27): n is a, c, g, or t
  misc_feature (214)..(214): n is a, c, g, or t
  misc_feature (229)..(229): n is a, c, g, or t

SEQ ID NO: 384745 - DNA, 1324 bp, Homo Sapiens; identical to SEQ ID NO: 354043
  misc_feature (29)..(29): n is a, c, g, or t
  misc_feature (93)..(93): n is a, c, g, or t
  misc_feature (99)..(99): n is a, c, g, or t
  misc_feature (108)..(108): n is a, c, g, or t
  misc_feature (192)..(192): n is a, c, g, or t
  misc_feature (197)..(197): n is a, c, g, or t
  misc_feature (199)..(199): n is a, c, g, or t
  misc_feature (202)..(202): n is a, c, g, or t
  misc_feature (271)..(271): n is a, c, g, or t
  misc_feature (279)..(279): n is a, c, g, or t
  misc_feature (329)..(329): n is a, c, g, or t
  misc_feature (385)..(385): n is a, c, g, or t
  misc_feature (424)..(424): n is a, c, g, or t
  misc_feature (478)..(478): n is a, c, g, or t
  misc_feature (505)..(505): n is a, c, g, or t
  misc_feature (549)..(549): n is a, c, g, or t
  misc_feature (575)..(575): n is a, c, g, or t
  misc_feature (606)..(606): n is a, c, g, or t

SEQ ID NO: 384746 - DNA, 925 bp, Homo Sapiens; identical to SEQ ID NO: 354044
  misc_feature (72)..(81): n is a, c, g, or t

SEQ ID NO: 384747 - DNA, 879 bp, Homo Sapiens; identical to SEQ ID NO: 354045
  misc_feature (801)..(837): n is a, c, g, or t

SEQ ID NO: 384748 - DNA, 506 bp, Homo Sapiens; identical to SEQ ID NO: 354057

SEQ ID NO: 384749 - DNA, 434 bp, Homo Sapiens; identical to SEQ ID NO: 354058
  misc_feature (395)..(395): n is a, c, g, or t

SEQ ID NO: 384750 - DNA, 1843 bp, Homo Sapiens; identical to SEQ ID NO: 354061

SEQ ID NO: 384751 - DNA, 497 bp, Homo Sapiens; identical to SEQ ID NO: 354062

SEQ ID NO: 384752 - DNA, 1563 bp, Homo Sapiens; identical to SEQ ID NO: 354063
  misc_feature (528)..(528): n is a, c, g, or t
  misc_feature (1480)..(1522): n is a, c, g, or t

SEQ ID NO: 384753 - DNA, 936 bp, Homo Sapiens; identical to SEQ ID NO: 354064

SEQ ID NO: 384754 - DNA, 1914 bp, Homo Sapiens; identical to SEQ ID NO: 354066

SEQ ID NO: 384755 - DNA, 667 bp, Homo Sapiens; identical to SEQ ID NO: 354067

SEQ ID NO: 384756 - DNA, 853 bp, Homo Sapiens; identical to SEQ ID NO: 354068
  misc_feature (117)..(117): n is a, c, g, or t
  misc_feature (147)..(147): n is a, c, g, or t

SEQ ID NO: 384757 - DNA, 1482 bp, Homo Sapiens; identical to SEQ ID NO: 354069
  misc_feature (23)..(23): n is a, c, g, or t
  misc_feature (36)..(36): n is a, c, g, or t
  misc_feature (92)..(92): n is a, c, g, or t
  misc_feature (157)..(157): n is a, c, g, or t
  misc_feature (159)..(159): n is a, c, g, or t
  misc_feature (161)..(161): n is a, c, g, or t
  misc_feature (273)..(281): n is a, c, g, or t
  misc_feature (885)..(906): n is a, c, g, or t

SEQ ID NO: 384758 - DNA, 2145 bp, Homo Sapiens; identical to SEQ ID NO: 354070
  misc_feature (2095)..(2095): n is a, c, g, or t

SEQ ID NO: 384759 - DNA, 660 bp, Homo Sapiens; identical to SEQ ID NO: 354071
  misc_feature (30)..(30): n is a, c, g, or t
  misc_feature (162)..(278): n is a, c, g, or t

SEQ ID NO: 384760 - DNA, 1123 bp, Homo Sapiens; identical to SEQ ID NO: 354072
  misc_feature (996)..(1005): n is a, c, g, or t

SEQ ID NO: 384761 - DNA, 787 bp, Homo Sapiens; identical to SEQ ID NO: 354073

SEQ ID NO: 384762 - DNA, 2660 bp, Homo Sapiens; identical to SEQ ID NO: 354076
  misc_feature (69)..(120): n is a, c, g, or t

SEQ ID NO: 384763 - DNA, 546 bp, Homo Sapiens; identical to SEQ ID NO: 354077
  misc_feature (446)..(446): n is a, c, g, or t
  misc_feature (463)..(463): n is a, c, g, or t
  misc_feature (475)..(475): n is a, c, g, or t
  misc_feature (483)..(483): n is a, c, g, or t

SEQ ID NO: 384764 - DNA, 343 bp, Homo Sapiens; identical to SEQ ID NO: 354082
  misc_feature (45)..(45): n is a, c, g, or t

SEQ ID NO: 384765 - DNA, 1116 bp, Homo Sapiens; identical to SEQ ID NO: 354083
  misc_feature (750)..(833): n is a, c, g, or t

SEQ ID NO: 384766 - DNA, 1242 bp, Homo Sapiens; identical to SEQ ID NO: 354087

SEQ ID NO: 384767 - DNA, 1237 bp, Homo Sapiens; identical to SEQ ID NO: 354088
  misc_feature (69)..(69): n is a, c, g, or t

SEQ ID NO: 384768 - DNA, 145 bp, Homo Sapiens; identical to SEQ ID NO: 354089

SEQ ID NO: 384769 - DNA, 883 bp, Homo Sapiens; identical to SEQ ID NO: 174906

SEQ ID NO: 384770 - DNA, 510 bp, Homo Sapiens; identical to SEQ ID NO: 259940

SEQ ID NO: 384771 - DNA, 1151 bp, Homo Sapiens; identical to SEQ ID NO: 354095
  misc_feature (2)..(2): n is a, c, g, or t
  misc_feature (1008)..(1008): n is a, c, g, or t
  misc_feature (1026)..(1026): n is a, c, g, or t
  misc_feature (1054)..(1054): n is a, c, g, or t
  misc_feature (1060)..(1060): n is a, c, g, or t
  misc_feature (1073)..(1073): n is a, c, g, or t
  misc_feature (1095)..(1095): n is a, c, g, or t
  misc_feature (1098)..(1098): n is a, c, g, or t
  misc_feature (1100)..(1100): n is a, c, g, or t
  misc_feature (1107)..(1107): n is a, c, g, or t
  misc_feature (1113)..(1113): n is a, c, g, or t
  misc_feature (1117)..(1118): n is a, c, g, or t
  misc_feature (1122)..(1122): n is a, c, g, or t
  misc_feature (1132)..(1132): n is a, c, g, or t
  misc_feature (1145)..(1145): n is a, c, g, or t

SEQ ID NO: 384772 - DNA, 1081 bp, Homo Sapiens; identical to SEQ ID NO: 354096
  misc_feature (907)..(908): n is a, c, g, or t
  misc_feature (974)..(974): n is a, c, g, or t
  misc_feature (1010)..(1010): n is a, c, g, or t
  misc_feature (1013)..(1013): n is a, c, g, or t
  misc_feature (1028)..(1028): n is a, c, g, or t
  misc_feature (1031)..(1031): n is a, c, g, or t
  misc_feature (1035)..(1035): n is a, c, g, or t
  misc_feature (1041)..(1041): n is a, c, g, or t
  misc_feature (1051)..(1051): n is a, c, g, or t
  misc_feature (1055)..(1055): n is a, c, g, or t
  misc_feature (1060)..(1060): n is a, c, g, or t
  misc_feature (1073)..(1074): n is a, c, g, or t

SEQ ID NO: 384773 - DNA, 501 bp, Homo Sapiens; identical to SEQ ID NO: 354097
  misc_feature (394)..(394): n is a, c, g, or t
  misc_feature (441)..(441): n is a, c, g, or t
  misc_feature (451)..(451): n is a, c, g, or t
  misc_feature (461)..(461): n is a, c, g, or t
  misc_feature (474)..(474): n is a, c, g, or t

SEQ ID NO: 384774 - DNA, 1946 bp, Homo Sapiens; identical to SEQ ID NO: 354099

SEQ ID NO: 384775 - DNA, 433 bp, Homo Sapiens; identical to SEQ ID NO: 264544

SEQ ID NO: 384776 - DNA, 480 bp, Homo Sapiens; identical to SEQ ID NO: 354105
  misc_feature (33)..(33): n is a, c, g, or t
  misc_feature (90)..(241): n is a, c, g, or t

SEQ ID NO: 384777 - DNA, 430 bp, Homo Sapiens; identical to SEQ ID NO: 354106

SEQ ID NO: 384778 - DNA, 1407 bp, Homo Sapiens; identical to SEQ ID NO: 354115

SEQ ID NO: 384779 - DNA, 656 bp, Homo Sapiens; identical to SEQ ID NO: 354116
  misc_feature (196)..(262): n is a, c, g, or t

SEQ ID NO: 384780 - DNA, 438 bp, Homo Sapiens; identical to SEQ ID NO: 354117

SEQ ID NO: 384781 - DNA, 948 bp, Homo Sapiens; identical to SEQ ID NO: 354118

SEQ ID NO: 384782 - DNA, 906 bp, Homo Sapiens; identical to SEQ ID NO: 354119

SEQ ID NO: 384783 - DNA, 851 bp, Homo Sapiens; identical to SEQ ID NO: 354120

SEQ ID NO: 384784 - DNA, 252 bp, Homo Sapiens; identical to SEQ ID NO: 354121

SEQ ID NO: 384785 - DNA, 435 bp, Homo Sapiens; identical to SEQ ID NO: 354122

SEQ ID NO: 384786 - DNA, 906 bp, Homo Sapiens; identical to SEQ ID NO: 354126

SEQ ID NO: 384787 - DNA, 2728 bp, Homo Sapiens; identical to SEQ ID NO: 354127
  misc_feature (2196)..(2215): n is a, c, g, or t
  misc_feature (2224)..(2262): n is a, c, g, or t
  misc_feature (2309)..(2381): n is a, c, g, or t
  misc_feature (2420)..(2428): n is a, c, g, or t
  misc_feature (2435)..(2567): n is a, c, g, or t
  misc_feature (2609)..(2609): n is a, c, g, or t

SEQ ID NO: 384788 - DNA, 1064 bp, Homo Sapiens; identical to SEQ ID NO: 354132

SEQ ID NO: 384789 - DNA, 983 bp, Homo Sapiens; identical to SEQ ID NO: 354133

SEQ ID NO: 384790 - DNA, 962 bp, Homo Sapiens; identical to SEQ ID NO: 354134
  misc_feature (886)..(886): n is a, c, g, or t
  misc_feature (895)..(895): n is a, c, g, or t
  misc_feature (923)..(923): n is a, c, g, or t
  misc_feature (952)..(952): n is a, c, g, or t

SEQ ID NO: 384791 - DNA, 1162 bp, Homo Sapiens; identical to SEQ ID NO: 354135
  misc_feature (1069)..(1069): n is a, c, g, or t
  misc_feature (1074)..(1074): n is a, c, g, or t
  misc_feature (1084)..(1084): n is a, c, g, or t
  misc_feature (1088)..(1089): n is a, c, g, or t
  misc_feature (1095)..(1095): n is a, c, g, or t
  misc_feature (1102)..(1103): n is a, c, g, or t
  misc_feature (1112)..(1112): n is a, c, g, or t
  misc_feature (1120)..(1120): n is a, c, g, or t
  misc_feature (1131)..(1131): n is a, c, g, or t
  misc_feature (1134)..(1134): n is a, c, g, or t
  misc_feature (1145)..(1145): n is a, c, g, or t
  misc_feature (1151)..(1151): n is a, c, g, or t
  misc_feature (1159)..(1159): n is a, c, g, or t

SEQ ID NO: 384792 - DNA, 3040 bp, Homo Sapiens; identical to SEQ ID NO: 354151
  misc_feature (72)..(131): n is a, c, g, or t

SEQ ID NO: 384793 - DNA, 942 bp, Homo Sapiens; identical to SEQ ID NO: 354152

SEQ ID NO: 384794 - DNA, 991 bp, Homo Sapiens; identical to SEQ ID NO: 354153
  misc_feature (856)..(856): n is a, c, g, or t
  misc_feature (936)..(936): n is a, c, g, or t

SEQ ID NO: 384795 - DNA, 1165 bp, Homo Sapiens; identical to SEQ ID NO: 354156
  misc_feature (531)..(553): n is a, c, g, or t
  misc_feature (1006)..(1068): n is a, c, g, or t

SEQ ID NO: 384796 - DNA, 888 bp, Homo Sapiens; identical to SEQ ID NO: 354157

SEQ ID NO: 384797 - DNA, 892 bp, Homo Sapiens; identical to SEQ ID NO: 354158

SEQ ID NO: 384798 - DNA, 1532 bp, Homo Sapiens; identical to SEQ ID NO: 354161
  misc_feature (410)..(410): n is a, c, g, or t
  misc_feature (417)..(452): n is a, c, g, or t
  misc_feature (1010)..(1010): n is a, c, g, or t
  misc_feature (1486)..(1486): n is a, c, g, or t

SEQ ID NO: 384799 - DNA, 1156 bp, Homo Sapiens; identical to SEQ ID NO: 354162
  misc_feature (722)..(747): n is a, c, g, or t
  misc_feature (749)..(762): n is a, c, g, or t
  misc_feature (771)..(772): n is a, c, g, or t

SEQ ID NO: 384800 - DNA, 1889 bp, Homo Sapiens; identical to SEQ ID NO: 354166
  misc_feature (84)..(84): n is a, c, g, or t
  misc_feature (162)..(209): n is a, c, g, or t
  misc_feature (1507)..(1528): n is a, c, g, or t

SEQ ID NO: 384801 - DNA, 1571 bp, Homo Sapiens; identical to SEQ ID NO: 354167
  misc_feature (515)..(537): n is a, c, g, or t

SEQ ID NO: 384802 - DNA, 1388 bp, Homo Sapiens; identical to SEQ ID NO: 354168
  misc_feature (166)..(216): n is a, c, g, or t
  misc_feature (700)..(702): n is a, c, g, or t
  misc_feature (707)..(707): n is a, c, g, or t
  misc_feature (710)..(710): n is a, c, g, or t
  misc_feature (720)..(721): n is a, c, g, or t
  misc_feature (724)..(724): n is a, c, g, or t
  misc_feature (726)..(733): n is a, c, g, or t
  misc_feature (735)..(737): n is a, c, g, or t
  misc_feature (740)..(742): n is a, c, g, or t
  misc_feature (744)..(744): n is a, c, g, or t
  misc_feature (770)..(770): n is a, c, g, or t

SEQ ID NO: 384803 - DNA, 813 bp, Homo Sapiens; identical to SEQ ID NO: 354175

SEQ ID NO: 384804 - DNA, 462 bp, Homo Sapiens; identical to SEQ ID NO: 354176
  misc_feature (317)..(354): n is a, c, g, or t

SEQ ID NO: 384805 - DNA, 1691 bp, Homo Sapiens; identical to SEQ ID NO: 354177

SEQ ID NO: 384806 - DNA, 1848 bp, Homo Sapiens; identical to SEQ ID NO: 354178
  misc_feature (475)..(475): n is a, c, g, or t
  misc_feature (698)..(736): n is a, c, g, or t
  misc_feature (1835)..(1835): n is a, c, g, or t

SEQ ID NO: 384807 - DNA, 474 bp, Homo Sapiens; identical to SEQ ID NO: 354179
  misc_feature (197)..(197): n is a, c, g, or t
  misc_feature (335)..(335): n is a, c, g, or t
  misc_feature (407)..(407): n is a, c, g, or t
  misc_feature (446)..(446): n is a, c, g, or t
  misc_feature (456)..(456): n is a, c, g, or t

SEQ ID NO: 384808 - DNA, 674 bp, Homo Sapiens; identical to SEQ ID NO: 354182

SEQ ID NO: 384809 - DNA, 789 bp, Homo Sapiens; identical to SEQ ID NO: 354183

SEQ ID NO: 384810 - DNA, 1335 bp, Homo Sapiens; identical to SEQ ID NO: 354191

SEQ ID NO: 384811 - DNA, 383 bp, Homo Sapiens; identical to SEQ ID NO: 354192
  misc_feature (353)..(353): n is a, c, g, or t

SEQ ID NO: 384812 - DNA, 1487 bp, Homo Sapiens; identical to SEQ ID NO: 354194
  misc_feature (104)..(104): n is a, c, g, or t

SEQ ID NO: 384813 - DNA, 2052 bp, Homo Sapiens; identical to SEQ ID NO: 354195
  misc_feature (1820)..(1820): n is a, c, g, or t
  misc_feature (1824)..(1824): n is a, c, g, or t
  misc_feature (1830)..(1830): n is a, c, g, or t
  misc_feature (1854)..(1854): n is a, c, g, or t
  misc_feature (1866)..(1866): n is a, c, g, or t
  misc_feature (1876)..(1876): n is a, c, g, or t
  misc_feature (1890)..(1891): n is a, c, g, or t
  misc_feature (1893)..(1894): n is a, c, g, or t
  misc_feature (1897)..(1897): n is a, c, g, or t
  misc_feature (1905)..(1905): n is a, c, g, or t
  misc_feature (2037)..(2038): n is a, c, g, or t
  misc_feature (2046)..(2046): n is a, c, g, or t
  misc_feature (2049)..(2049): n is a, c, g, or t

SEQ ID NO: 384814 - DNA, 1389 bp, Homo Sapiens; identical to SEQ ID NO: 354196
  misc_feature (237)..(300): n is a, c, g, or t

SEQ ID NO: 384815 - DNA, 940 bp, Homo Sapiens; identical to SEQ ID NO: 354197

SEQ ID NO: 384816 - DNA, 1395 bp, Homo Sapiens; identical to SEQ ID NO: 354198
  misc_feature (65)..(126): n is a, c, g, or t
  misc_feature (541)..(633): n is a, c, g, or t

SEQ ID NO: 384817 - DNA, 1043 bp, Homo Sapiens; identical to SEQ ID NO: 354204
  misc_feature (227)..(311): n is a, c, g, or t
  misc_feature (558)..(558): n is a, c, g, or t
  misc_feature (773)..(816): n is a, c, g, or t

SEQ ID NO: 384818 - DNA, 1578 bp, Homo Sapiens; identical to SEQ ID NO: 354205
  misc_feature (527)..(527): n is a, c, g, or t
  misc_feature (536)..(536): n is a, c, g, or t

SEQ ID NO: 384819 - DNA, 862 bp, Homo Sapiens; identical to SEQ ID NO: 354206
  misc_feature (662)..(662): n is a, c, g, or t

SEQ ID NO: 384820 - DNA, 1153 bp, Homo Sapiens; identical to SEQ ID NO: 354207
  misc_feature (969)..(970): n is a, c, g, or t
  misc_feature (988)..(988): n is a, c, g, or t
  misc_feature (1024)..(1024): n is a, c, g, or t
  misc_feature (1028)..(1028): n is a, c, g, or t
  misc_feature (1048)..(1048): n is a, c, g, or t
  misc_feature (1053)..(1054): n is a, c, g, or t
  misc_feature (1066)..(1066): n is a, c, g, or t
  misc_feature (1076)..(1076): n is a, c, g, or t
  misc_feature (1079)..(1079): n is a, c, g, or t
  misc_feature (1085)..(1085): n is a, c, g, or t
  misc_feature (1099)..(1099): n is a, c, g, or t
  misc_feature (1106)..(1106): n is a, c, g, or t
  misc_feature (1109)..(1110): n is a, c, g, or t
  misc_feature (1115)..(1115): n is a, c, g, or t
  misc_feature (1124)..(1124): n is a, c, g, or t
  misc_feature (1147)..(1147): n is a, c, g, or t

SEQ ID NO: 384821 - DNA, 1995 bp, Homo Sapiens; identical to SEQ ID NO: 354208
  misc_feature (1573)..(1661): n is a, c, g, or t
  misc_feature (1713)..(1721): n is a, c, g, or t
  misc_feature (1757)..(1770): n is a, c, g, or t
  misc_feature (1836)..(1845): n is a, c, g, or t
  misc_feature (1889)..(1926): n is a, c, g, or t

SEQ ID NO: 384822 - DNA, 2161 bp, Homo Sapiens; identical to SEQ ID NO: 354209
  misc_feature (1076)..(1076): n is a, c, g, or t
  misc_feature (1200)..(1202): n is a, c, g, or t
  misc_feature (2112)..(2112): n is a, c, g, or t

SEQ ID NO: 384823 - DNA, 945 bp, Homo Sapiens; identical to SEQ ID NO: 354210
  misc_feature (813)..(813): n is a, c, g, or t

SEQ ID NO: 384824 - DNA, 1280 bp, Homo Sapiens; identical to SEQ ID NO: 354213

SEQ ID NO: 384825 - DNA, 404 bp, Homo Sapiens; identical to SEQ ID NO: 354214
  misc_feature (313)..(313): n is a, c, g, or t

SEQ ID NO: 384826 - DNA, 522 bp, Homo Sapiens; identical to SEQ ID NO: 354222
  misc_feature (41)..(41): n is a, c, g, or t

SEQ ID NO: 384827 - DNA, 789 bp, Homo Sapiens; identical to SEQ ID NO: 354223
  misc_feature (618)..(618): n is a, c, g, or t

SEQ ID NO: 384828 - DNA, 319 bp, Homo Sapiens; identical to SEQ ID NO: 354232
  misc_feature (83)..(111): n is a, c, g, or t
  misc_feature (283)..(283): n is a, c, g, or t
  misc_feature (295)..(295): n is a, c, g, or t

SEQ ID NO: 384829 - DNA, 816 bp, Homo Sapiens; identical to SEQ ID NO: 354233
  misc_feature (647)..(673): n is a, c, g, or t

SEQ ID NO: 384830 - DNA, 942 bp, Homo Sapiens; identical to SEQ ID NO: 354234
  misc_feature (67)..(103): n is a, c, g, or t
  misc_feature (752)..(813): n is a, c, g, or t

SEQ ID NO: 384831 - DNA, 1265 bp, Homo Sapiens; identical to SEQ ID NO: 354235
  misc_feature (118)..(224): n is a, c, g, or t
  misc_feature (1231)..(1231): n is a, c, g, or t
  misc_feature (1251)..(1251): n is a, c, g, or t

SEQ ID NO: 384832 - DNA, 961 bp, Homo Sapiens; identical to SEQ ID NO: 354236
  misc_feature (45)..(45): n is a, c, g, or t
  misc_feature (84)..(84): n is a, c, g, or t

SEQ ID NO: 384833 - DNA, 840 bp, Homo Sapiens; identical to SEQ ID NO: 354237

SEQ ID NO: 384834 - DNA, 1563 bp, Homo Sapiens; identical to SEQ ID NO: 354238

SEQ ID NO: 384835 - DNA, 1067 bp, Homo Sapiens; identical to SEQ ID NO: 354239
  misc_feature (927)..(965): n is a, c, g, or t

SEQ ID NO: 384836 - DNA, 1787 bp, Homo Sapiens; identical to SEQ ID NO: 354249
  misc_feature (1777)..(1777): n is a, c, g, or t

SEQ ID NO: 384837 - DNA, 433 bp, Homo Sapiens; identical to SEQ ID NO: 354250
  misc_feature (11)..(11): n is a, c, g, or t
  misc_feature (30)..(30): n is a, c, g, or t
  misc_feature (38)..(38): n is a, c, g, or t
  misc_feature (47)..(47): n is a, c, g, or t
  misc_feature (55)..(55): n is a, c, g, or t
  misc_feature (82)..(82): n is a, c, g, or t

SEQ ID NO: 384838 - DNA, 1816 bp, Homo Sapiens; identical to SEQ ID NO: 354252
  misc_feature (1275)..(1275): n is a, c, g, or t
  misc_feature (1278)..(1278): n is a, c, g, or t
  misc_feature (1286)..(1286): n is a, c, g, or t
  misc_feature (1293)..(1293): n is a, c, g, or t
  misc_feature (1350)..(1350): n is a, c, g, or t
  misc_feature (1383)..(1383): n is a, c, g, or t
  misc_feature (1419)..(1419): n is a, c, g, or t
  misc_feature (1480)..(1480): n is a, c, g, or t
  misc_feature (1483)..(1483): n is a, c, g, or t
  misc_feature (1490)..(1490): n is a, c, g, or t
  misc_feature (1492)..(1493): n is a, c, g, or t
  misc_feature (1561)..(1561): n is a, c, g, or t
  misc_feature (1572)..(1572): n is a, c, g, or t
  misc_feature (1579)..(1580): n is a, c, g, or t
  misc_feature (1607)..(1607): n is a, c, g, or t
  misc_feature (1612)..(1612): n is a, c, g, or t

SEQ ID NO: 384839 - DNA, 434 bp, Homo Sapiens; identical to SEQ ID NO: 354253

SEQ ID NO: 384840 - DNA, 785 bp, Homo Sapiens; identical to SEQ ID NO: 354259

SEQ ID NO: 384841 - DNA, 837 bp, Homo Sapiens; identical to SEQ ID NO: 354260
  misc_feature (821)..(821): n is a, c, g, or t

SEQ ID NO: 384842 - DNA, 1000 bp, Homo Sapiens; identical to SEQ ID NO: 354261

SEQ ID NO: 384843 - DNA, 1338 bp, Homo Sapiens; identical to SEQ ID NO: 354269
  misc_feature (740)..(740): n is a, c, g, or t

SEQ ID NO: 384844 - DNA, 1447 bp, Homo Sapiens; identical to SEQ ID NO: 354270
  misc_feature (1393)..(1393): n is a, c, g, or t

SEQ ID NO: 384845 - DNA, 1404 bp, Homo Sapiens; identical to SEQ ID NO: 354271
  misc_feature (266)..(276): n is a, c, g, or t

SEQ ID NO: 384846 - DNA, 983 bp, Homo Sapiens; identical to SEQ ID NO: 354272
  misc_feature (52)..(88): n is a, c, g, or t

SEQ ID NO: 384847 - DNA, 824 bp, Homo Sapiens; identical to SEQ ID NO: 354274
  misc_feature (78)..(201): n is a, c, g, or t

SEQ ID NO: 384848 - DNA, 499 bp, Homo Sapiens; identical to SEQ ID NO: 354275

SEQ ID NO: 384849 - DNA, 1244 bp, Homo Sapiens; identical to SEQ ID NO: 354276
  misc_feature (950)..(1065): n is a, c, g, or t

SEQ ID NO: 384850 - DNA, 1256 bp, Homo Sapiens; identical to SEQ ID NO: 354284
  misc_feature (1160)..(1160): n is a, c, g, or t
  misc_feature (1215)..(1215): n is a, c, g, or t

SEQ ID NO: 384851 - DNA, 933 bp, Homo Sapiens; identical to SEQ ID NO: 354285
  misc_feature (49)..(85): n is a, c, g, or t

SEQ ID NO: 384852 - DNA, 1700 bp, Homo Sapiens; identical to SEQ ID NO: 354287
  misc_feature (178)..(178): n is a, c, g, or t
  misc_feature (1348)..(1348): n is a, c, g, or t
  misc_feature (1357)..(1357): n is a, c, g, or t
  misc_feature (1365)..(1365): n is a, c, g, or t
  misc_feature (1382)..(1384): n is a, c, g, or t
  misc_feature (1408)..(1408): n is a, c, g, or t
  misc_feature (1484)..(1484): n is a, c, g, or t
  misc_feature (1535)..(1535): n is a, c, g, or t
  misc_feature (1545)..(1545): n is a, c, g, or t
  misc_feature (1547)..(1548): n is a, c, g, or t
  misc_feature (1556)..(1556): n is a, c, g, or t
  misc_feature (1623)..(1623): n is a, c, g, or t
  misc_feature (1636)..(1636): n is a, c, g, or t
  misc_feature (1678)..(1678): n is a, c, g, or t

SEQ ID NO: 384853 - DNA, 447 bp, Homo Sapiens; identical to SEQ ID NO: 354288
  misc_feature (23)..(23): n is a, c, g, or t
  misc_feature (94)..(94): n is a, c, g, or t

SEQ ID NO: 384854 - DNA, 2809 bp, Homo Sapiens; identical to SEQ ID NO: 354290

SEQ ID NO: 384855 - DNA, 616 bp, Homo Sapiens; identical to SEQ ID NO: 354291

SEQ ID NO: 384856 - DNA, 1324 bp, Homo Sapiens; identical to SEQ ID NO: 354293

SEQ ID NO: 384857 - DNA, 1309 bp, Homo Sapiens; identical to SEQ ID NO: 354294

SEQ ID NO: 384858 - DNA, 1450 bp, Homo Sapiens; identical to SEQ ID NO: 70183
  misc_feature (1437)..(1437): n is a, c, g, or t

SEQ ID NO: 384859 - DNA, 826 bp, Homo Sapiens; identical to SEQ ID NO: 354301

SEQ ID NO: 384860 - DNA, 1508 bp, Homo Sapiens; identical to SEQ ID NO: 354302
  misc_feature (671)..(679): n is a, c, g, or t
  misc_feature (765)..(773): n is a, c, g, or t
  misc_feature (1001)..(1001): n is a, c, g, or t
  misc_feature (1162)..(1162): n is a, c, g, or t
  misc_feature (1354)..(1354): n is a, c, g, or t

SEQ ID NO: 384861 - DNA, 159 bp, Homo Sapiens; identical to SEQ ID NO: 354303

SEQ ID NO: 384862 - DNA, 1092 bp, Homo Sapiens; identical to SEQ ID NO: 354304
  misc_feature (442)..(480): n is a, c, g, or t
  misc_feature (515)..(537): n is a, c, g, or t

SEQ ID NO: 384863 - DNA, 351 bp, Homo Sapiens; identical to SEQ ID NO: 354305
  misc_feature (204)..(204): n is a, c, g, or t

SEQ ID NO: 384864 - DNA, 692 bp, Homo Sapiens; identical to SEQ ID NO: 354310
  misc_feature (175)..(175): n is a, c, g, or t
  misc_feature (257)..(257): n is a, c, g, or t
  misc_feature (585)..(628): n is a, c, g, or t

SEQ ID NO: 384865 - DNA, 690 bp, Homo Sapiens; identical to SEQ ID NO: 354311
  misc_feature (78)..(78): n is a, c, g, or t
  misc_feature (98)..(98): n is a, c, g, or t
  misc_feature (108)..(108): n is a, c, g, or t
  misc_feature (122)..(122): n is a, c, g, or t
  misc_feature (580)..(623): n is a, c, g, or t

SEQ ID NO: 384866 - DNA, 538 bp, Homo Sapiens; identical to SEQ ID NO: 354312

SEQ ID NO: 384867 - DNA, 2226 bp, Homo Sapiens; identical to SEQ ID NO: 354313
  misc_feature (936)..(959): n is a, c, g, or t

SEQ ID NO: 384868 - DNA, 423 bp, Homo Sapiens; identical to SEQ ID NO: 354314
  misc_feature (25)..(25): n is a, c, g, or t
  misc_feature (83)..(83): n is a, c, g, or t
  misc_feature (92)..(92): n is a, c, g, or t

SEQ ID NO: 384869 - DNA, 932 bp, Homo Sapiens; identical to SEQ ID NO: 354316
  misc_feature (426)..(520): n is a, c, g, or t
  misc_feature (587)..(647): n is a, c, g, or t
  misc_feature (806)..(806): n is a, c, g, or t

SEQ ID NO: 384870 - DNA, 1628 bp, Homo Sapiens; identical to SEQ ID NO: 354317

SEQ ID NO: 384871 - DNA, 943 bp, Homo Sapiens; identical to SEQ ID NO: 354324

SEQ ID NO: 384872 - DNA, 1846 bp, Homo Sapiens; identical to SEQ ID NO: 354325
  misc_feature (1760)..(1770): n is a, c, g, or t

SEQ ID NO: 384873 - DNA, 1209 bp, Homo Sapiens; identical to SEQ ID NO: 354326
  misc_feature (810)..(822): n is a, c, g, or t
  misc_feature (855)..(855): n is a, c, g, or t

SEQ ID NO: 384874 - DNA, 1054 bp, Homo Sapiens; identical to SEQ ID NO: 354327

SEQ ID NO: 384875 - DNA, 947 bp, Homo Sapiens; identical to SEQ ID NO: 354328
  misc_feature (22)..(23): n is a, c, g, or t
  misc_feature (582)..(582): n is a, c, g, or t
  misc_feature (630)..(630): n is a, c, g, or t

SEQ ID NO: 384876 - DNA, 1032 bp, Homo Sapiens; identical to SEQ ID NO: 354330

SEQ ID NO: 384877 - DNA, 1427 bp, Homo Sapiens; identical to SEQ ID NO: 354331

SEQ ID NO: 384878 - DNA, 316 bp, Homo Sapiens; identical to SEQ ID NO: 354334

SEQ ID NO: 384879 - DNA, 308 bp, Homo Sapiens; identical to SEQ ID NO: 354335
  misc_feature (24)..(24): n is a, c, g, or t
  misc_feature (60)..(60): n is a, c, g, or t
  misc_feature (127)..(127): n is a, c, g, or t
  misc_feature (148)..(148): n is a, c, g, or t
  misc_feature (150)..(150): n is a, c, g, or t
  misc_feature (160)..(160): n is a, c, g, or t
  misc_feature (237)..(237): n is a, c, g, or t
  misc_feature (247)..(247): n is a, c, g, or t

SEQ ID NO: 384880 - DNA, 883 bp, Homo Sapiens; identical to SEQ ID NO: 354371

SEQ ID NO: 384881 - DNA, 1584 bp, Homo Sapiens; identical to SEQ ID NO: 354372
  misc_feature (257)..(320): n is a, c, g, or t

SEQ ID NO: 384882 - DNA, 1747 bp, Homo Sapiens; identical to SEQ ID NO: 354387

SEQ ID NO: 384883 - DNA, 522 bp, Homo Sapiens; identical to SEQ ID NO: 354388

SEQ ID NO: 384884 - DNA, 1777 bp, Homo Sapiens; identical to SEQ ID NO: 354389

SEQ ID NO: 384885 - DNA, 658 bp, Homo Sapiens; identical to SEQ ID NO: 354390
  misc_feature (50)..(50): n is a, c, g, or t
  misc_feature (153)..(153): n is a, c, g, or t
  misc_feature (159)..(159): n is a, c, g, or t
  misc_feature (175)..(175): n is a, c, g, or t
  misc_feature (188)..(188): n is a, c, g, or t
  misc_feature (391)..(400): n is a, c, g, or t

SEQ ID NO: 384886 - DNA, 2698 bp, Homo Sapiens; identical to SEQ ID NO: 354403
  misc_feature (1334)..(1334): n is a, c, g, or t
  misc_feature (1342)..(1342): n is a, c, g, or t
  misc_feature (1344)..(1344): n is a, c, g, or t
  misc_feature (1350)..(1350): n is a, c, g, or t
  misc_feature (1352)..(1352): n is a, c, g, or t

SEQ ID NO: 384887 - DNA, 1799 bp, Homo Sapiens; identical to SEQ ID NO: 354404
  misc_feature (718)..(718): n is a, c, g, or t
  misc_feature (1466)..(1466): n is a, c, g, or t

SEQ ID NO: 384888 - DNA, 978 bp, Homo Sapiens; identical to SEQ ID NO: 354405
  misc_feature (53)..(89): n is a, c, g, or t

SEQ ID NO: 384889 - DNA, 738 bp, Homo Sapiens; identical to SEQ ID NO: 354415

SEQ ID NO: 384890 - DNA, 665 bp, Homo Sapiens; identical to SEQ ID NO: 354416

SEQ ID NO: 384891 - DNA, 1678 bp, Homo Sapiens; identical to SEQ ID NO: 354421

SEQ ID NO: 384892 - DNA, 1077 bp, Homo Sapiens; identical to SEQ ID NO: 354422
  misc_feature (1002)..(1002): n is a, c, g, or t

SEQ ID NO: 384893 - DNA, 1028 bp, Homo Sapiens; identical to SEQ ID NO: 354436
  misc_feature (567)..(595): n is a, c, g, or t

SEQ ID NO: 384894 - DNA, 549 bp, Homo Sapiens; identical to SEQ ID NO: 354437
  misc_feature (15)..(15): n is a, c, g, or t
  misc_feature (27)..(27): n is a, c, g, or t
  misc_feature (52)..(52): n is a, c, g, or t
  misc_feature (61)..(61): n is a, c, g, or t
  misc_feature (67)..(67): n is a, c, g, or t
  misc_feature (84)..(84): n is a, c, g, or t

SEQ ID NO: 384895 - DNA, 2027 bp, Homo Sapiens; identical to SEQ ID NO: 354442
  misc_feature (302)..(471): n is a, c, g, or t
  misc_feature (511)..(511): n is a, c, g, or t
  misc_feature (582)..(582): n is a, c, g, or t
  misc_feature (1846)..(1981): n is a, c, g, or t

SEQ ID NO: 384896 - DNA, 991 bp, Homo Sapiens; identical to SEQ ID NO: 354443
  misc_feature (28)..(28): n is a, c, g, or t
  misc_feature (56)..(56): n is a, c, g, or t

SEQ ID NO: 384897 - DNA, 684 bp, Homo Sapiens; identical to SEQ ID NO: 354444
  misc_feature (7)..(7): n is a, c, g, or t
  misc_feature (97)..(97): n is a, c, g, or t
  misc_feature (106)..(106): n is a, c, g, or t
  misc_feature (118)..(121): n is a, c, g, or t

SEQ ID NO: 384898 - DNA, 506 bp, Homo Sapiens; identical to SEQ ID NO: 354445

SEQ ID NO: 384899 - DNA, 1220 bp, Homo Sapiens; identical to SEQ ID NO: 354447
  misc_feature (111)..(111): n is a, c, g, or t
  misc_feature (921)..(921): n is a, c, g, or t
  misc_feature (997)..(997): n is a, c, g, or t
  misc_feature (1007)..(1007): n is a, c, g, or t
  misc_feature (1042)..(1042): n is a, c, g, or t

SEQ ID NO: 384900 - DNA, 899 bp, Homo Sapiens; identical to SEQ ID NO: 354448
  misc_feature (882)..(882): n is a, c, g, or t

SEQ ID NO: 384901 - DNA, 1117 bp, Homo Sapiens; identical to SEQ ID NO: 354450
  misc_feature (873)..(873): n is a, c, g, or t
  misc_feature (931)..(931): n is a, c, g, or t
  misc_feature (935)..(935): n is a, c, g, or t
  misc_feature (939)..(939): n is a, c, g, or t
  misc_feature (1008)..(1008): n is a, c, g, or t
  misc_feature (1030)..(1030): n is a, c, g, or t
  misc_feature (1039)..(1039): n is a, c, g, or t
  misc_feature (1042)..(1042): n is a, c, g, or t
  misc_feature (1048)..(1048): n is a, c, g, or t
  misc_feature (1057)..(1057): n is a, c, g, or t
  misc_feature (1062)..(1062): n is a, c, g, or t
  misc_feature (1068)..(1068): n is a, c, g, or t
  misc_feature (1077)..(1077): n is a, c, g, or t
  misc_feature (1079)..(1079): n is a, c, g, or t
  misc_feature (1082)..(1082): n is a, c, g, or t
  misc_feature (1086)..(1086): n is a, c, g, or t
  misc_feature (1099)..(1099): n is a, c, g, or t
  misc_feature (1103)..(1103): n is a, c, g, or t
  misc_feature (1113)..(1113): n is a, c, g, or t
  misc_feature (1116)..(1116): n is a, c, g, or t

SEQ ID NO: 384902 - DNA, 1237 bp, Homo Sapiens; identical to SEQ ID NO: 354451
  misc_feature (17)..(18): n is a, c, g, or t
  misc_feature (23)..(23): n is a, c, g, or t
  misc_feature (30)..(33): n is a, c, g, or t
  misc_feature (37)..(37): n is a, c, g, or t
  misc_feature (40)..(40): n is a, c, g, or t
  misc_feature (44)..(44): n is a, c, g, or t
  misc_feature (47)..(48): n is a, c, g, or t
  misc_feature (54)..(55): n is a, c, g, or t
  misc_feature (59)..(59): n is a, c, g, or t
  misc_feature (73)..(73): n is a, c, g, or t
  misc_feature (82)..(82): n is a, c, g, or t
  misc_feature (92)..(92): n is a, c, g, or t
  misc_feature (94)..(94): n is a, c, g, or t
  misc_feature (113)..(113): n is a, c, g, or t
  misc_feature (115)..(115): n is a, c, g, or t
  misc_feature (119)..(119): n is a, c, g, or t
  misc_feature (144)..(144): n is a, c, g, or t
  misc_feature (150)..(150): n is a, c, g, or t
  misc_feature (152)..(154): n is a, c, g, or t
  misc_feature (158)..(158): n is a, c, g, or t
  misc_feature (162)..(162): n is a, c, g, or t
  misc_feature (186)..(186): n is a, c, g, or t
  misc_feature (188)..(188): n is a, c, g, or t
  misc_feature (194)..(194): n is a, c, g, or t
  misc_feature (205)..(206): n is a, c, g, or t
  misc_feature (216)..(216): n is a, c, g, or t
  misc_feature (223)..(223): n is a, c, g, or t
  misc_feature (250)..(250): n is a, c, g, or t
  misc_feature (259)..(259): n is a, c, g, or t
  misc_feature (268)..(268): n is a, c, g, or t
  misc_feature (271)..(271): n is a, c, g, or t
  misc_feature (275)..(275): n is a, c, g, or t
  misc_feature (277)..(286): n is a, c, g, or t
  misc_feature (288)..(288): n is a, c, g, or t
  misc_feature (292)..(292): n is a, c, g, or t
  misc_feature (295)..(295): n is a, c, g, or t
  misc_feature (303)..(303): n is a, c, g, or t
  misc_feature (313)..(313): n is a, c, g, or t
  misc_feature (322)..(322): n is a, c, g, or t
  misc_feature (327)..(327): n is a, c, g, or t
  misc_feature (329)..(329): n is a, c, g, or t
  misc_feature (340)..(340): n is a, c, g, or t
  misc_feature (343)..(343): n is a, c, g, or t
  misc_feature (354)..(354): n is a, c, g, or t
  misc_feature (358)..(358): n is a, c, g, or t
  misc_feature (960)..(960): n is a, c, g, or t
  misc_feature (988)..(988): n is a, c, g, or t

SEQ ID NO: 384903 - DNA, 2279 bp, Homo Sapiens; identical to SEQ ID NO: 354452
  misc_feature (2165)..(2165): n is a, c, g, or t
  misc_feature (2207)..(2207): n is a, c, g, or t

SEQ ID NO: 384904 - DNA, 1005 bp, Homo Sapiens; identical to SEQ ID NO: 354453
  misc_feature (841)..(867): n is a, c, g, or t

SEQ ID NO: 384905 - DNA, 1236 bp, Homo Sapiens; identical to SEQ ID NO: 354461
  misc_feature (47)..(47): n is a, c, g, or t

SEQ ID NO: 384906 - DNA, 1034 bp, Homo Sapiens; identical to SEQ ID NO: 354462
  misc_feature (982)..(991): n is a, c, g, or t

SEQ ID NO: 384907 - DNA, 2329 bp, Homo Sapiens; identical to SEQ ID NO: 354463
  misc_feature (1573)..(1573): n is a, c, g, or t

SEQ ID NO: 384908 - DNA, 1118 bp, Homo Sapiens; identical to SEQ ID NO: 354464

SEQ ID NO: 384909 - DNA, 493 bp, Homo Sapiens; identical to SEQ ID NO: 354473
  misc_feature (336)..(336): n is a, c, g, or t
  misc_feature (460)..(460): n is a, c, g, or t
  misc_feature (470)..(470): n is a, c, g, or t

SEQ ID NO: 384910 - DNA, 470 bp, Homo Sapiens; identical to SEQ ID NO: 354474
  misc_feature (13)..(13): n is a, c, g, or t
  misc_feature (29)..(29): n is a, c, g, or t
  misc_feature (48)..(48): n is a, c, g, or t
  misc_feature (75)..(75): n is a, c, g, or t
  misc_feature (470)..(470): n is a, c, g, or t

SEQ ID NO: 384911 - DNA, 1197 bp, Homo Sapiens; identical to SEQ ID NO: 354479
  misc_feature (82)..(117): n is a, c, g, or t

SEQ ID NO: 384912 - DNA, 894 bp, Homo Sapiens; identical to SEQ ID NO: 354480
  misc_feature (361)..(438): n is a, c, g, or t
  misc_feature (543)..(570): n is a, c, g, or t
  misc_feature (608)..(740): n is a, c, g, or t

SEQ ID NO: 384913 - DNA, 992 bp, Homo Sapiens; identical to SEQ ID NO: 354497
  misc_feature (793)..(827): n is a, c, g, or t

SEQ ID NO: 384914 - DNA, 328 bp, Homo Sapiens; identical to SEQ ID NO: 354498
  misc_feature (99)..(133): n is a, c, g, or t

SEQ ID NO: 384915 - DNA, 1434 bp, Homo Sapiens; identical to SEQ ID NO: 354499
  misc_feature (362)..(362): n is a, c, g, or t
  misc_feature (1227)..(1240): n is a, c, g, or t

SEQ ID NO: 384916 - DNA, 203 bp, Homo Sapiens; identical to SEQ ID NO: 354500
  misc_feature (41)..(75): n is a, c, g, or t

SEQ ID NO: 384917 - DNA, 983 bp, Homo Sapiens; identical to SEQ ID NO: 354505
  misc_feature (959)..(959): n is a, c, g, or t

SEQ ID NO: 384918 - DNA, 976 bp, Homo Sapiens; identical to SEQ ID NO: 354506
  misc_feature (32)..(32): n is a, c, g, or t
  misc_feature (37)..(37): n is a, c, g, or t
  misc_feature (45)..(45): n is a, c, g, or t
  misc_feature (65)..(66): n is a, c, g, or t
  misc_feature (75)..(75): n is a, c, g, or t
  misc_feature (85)..(85): n is a, c, g, or t

SEQ ID NO: 384919 - DNA, 749 bp, Homo Sapiens; identical to SEQ ID NO: 354507

SEQ ID NO: 384920 - DNA, 1542 bp, Homo Sapiens; identical to SEQ ID NO: 354508
  misc_feature (1139)..(1139): n is a, c, g, or t
  misc_feature (1146)..(1146): n is a, c, g, or t
  misc_feature (1188)..(1188): n is a, c, g, or t

SEQ ID NO: 384921 - DNA, 587 bp, Homo Sapiens; identical to SEQ ID NO: 354509
  misc_feature (131)..(343): n is a, c, g, or t

SEQ ID NO: 384922 - DNA, 482 bp, Homo Sapiens; identical to SEQ ID NO: 354510
  misc_feature (136)..(273): n is a, c, g, or t

SEQ ID NO: 384923 - DNA, 2108 bp, Homo Sapiens; identical to SEQ ID NO: 354525
  misc_feature (53)..(228): n is a, c, g, or t

SEQ ID NO: 384924 - DNA, 651 bp, Homo Sapiens; identical to SEQ ID NO: 354526
  misc_feature (439)..(439): n is a, c, g, or t
  misc_feature (444)..(444): n is a, c, g, or t
  misc_feature (492)..(493): n is a, c, g, or t
  misc_feature (540)..(540): n is a, c, g, or t

SEQ ID NO: 384925 - DNA, 700 bp, Homo Sapiens; identical to SEQ ID NO: 354527

SEQ ID NO: 384926 - DNA, 444 bp, Homo Sapiens; identical to SEQ ID NO: 354534
  misc_feature (342)..(361): n is a, c, g, or t
  misc_feature (395)..(395): n is a, c, g, or t
  misc_feature (403)..(403): n is a, c, g, or t

SEQ ID NO: 384927 - DNA, 975 bp, Homo Sapiens; identical to SEQ ID NO: 354535
  misc_feature (20)..(20): n is a, c, g, or t
  misc_feature (43)..(43): n is a, c, g, or t
  misc_feature (59)..(59): n is a, c, g, or t
  misc_feature (842)..(864): n is a, c, g, or t
  misc_feature (916)..(916): n is a, c, g, or t
  misc_feature (931)..(931): n is a, c, g, or t
  misc_feature (943)..(943): n is a, c, g, or t
  misc_feature (952)..(952): n is a, c, g, or t
  misc_feature (957)..(957): n is a, c, g, or t

SEQ ID NO: 384928 - DNA, 442 bp, Homo Sapiens; identical to SEQ ID NO: 354545
  misc_feature (251)..(308): n is a, c, g, or t

SEQ ID NO: 384929 - DNA, 813 bp, Homo Sapiens; identical to SEQ ID NO: 354546
  misc_feature (146)..(152): n is a, c, g, or t
  misc_feature (155)..(155): n is a, c, g, or t
  misc_feature (158)..(160): n is a, c, g, or t
  misc_feature (163)..(163): n is a, c, g, or t
  misc_feature (165)..(167): n is a, c, g, or t
  misc_feature (171)..(173): n is a, c, g, or t
  misc_feature (178)..(179): n is a, c, g, or t
  misc_feature (181)..(232): n is a, c, g, or t
  misc_feature (234)..(234): n is a, c, g, or t
  misc_feature (731)..(749): n is a, c, g, or t

SEQ ID NO: 384930 - DNA, 1079 bp, Homo Sapiens; identical to SEQ ID NO: 354547
  misc_feature (350)..(367): n is a, c, g, or t
  misc_feature (867)..(874): n is a, c, g, or t
  misc_feature (877)..(878): n is a, c, g, or t
  misc_feature (885)..(885): n is a, c, g, or t
  misc_feature (943)..(943): n is a, c, g, or t

SEQ ID NO: 384931 - DNA, 940 bp, Homo Sapiens; identical to SEQ ID NO: 354562
  misc_feature (47)..(47): n is a, c, g, or t
  misc_feature (219)..(219): n is a, c, g, or t
  misc_feature (475)..(475): n is a, c, g, or t
  misc_feature (893)..(893): n is a, c, g, or t

SEQ ID NO: 384932 - DNA, 608 bp, Homo Sapiens; identical to SEQ ID NO: 354563
  misc_feature (431)..(432): n is a, c, g, or t
  misc_feature (437)..(437): n is a, c, g, or t
  misc_feature (459)..(460): n is a, c, g, or t
  misc_feature (478)..(479): n is a, c, g, or t
  misc_feature (494)..(494): n is a, c, g, or t
  misc_feature (526)..(527): n is a, c, g, or t
  misc_feature (554)..(554): n is a, c, g, or t

SEQ ID NO: 384933 - DNA, 1857 bp, Homo Sapiens; identical to SEQ ID NO: 354564
  misc_feature (1090)..(1148): n is a, c, g, or t
  misc_feature (1288)..(1303): n is a, c, g, or t
  misc_feature (1361)..(1369): n is a, c, g, or t
  misc_feature (1439)..(1439): n is a, c, g, or t
  misc_feature (1730)..(1738): n is a, c, g, or t

SEQ ID NO: 384934 - DNA, 2458 bp, Homo Sapiens; identical to SEQ ID NO: 354565
  misc_feature (1650)..(1650): n is a, c, g, or t
  misc_feature (1653)..(1653): n is a, c, g, or t
  misc_feature (1679)..(1680): n is a, c, g, or t
  misc_feature (1684)..(1684): n is a, c, g, or t
  misc_feature (1713)..(1713): n is a, c, g, or t
  misc_feature (1724)..(1724): n is a, c, g, or t
  misc_feature (1726)..(1726): n is a, c, g, or t
  misc_feature (1774)..(1774): n is a, c, g, or t
  misc_feature (1782)..(1782): n is a, c, g, or t
  misc_feature (1836)..(1836): n is a, c, g, or t
  misc_feature (1839)..(1839): n is a, c, g, or t
  misc_feature (1850)..(1850): n is a, c, g, or t
  misc_feature (1871)..(1871): n is a, c, g, or t

SEQ ID NO: 384935 - DNA, 1047 bp, Homo Sapiens; identical to SEQ ID NO: 354566

SEQ ID NO: 384936 - DNA, 995 bp, Homo Sapiens; identical to SEQ ID NO: 354567
  misc_feature (635)..(687): n is a, c, g, or t
  misc_feature (964)..(964): n is a, c, g, or t

SEQ ID NO: 384937 - DNA, 751 bp, Homo Sapiens; identical to SEQ ID NO: 354568
  misc_feature (472)..(472): n is a, c, g, or t
  misc_feature (572)..(572): n is a, c, g, or t

SEQ ID NO: 384938 - DNA, 2291 bp, Homo Sapiens; identical to SEQ ID NO: 354575
  misc_feature (307)..(316): n is a, c, g, or t
  misc_feature (466)..(474): n is a, c, g, or t
  misc_feature (1491)..(1499): n is a, c, g, or t

SEQ ID NO: 384939 - DNA, 325 bp, Homo Sapiens; identical to SEQ ID NO: 354576
  misc_feature (78)..(87): n is a, c, g, or t
  misc_feature (236)..(245): n is a, c, g, or t

SEQ ID NO: 384940 - DNA, 1797 bp, Homo Sapiens; identical to SEQ ID NO: 354585
  misc_feature (1704)..(1704): n is a, c, g, or t
  misc_feature (1729)..(1729): n is a, c, g, or t
  misc_feature (1772)..(1772): n is a, c, g, or t

SEQ ID NO: 384941 - DNA, 542 bp, Homo Sapiens; identical to SEQ ID NO: 354586

SEQ ID NO: 384942 - DNA, 2010 bp, Homo Sapiens; identical to SEQ ID NO: 354590

SEQ ID NO: 384943 - DNA, 1648 bp, Homo Sapiens; identical to SEQ ID NO: 354591
  misc_feature (68)..(68): n is a, c, g, or t
  misc_feature (72)..(73): n is a, c, g, or t
  misc_feature (77)..(77): n is a, c, g, or t
  misc_feature (126)..(127): n is a, c, g, or t
  misc_feature (136)..(136): n is a, c, g, or t
  misc_feature (264)..(264): n is a, c, g, or t
  misc_feature (351)..(394): n is a, c, g, or t

SEQ ID NO: 384944 - DNA, 447 bp, Homo Sapiens; identical to SEQ ID NO: 354592

SEQ ID NO: 384945 - DNA, 892 bp, Homo Sapiens; identical to SEQ ID NO: 354605
  misc_feature (596)..(615): n is a, c, g, or t

SEQ ID NO: 384946 - DNA, 1148 bp, Homo Sapiens; identical to SEQ ID NO: 354606

SEQ ID NO: 384947 - DNA, 857 bp, Homo Sapiens; identical to SEQ ID NO: 354631

SEQ ID NO: 384948 - DNA, 624 bp, Homo Sapiens; identical to SEQ ID NO: 354632

SEQ ID NO: 384949 - DNA, 618 bp, Homo Sapiens; identical to SEQ ID NO: 354633
  misc_feature (212)..(212): n is a, c, g, or t

SEQ ID NO: 384950 - DNA, 893 bp, Homo Sapiens; identical to SEQ ID NO: 354639

SEQ ID NO: 384951 - DNA, 1404 bp, Homo Sapiens; identical to SEQ ID NO: 354640
  misc_feature (1348)..(1348): n is a, c, g, or t

SEQ ID NO: 384952 - DNA, 1029 bp, Homo Sapiens; identical to SEQ ID NO: 354645
  misc_feature (35)..(35): n is a, c, g, or t
  misc_feature (188)..(188): n is a, c, g, or t
  misc_feature (203)..(203): n is a, c, g, or t

SEQ ID NO: 384953 - DNA, 467 bp, Homo Sapiens; identical to SEQ ID NO: 354646
  misc_feature (212)..(277): n is a, c, g, or t

SEQ ID NO: 384954 - DNA, 383 bp, Homo Sapiens; identical to SEQ ID NO: 354647

SEQ ID NO: 384955 - DNA, 737 bp, Homo Sapiens; identical to SEQ ID NO: 354653
  misc_feature (29)..(29): n is a, c, g, or t

SEQ ID NO: 384956 - DNA, 450 bp, Homo Sapiens; identical to SEQ ID NO: 354654

SEQ ID NO: 384957 - DNA, 1244 bp, Homo Sapiens; identical to SEQ ID NO: 354665
  misc_feature (45)..(98): n is a, c, g, or t
  misc_feature (1079)..(1079): n is a, c, g, or t
  misc_feature (1126)..(1126): n is a, c, g, or t

SEQ ID NO: 384958 - DNA, 1066 bp, Homo Sapiens; identical to SEQ ID NO: 354666

SEQ ID NO: 384959 - DNA, 949 bp, Homo Sapiens; identical to SEQ ID NO: 354667

SEQ ID NO: 384960 - DNA, 1218 bp, Homo Sapiens; identical to SEQ ID NO: 354668
  misc_feature (529)..(555): n is a, c, g, or t
  misc_feature (574)..(817): n is a, c, g, or t
  misc_feature (861)..(880): n is a, c, g, or t
  misc_feature (1124)..(1124): n is a, c, g, or t

SEQ ID NO: 384961 - DNA, 992 bp, Homo Sapiens; identical to SEQ ID NO: 354669
  misc_feature (786)..(899): n is a, c, g, or t

SEQ ID NO: 384962 - DNA, 1450 bp, Homo Sapiens; identical to SEQ ID NO: 354677
  misc_feature (1093)..(1109): n is a, c, g, or t
  misc_feature (1393)..(1393): n is a, c, g, or t
  misc_feature (1395)..(1395): n is a, c, g, or t
  misc_feature (1410)..(1410): n is a, c, g, or t
  misc_feature (1425)..(1425): n is a, c, g, or t

SEQ ID NO: 384963 - DNA, 907 bp, Homo Sapiens; identical to SEQ ID NO: 354678
  misc_feature (810)..(810): n is a, c, g, or t

SEQ ID NO: 384964 - DNA, 926 bp, Homo Sapiens; identical to SEQ ID NO: 354679

SEQ ID NO: 384965 - DNA, 1322 bp, Homo Sapiens; identical to SEQ ID NO: 354680
  misc_feature (41)..(41): n is a, c, g, or t

SEQ ID NO: 384966 - DNA, 1501 bp, Homo Sapiens; identical to SEQ ID NO: 354681
  misc_feature (129)..(226): n is a, c, g, or t
  misc_feature (1255)..(1255): n is a, c, g, or t
  misc_feature (1284)..(1284): n is a, c, g, or t
  misc_feature (1290)..(1290): n is a, c, g, or t
  misc_feature (1355)..(1355): n is a, c, g, or t

SEQ ID NO: 384967 - DNA, 1442 bp, Homo Sapiens; identical to SEQ ID NO: 354682
  misc_feature (296)..(368): n is a, c, g, or t
  misc_feature (397)..(457): n is a, c, g, or t
  misc_feature (1323)..(1323): n is a, c, g, or t
  misc_feature (1420)..(1420): n is a, c, g, or t

SEQ ID NO: 384968 - DNA, 1068 bp, Homo Sapiens; identical to SEQ ID NO: 354686
  misc_feature (735)..(736): n is a, c, g, or t
  misc_feature (793)..(793): n is a, c, g, or t

SEQ ID NO: 384969 - DNA, 1587 bp, Homo Sapiens; identical to SEQ ID NO: 354687
  misc_feature (118)..(118): n is a, c, g, or t

SEQ ID NO: 384970 - DNA, 1252 bp, Homo Sapiens; identical to SEQ ID NO: 354689

SEQ ID NO: 384971 - DNA, 1078 bp, Homo Sapiens; identical to SEQ ID NO: 354690
  misc_feature (982)..(985): n is a, c, g, or t
  misc_feature (992)..(992): n is a, c, g, or t
  misc_feature (994)..(994): n is a, c, g, or t
  misc_feature (997)..(997): n is a, c, g, or t
  misc_feature (1011)..(1011): n is a, c, g, or t

SEQ ID NO: 384972 - DNA, 839 bp, Homo Sapiens; identical to SEQ ID NO: 354691
  misc_feature (618)..(618): n is a, c, g, or t

SEQ ID NO: 384973 - DNA, 1154 bp, Homo Sapiens; identical to SEQ ID NO: 354707
  misc_feature (370)..(370): n is a, c, g, or t

SEQ ID NO: 384974 - DNA, 748 bp, Homo Sapiens; identical to SEQ ID NO: 354708
  misc_feature (87)..(87): n is a, c, g, or t
  misc_feature (111)..(111): n is a, c, g, or t
  misc_feature (175)..(175): n is a, c, g, or t
  misc_feature (180)..(180): n is a, c, g, or t
  misc_feature (184)..(184): n is a, c, g, or t
  misc_feature (598)..(625): n is a, c, g, or t

SEQ ID NO: 384975 - DNA, 798 bp, Homo Sapiens; identical to SEQ ID NO: 354710
  misc_feature (46)..(46): n is a, c, g, or t
  misc_feature (48)..(48): n is a, c, g, or t
  misc_feature (401)..(448): n is a, c, g, or t
  misc_feature (665)..(679): n is a, c, g, or t

SEQ ID NO: 384976 - DNA, 516 bp, Homo Sapiens; identical to SEQ ID NO: 354711
  misc_feature (36)..(36): n is a, c, g, or t

SEQ ID NO: 384977 - DNA, 368 bp, Homo Sapiens; identical to SEQ ID NO: 354723

SEQ ID NO: 384978 - DNA, 804 bp, Homo Sapiens; identical to SEQ ID NO: 354724
  misc_feature (476)..(476): n is a, c, g, or t

SEQ ID NO: 384979 - DNA, 666 bp, Homo Sapiens; identical to SEQ ID NO: 354734
  misc_feature (632)..(632): n is a, c, g, or t
  misc_feature (644)..(644): n is a, c, g, or t
  misc_feature (652)..(652): n is a, c, g, or t

SEQ ID NO: 384980 - DNA, 468 bp, Homo Sapiens; identical to SEQ ID NO: 354735

SEQ ID NO: 384981 - DNA, 2794 bp, Homo Sapiens; identical to SEQ ID NO: 354737
  misc_feature (796)..(847): n is a, c, g, or t

SEQ ID NO: 384982 - DNA, 263 bp, Homo Sapiens; identical to SEQ ID NO: 354738

SEQ ID NO: 384983 - DNA, 1874 bp, Homo Sapiens; identical to SEQ ID NO: 354739
  misc_feature (1419)..(1449): n is a, c, g, or t
  misc_feature (1849)..(1849): n is a, c, g, or t

SEQ ID NO: 384984 - DNA, 425 bp, Homo Sapiens; identical to SEQ ID NO: 354740

SEQ ID NO: 384985 - DNA, 1839 bp, Homo Sapiens; identical to SEQ ID NO: 354741
  misc_feature (302)..(311): n is a, c, g, or t
  misc_feature (481)..(490): n is a, c, g, or t
  misc_feature (1082)..(1082): n is a, c, g, or t
  misc_feature (1105)..(1123): n is a, c, g, or t
  misc_feature (1126)..(1126): n is a, c, g, or t
  misc_feature (1129)..(1129): n is a, c, g, or t

SEQ ID NO: 384986 - DNA, 303 bp, Homo Sapiens; identical to SEQ ID NO: 354742
  misc_feature (41)..(41): n is a, c, g, or t
  misc_feature (85)..(85): n is a, c, g, or t
  misc_feature (251)..(251): n is a, c, g, or t

SEQ ID NO: 384987 - DNA, 650 bp, Homo Sapiens; identical to SEQ ID NO: 354747

SEQ ID NO: 384988 - DNA, 1296 bp, Homo Sapiens; identical to SEQ ID NO: 354748
  misc_feature (44)..(44): n is a, c, g, or t
  misc_feature (119)..(119): n is a, c, g, or t
  misc_feature (167)..(187): n is a, c, g, or t
  misc_feature (1105)..(1145): n is a, c, g, or t

SEQ ID NO: 384989 - DNA, 641 bp, Homo Sapiens; identical to SEQ ID NO: 354749
  misc_feature (630)..(630): n is a, c, g, or t

SEQ ID NO: 384990 - DNA, 739 bp, Homo Sapiens; identical to SEQ ID NO: 354785
  misc_feature (256)..(256): n is a, c, g, or t

SEQ ID NO: 384991 - DNA, 1258 bp, Homo Sapiens; identical to SEQ ID NO: 354786

SEQ ID NO: 384992 - DNA, 582 bp, Homo Sapiens; identical to SEQ ID NO: 354787
  misc_feature (566)..(566): n is a, c, g, or t

SEQ ID NO: 384993 - DNA, 1720 bp, Homo Sapiens; identical to SEQ ID NO: 354790
  misc_feature (685)..(725): n is a, c, g, or t
  misc_feature (1575)..(1575): n is a, c, g, or t
  misc_feature (1583)..(1583): n is a, c, g, or t

SEQ ID NO: 384994 - DNA, 402 bp, Homo Sapiens; identical to SEQ ID NO: 354791
  misc_feature (14)..(14): n is a, c, g, or t

SEQ ID NO: 384995 - DNA, 498 bp, Homo Sapiens; identical to SEQ ID NO: 354793

SEQ ID NO: 384996 - DNA, 1063 bp, Homo Sapiens; identical to SEQ ID NO: 354794

SEQ ID NO: 384997 - DNA, 1122 bp, Homo Sapiens; identical to SEQ ID NO: 354795
  misc_feature (986)..(986): n is a, c, g, or t
  misc_feature (996)..(1028): n is a, c, g, or t

SEQ ID NO: 384998 - DNA, 1150 bp, Homo Sapiens; identical to SEQ ID NO: 354796
  misc_feature (932)..(996): n is a, c, g, or t

SEQ ID NO: 384999 - DNA, 1604 bp, Homo Sapiens; identical to SEQ ID NO: 354800
  misc_feature (113)..(113): n is a, c, g, or t
  misc_feature (599)..(611): n is a, c, g, or t
  misc_feature (1242)..(1242): n is a, c, g, or t
  misc_feature (1518)..(1530): n is a, c, g, or t
  misc_feature (1542)..(1551): n is a, c, g, or t

SEQ ID NO: 385000 - DNA, 1825 bp, Homo Sapiens; identical to SEQ ID NO: 354801
  misc_feature (3)..(3): n is a, c, g, or t
  misc_feature (68)..(82): n is a, c, g, or t
  misc_feature (88)..(88): n is a, c, g, or t
  misc_feature (90)..(90): n is a, c, g, or t
  misc_feature (94)..(94): n is a, c, g, or t
  misc_feature (97)..(97): n is a, c, g, or t
  misc_feature (140)..(140): n is a, c, g, or t
  misc_feature (158)..(158): n is a, c, g, or t
  misc_feature (178)..(179): n is a, c, g, or t
  misc_feature (196)..(197): n is a, c, g, or t
  misc_feature (209)..(209): n is a, c, g, or t
  misc_feature (224)..(224): n is a, c, g, or t

SEQ ID NO: 385001 - DNA, 1957 bp, Homo Sapiens; identical to SEQ ID NO: 354802
  misc_feature (158)..(158): n is a, c, g, or t
  misc_feature (1483)..(1499): n is a, c, g, or t

SEQ ID NO: 385002 - DNA, 1062 bp, Homo Sapiens; identical to SEQ ID NO: 354803
  misc_feature (7)..(7): n is a, c, g, or t
  misc_feature (31)..(31): n is a, c, g, or t
  misc_feature (57)..(57): n is a, c, g, or t
  misc_feature (87)..(87): n is a, c, g, or t
  misc_feature (89)..(89): n is a, c, g, or t
  misc_feature (107)..(107): n is a, c, g, or t
  misc_feature (146)..(146): n is a, c, g, or t
  misc_feature (762)..(762): n is a, c, g, or t
  misc_feature (811)..(812): n is a, c, g, or t
  misc_feature (919)..(935): n is a, c, g, or t
  misc_feature (1052)..(1053): n is a, c, g, or t

SEQ ID NO: 385003 - DNA, 1681 bp, Homo Sapiens; identical to SEQ ID NO: 354821

SEQ ID NO: 385004 - DNA, 932 bp, Homo Sapiens; identical to SEQ ID NO: 354822

SEQ ID NO: 385005 - DNA, 480 bp, Homo Sapiens; identical to SEQ ID NO: 354827

SEQ ID NO: 385006 - DNA, 598 bp, Homo Sapiens; identical to SEQ ID NO: 354828

SEQ ID NO: 385007 - DNA, 425 bp, Homo Sapiens; identical to SEQ ID NO: 354839
  misc_feature (293)..(383): n is a, c, g, or t

SEQ ID NO: 385008 - DNA, 1168 bp, Homo Sapiens; identical to SEQ ID NO: 354840
  misc_feature (56)..(88): n is a, c, g, or t
  misc_feature (1109)..(1126): n is a, c, g, or t

SEQ ID NO: 385009 - DNA, 1420 bp, Homo Sapiens; identical to SEQ ID NO: 354841
  misc_feature (68)..(128): n is a, c, g, or t

SEQ ID NO: 385010 - DNA, 472 bp, Homo Sapiens; identical to SEQ ID NO: 354842
  misc_feature (111)..(111): n is a, c, g, or t
  misc_feature (431)..(431): n is a, c, g, or t

SEQ ID NO: 385011 - DNA, 1062 bp, Homo Sapiens; identical to SEQ ID NO: 354849
  misc_feature (994)..(994): n is a, c, g, or t

SEQ ID NO: 385012 - DNA, 1501 bp, Homo Sapiens; identical to SEQ ID NO: 354850
  misc_feature (908)..(908): n is a, c, g, or t
  misc_feature (910)..(910): n is a, c, g, or t

SEQ ID NO: 385013 - DNA, 1981 bp, Homo Sapiens; identical to SEQ ID NO: 354853
  misc_feature (497)..(505): n is a, c, g, or t
  misc_feature (1243)..(1287): n is a, c, g, or t

SEQ ID NO: 385014 - DNA, 910 bp, Homo Sapiens; identical to SEQ ID NO: 354854
  misc_feature (300)..(308): n is a, c, g, or t
  misc_feature (794)..(799): n is a, c, g, or t
  misc_feature (802)..(803): n is a, c, g, or t
  misc_feature (805)..(808): n is a, c, g, or t
  misc_feature (811)..(813): n is a, c, g, or t
  misc_feature (815)..(815): n is a, c, g, or t
  misc_feature (819)..(820): n is a, c, g, or t
  misc_feature (823)..(824): n is a, c, g, or t
  misc_feature (831)..(832): n is a, c, g, or t
  misc_feature (836)..(837): n is a, c, g, or t

SEQ ID NO: 385015 - DNA, 912 bp, Homo Sapiens; identical to SEQ ID NO: 354855
  misc_feature (29)..(29): n is a, c, g, or t
  misc_feature (41)..(41): n is a, c, g, or t

SEQ ID NO: 385016 - DNA, 518 bp, Homo Sapiens; identical to SEQ ID NO: 354856

SEQ ID NO: 385017 - DNA, 1099 bp, Homo Sapiens; identical to SEQ ID NO: 354862

SEQ ID NO: 385018 - DNA, 1078 bp, Homo Sapiens; identical to SEQ ID NO: 354863

SEQ ID NO: 385019 - DNA, 1727 bp, Homo Sapiens; identical to SEQ ID NO: 354866
  misc_feature (638)..(655): n is a, c, g, or t
  misc_feature (1674)..(1674): n is a, c, g, or t
  misc_feature (1684)..(1685): n is a, c, g, or t

SEQ ID NO: 385020 - DNA, 292 bp, Homo Sapiens; identical to SEQ ID NO: 354867
  misc_feature (176)..(184): n is a, c, g, or t

SEQ ID NO: 385021 - DNA, 619 bp, Homo Sapiens; identical to SEQ ID NO: 354868
  misc_feature (12)..(12): n is a, c, g, or t
  misc_feature (54)..(54): n is a, c, g, or t

SEQ ID NO: 385022 - DNA, 490 bp, Homo Sapiens; identical to SEQ ID NO: 354872

SEQ ID NO: 385023 - DNA, 693 bp, Homo Sapiens; identical to SEQ ID NO: 354873

SEQ ID NO: 385024 - DNA, 430 bp, Homo Sapiens; identical to SEQ ID NO: 354874
  misc_feature (212)..(212): n is a, c, g, or t
  misc_feature (376)..(376): n is a, c, g, or t
  misc_feature (394)..(394): n is a, c, g, or t

SEQ ID NO: 385025 - DNA, 636 bp, Homo Sapiens; identical to SEQ ID NO: 354876

SEQ ID NO: 385026 - DNA, 2667 bp, Homo Sapiens; identical to SEQ ID NO: 354877
  misc_feature (2603)..(2603): n is a, c, g, or t
  misc_feature (2608)..(2608): n is a, c, g, or t

SEQ ID NO: 385027 - DNA, 855 bp, Homo Sapiens; identical to SEQ ID NO: 354885
  misc_feature (662)..(703): n is a, c, g, or t

SEQ ID NO: 385028 - DNA, 861 bp, Homo Sapiens; identical to SEQ ID NO: 354886
  misc_feature (668)..(709): n is a, c, g, or t

SEQ ID NO: 385029 - DNA, 958 bp, Homo Sapiens; identical to SEQ ID NO: 354887

SEQ ID NO: 385030 - DNA, 1906 bp, Homo Sapiens; identical to SEQ ID NO: 354888
  misc_feature (33)..(33): n is a, c, g, or t
  misc_feature (35)..(35): n is a, c, g, or t
  misc_feature (1209)..(1299): n is a, c, g, or t
  misc_feature (1331)..(1489): n is a, c, g, or t
  misc_feature (1530)..(1845): n is a, c, g, or t

SEQ ID NO: 385031 - DNA, 863 bp, Homo Sapiens; identical to SEQ ID NO: 354897

SEQ ID NO: 385032 - DNA, 946 bp, Homo Sapiens; identical to SEQ ID NO: 354898
  misc_feature (23)..(23): n is a, c, g, or t
  misc_feature (35)..(35): n is a, c, g, or t
  misc_feature (47)..(47): n is a, c, g, or t
  misc_feature (90)..(91): n is a, c, g, or t
  misc_feature (808)..(845): n is a, c, g, or t
  misc_feature (855)..(898): n is a, c, g, or t

SEQ ID NO: 385033 - DNA, 1229 bp, Homo Sapiens; identical to SEQ ID NO: 354899

SEQ ID NO: 385034 - DNA, 1573 bp, Homo Sapiens; identical to SEQ ID NO: 354900
  misc_feature (1123)..(1133): n is a, c, g, or t

SEQ ID NO: 385035 - DNA, 569 bp, Homo Sapiens; identical to SEQ ID NO: 354902
  misc_feature (26)..(26): n is a, c, g, or t
  misc_feature (32)..(32): n is a, c, g, or t

SEQ ID NO: 385036 - DNA, 448 bp, Homo Sapiens; identical to SEQ ID NO: 354903
  misc_feature (23)..(23): n is a, c, g, or t
  misc_feature (32)..(32): n is a, c, g, or t
  misc_feature (46)..(46): n is a, c, g, or t

SEQ ID NO: 385037 - DNA, 782 bp, Homo Sapiens; identical to SEQ ID NO: 354906
  misc_feature (726)..(726): n is a, c, g, or t

SEQ ID NO: 385038 - DNA, 942 bp, Homo Sapiens; identical to SEQ ID NO: 354907
  misc_feature (272)..(322): n is a, c, g, or t

SEQ ID NO: 385039 - DNA, 1222 bp, Homo Sapiens; identical to SEQ ID NO: 354908
  misc_feature (1137)..(1137): n is a, c, g, or t

SEQ ID NO: 385040 - DNA, 812 bp, Homo Sapiens; identical to SEQ ID NO: 354910

SEQ ID NO: 385041 - DNA, 1088 bp, Homo Sapiens; identical to SEQ ID NO: 354911
  misc_feature (873)..(873): n is a, c, g, or t

SEQ ID NO: 385042 - DNA, 800 bp, Homo Sapiens; identical to SEQ ID NO: 15515
  misc_feature (579)..(579): n is a, c, g, or t
  misc_feature (582)..(582): n is a, c, g, or t
  misc_feature (586)..(639): n is a, c, g, or t
  misc_feature (647)..(647): n is a, c, g, or t

SEQ ID NO: 385043 - DNA, 950 bp, Homo Sapiens; identical to SEQ ID NO: 354916
  misc_feature (116)..(118): n is a, c, g, or t
  misc_feature (122)..(124): n is a, c, g, or t
  misc_feature (127)..(131): n is a, c, g, or t
  misc_feature (142)..(142): n is a, c, g, or t
  misc_feature (198)..(198): n is a, c, g, or t
  misc_feature (230)..(230): n is a, c, g, or t
  misc_feature (233)..(234): n is a, c, g, or t
  misc_feature (238)..(238): n is a, c, g, or t
  misc_feature (251)..(251): n is a, c, g, or t
  misc_feature (254)..(254): n is a, c, g, or t
  misc_feature (266)..(266): n is a, c, g, or t
  misc_feature (283)..(283): n is a, c, g, or t
  misc_feature (305)..(305): n is a, c, g, or t
  misc_feature (326)..(326): n is a, c, g, or t
  misc_feature (329)..(329): n is a, c, g, or t
  misc_feature (338)..(342): n is a, c, g, or t
  misc_feature (345)..(345): n is a, c, g, or t
  misc_feature (350)..(350): n is a, c, g, or t
  misc_feature (356)..(356): n is a, c, g, or t
  misc_feature (358)..(358): n is a, c, g, or t
  misc_feature (367)..(367): n is a, c, g, or t
  misc_feature (385)..(387): n is a, c, g, or t
  misc_feature (397)..(397): n is a, c, g, or t
  misc_feature (399)..(399): n is a, c, g, or t
  misc_feature (423)..(423): n is a, c, g, or t
  misc_feature (437)..(437): n is a, c, g, or t
  misc_feature (454)..(454): n is a, c, g, or t
  misc_feature (458)..(459): n is a, c, g, or t
  misc_feature (484)..(484): n is a, c, g, or t
  misc_feature (488)..(488): n is a, c, g, or t
  misc_feature (490)..(490): n is a, c, g, or t
  misc_feature (492)..(492): n is a, c, g, or t
  misc_feature (494)..(494): n is a, c, g, or t
  misc_feature (496)..(496): n is a, c, g, or t
  misc_feature (501)..(501): n is a, c, g, or t
  misc_feature (513)..(513): n is a, c, g, or t
  misc_feature (515)..(515): n is a, c, g, or t
  misc_feature (517)..(517): n is a, c, g, or t
  misc_feature (524)..(524): n is a, c, g, or t
  misc_feature (528)..(528): n is a, c, g, or t
  misc_feature (917)..(917): n is a, c, g, or t

SEQ ID NO: 385044 - DNA, 539 bp, Homo Sapiens; identical to SEQ ID NO: 354917
  misc_feature (25)..(25): n is a, c, g, or t
  misc_feature (355)..(377): n is a, c, g, or t

SEQ ID NO: 385045 - DNA, 1912 bp, Homo Sapiens; identical to SEQ ID NO: 354918

SEQ ID NO: 385046 - DNA, 653 bp, Homo Sapiens; identical to SEQ ID NO: 354919

SEQ ID NO: 385047 - DNA, 494 bp, Homo Sapiens; identical to SEQ ID NO: 354920

SEQ ID NO: 385048 - DNA, 2023 bp, Homo Sapiens; identical to SEQ ID NO: 354921

SEQ ID NO: 385049 - DNA, 431 bp, Homo Sapiens; identical to SEQ ID NO: 354926

SEQ ID NO: 385050 - DNA, 451 bp, Homo Sapiens; identical to SEQ ID NO: 354927
  misc_feature (29)..(29): n is a, c, g, or t
  misc_feature (59)..(59): n is a, c, g, or t
  misc_feature (69)..(69): n is a, c, g, or t

SEQ ID NO: 385051 - DNA, 1025 bp, Homo Sapiens; identical to SEQ ID NO: 354939
  misc_feature (66)..(66): n is a, c, g, or t
  misc_feature (75)..(75): n is a, c, g, or t
  misc_feature (122)..(122): n is a, c, g, or t
  misc_feature (300)..(300): n is a, c, g, or t

SEQ ID NO: 385052 - DNA, 2735 bp, Homo Sapiens; identical to SEQ ID NO: 354940
  misc_feature (2078)..(2082): n is a, c, g, or t
  misc_feature (2084)..(2084): n is a, c, g, or t
  misc_feature (2087)..(2089): n is a, c, g, or t
  misc_feature (2091)..(2094): n is a, c, g, or t
  misc_feature (2097)..(2098): n is a, c, g, or t
  misc_feature (2101)..(2103): n is a, c, g, or t
  misc_feature (2271)..(2282): n is a, c, g, or t
  misc_feature (2429)..(2443): n is a, c, g, or t
  misc_feature (2550)..(2550): n is a, c, g, or t
  misc_feature (2643)..(2643): n is a, c, g, or t

SEQ ID NO: 385053 - DNA, 1072 bp, Homo Sapiens; identical to SEQ ID NO: 354946
  misc_feature (330)..(340): n is a, c, g, or t
  misc_feature (930)..(930): n is a, c, g, or t

SEQ ID NO: 385054 - DNA, 464 bp, Homo Sapiens; identical to SEQ ID NO: 354947

SEQ ID NO: 385055 - DNA, 1122 bp, Homo Sapiens; identical to SEQ ID NO: 354950

SEQ ID NO: 385056 - DNA, 1881 bp, Homo Sapiens; identical to SEQ ID NO: 354951
  misc_feature (65)..(126): n is a, c, g, or t
  misc_feature (491)..(491): n is a, c, g, or t
  misc_feature (1105)..(1163): n is a, c, g, or t
  misc_feature (1167)..(1167): n is a, c, g, or t
  misc_feature (1169)..(1169): n is a, c, g, or t
  misc_feature (1679)..(1692): n is a, c, g, or t

SEQ ID NO: 385057 - DNA, 449 bp, Homo Sapiens; identical to SEQ ID NO: 354952
  misc_feature (425)..(425): n is a, c, g, or t

SEQ ID NO: 385058 - DNA, 782 bp, Homo Sapiens; identical to SEQ ID NO: 354956
  misc_feature (194)..(194): n is a, c, g, or t
  misc_feature (227)..(227): n is a, c, g, or t

SEQ ID NO: 385059 - DNA, 815 bp, Homo Sapiens; identical to SEQ ID NO: 354957
  misc_feature (285)..(285): n is a, c, g, or t

SEQ ID NO: 385060 - DNA, 427 bp, Homo Sapiens; identical to SEQ ID NO: 354958
  misc_feature (19)..(19): n is a, c, g, or t

SEQ ID NO: 385061 - DNA, 1037 bp, Homo Sapiens; identical to SEQ ID NO: 354960
  misc_feature (32)..(32): n is a, c, g, or t

SEQ ID NO: 385062 - DNA, 775 bp, Homo Sapiens; identical to SEQ ID NO: 354961

SEQ ID NO: 385063 - DNA, 1897 bp, Homo Sapiens; identical to SEQ ID NO: 354962

SEQ ID NO: 385064 - DNA, 668 bp, Homo Sapiens; identical to SEQ ID NO: 354963
  misc_feature (27)..(27): n is a, c, g, or t
  misc_feature (70)..(70): n is a, c, g, or t
  misc_feature (77)..(77): n is a, c, g, or t

SEQ ID NO: 385065 - DNA, 2157 bp, Homo Sapiens; identical to SEQ ID NO: 354966
  misc_feature (18)..(18): n is a, c, g, or t

SEQ ID NO: 385066 - DNA, 787 bp, Homo Sapiens; identical to SEQ ID NO: 354967

SEQ ID NO: 385067 - DNA, 952 bp, Homo Sapiens; identical to SEQ ID NO: 354968

SEQ ID NO: 385068 - DNA, 476 bp, Homo Sapiens; identical to SEQ ID NO: 354969

SEQ ID NO: 385069 - DNA, 1132 bp, Homo Sapiens; identical to SEQ ID NO: 354971
  misc_feature (971)..(971): n is a, c, g, or t

SEQ ID NO: 385070 - DNA, 1042 bp, Homo Sapiens; identical to SEQ ID NO: 354972

SEQ ID NO: 385071 - DNA, 566 bp, Homo Sapiens; identical to SEQ ID NO: 354980

SEQ ID NO: 385072 - DNA, 467 bp, Homo Sapiens; identical to SEQ ID NO: 354981
  misc_feature (49)..(49): n is a, c, g, or t

SEQ ID NO: 385073 - DNA, 466 bp, Homo Sapiens; identical to SEQ ID NO: 354986
  misc_feature (13)..(13): n is a, c, g, or t
  misc_feature (28)..(28): n is a, c, g, or t
  misc_feature (85)..(85): n is a, c, g, or t

SEQ ID NO: 385074 - DNA, 973 bp, Homo Sapiens; identical to SEQ ID NO: 354987
  misc_feature (205)..(225): n is a, c, g, or t

SEQ ID NO: 385075 - DNA, 738 bp, Homo Sapiens; identical to SEQ ID NO: 354988
  misc_feature (673)..(673): n is a, c, g, or t

SEQ ID NO: 385076 - DNA, 653 bp, Homo Sapiens; identical to SEQ ID NO: 354989

SEQ ID NO: 385077 - DNA, 1249 bp, Homo Sapiens; identical to SEQ ID NO: 355009
  misc_feature (109)..(190): n is a, c, g, or t

SEQ ID NO: 385078 - DNA, 447 bp, Homo Sapiens; identical to SEQ ID NO: 355010
  misc_feature (320)..(405): n is a, c, g, or t

SEQ ID NO: 385079 - DNA, 680 bp, Homo Sapiens; identical to SEQ ID NO: 355011

SEQ ID NO: 385080 - DNA, 806 bp, Homo Sapiens; identical to SEQ ID NO: 355012

SEQ ID NO: 385081 - DNA, 468 bp, Homo Sapiens; identical to SEQ ID NO: 355014

SEQ ID NO: 385082 - DNA, 1574 bp, Homo Sapiens; identical to SEQ ID NO: 355015
  misc_feature (23)..(23): n is a, c, g, or t
  misc_feature (366)..(366): n is a, c, g, or t
  misc_feature (436)..(436): n is a, c, g, or t
  misc_feature (610)..(630): n is a, c, g, or t
  misc_feature (1113)..(1113): n is a, c, g, or t

SEQ ID NO: 385083 - DNA, 1020 bp, Homo Sapiens; identical to SEQ ID NO: 355016
  misc_feature (979)..(979): n is a, c, g, or t

SEQ ID NO: 385084 - DNA, 911 bp, Homo Sapiens; identical to SEQ ID NO: 355017

SEQ ID NO: 385085 - DNA, 985 bp, Homo Sapiens; identical to SEQ ID NO: 355018
  misc_feature (238)..(238): n is a, c, g, or t

SEQ ID NO: 385086 - DNA, 1003 bp, Homo Sapiens; identical to SEQ ID NO: 355019

SEQ ID NO: 385087 - DNA, 843 bp, Homo Sapiens; identical to SEQ ID NO: 355020

SEQ ID NO: 385088 - DNA, 912 bp, Homo Sapiens; identical to SEQ ID NO: 355021
  misc_feature (804)..(804): n is a, c, g, or t
  misc_feature (812)..(812): n is a, c, g, or t

SEQ ID NO: 385089 - DNA, 634 bp, Homo Sapiens; identical to SEQ ID NO: 355023

SEQ ID NO: 385090 - DNA, 409 bp, Homo Sapiens; identical to SEQ ID NO: 355024

SEQ ID NO: 385091 - DNA, 1286 bp, Homo Sapiens; identical to SEQ ID NO: 355032
  misc_feature (1270)..(1270): n is a, c, g, or t

SEQ ID NO: 385092 - DNA, 1014 bp, Homo Sapiens; identical to SEQ ID NO: 355033
  misc_feature (95)..(105): n is a, c, g, or t

SEQ ID NO: 385093 - DNA, 714 bp, Homo Sapiens; identical to SEQ ID NO: 355034
  misc_feature (33)..(33): n is a, c, g, or t
  misc_feature (379)..(389): n is a, c, g, or t

SEQ ID NO: 385094 - DNA, 806 bp, Homo Sapiens; identical to SEQ ID NO: 355040
  misc_feature (14)..(14): n is a, c, g, or t
  misc_feature (25)..(25): n is a, c, g, or t
  misc_feature (747)..(760): n is a, c, g, or t

SEQ ID NO: 385095 - DNA, 871 bp, Homo Sapiens; identical to SEQ ID NO: 355041
  misc_feature (324)..(374): n is a, c, g, or t
  misc_feature (410)..(423): n is a, c, g, or t

SEQ ID NO: 385096 - DNA, 968 bp, Homo Sapiens; identical to SEQ ID NO: 355043
  misc_feature (6)..(6): n is a, c, g, or t
  misc_feature (13)..(16): n is a, c, g, or t
  misc_feature (34)..(34): n is a, c, g, or t
  misc_feature (91)..(91): n is a, c, g, or t
  misc_feature (104)..(104): n is a, c, g, or t
  misc_feature (261)..(261): n is a, c, g, or t

SEQ ID NO: 385097 - DNA, 718 bp, Homo Sapiens; identical to SEQ ID NO: 355044

SEQ ID NO: 385098 - DNA, 1159 bp, Homo Sapiens; identical to SEQ ID NO: 355046
  misc_feature (167)..(461): n is a, c, g, or t
  misc_feature (535)..(563): n is a, c, g, or t
  misc_feature (1097)..(1097): n is a, c, g, or t

SEQ ID NO: 385099 - DNA, 450 bp, Homo Sapiens; identical to SEQ ID NO: 355047
  misc_feature (193)..(312): n is a, c, g, or t

SEQ ID NO: 385100 - DNA, 1205 bp, Homo Sapiens; identical to SEQ ID NO: 355048
  misc_feature (59)..(169): n is a, c, g, or t
  misc_feature (332)..(414): n is a, c, g, or t
  misc_feature (665)..(673): n is a, c, g, or t

SEQ ID NO: 385101 - DNA, 660 bp, Homo Sapiens; identical to SEQ ID NO: 355050
  misc_feature (539)..(539): n is a, c, g, or t
  misc_feature (554)..(554): n is a, c, g, or t

SEQ ID NO: 385102 - DNA, 1129 bp, Homo Sapiens; identical to SEQ ID NO: 355051
  misc_feature (852)..(852): n is a, c, g, or t

SEQ ID NO: 385103 - DNA, 627 bp, Homo Sapiens; identical to SEQ ID NO: 355055
  misc_feature (20)..(20): n is a, c, g, or t
  misc_feature (40)..(40): n is a, c, g, or t
  misc_feature (56)..(56): n is a, c, g, or t

SEQ ID NO: 385104 - DNA, 1370 bp, Homo Sapiens; identical to SEQ ID NO: 355056

SEQ ID NO: 385105 - DNA, 1322 bp, Homo Sapiens; identical to SEQ ID NO: 355060

SEQ ID NO: 385106 - DNA, 935 bp, Homo Sapiens; identical to SEQ ID NO: 355061
  misc_feature (53)..(89): n is a, c, g, or t
  misc_feature (825)..(825): n is a, c, g, or t

SEQ ID NO: 385107 - DNA, 331 bp, Homo Sapiens; identical to SEQ ID NO: 355062

SEQ ID NO: 385108 - DNA, 942 bp, Homo Sapiens; identical to SEQ ID NO: 355063
  misc_feature (687)..(687): n is a, c, g, or t

SEQ ID NO: 385109 - DNA, 2080 bp, Homo Sapiens; identical to SEQ ID NO: 355064

SEQ ID NO: 385110 - DNA, 1530 bp, Homo Sapiens; identical to SEQ ID NO: 355065
  misc_feature (1003)..(1003): n is a, c, g, or t
  misc_feature (1365)..(1365): n is a, c, g, or t

SEQ ID NO: 385111 - DNA, 822 bp, Homo Sapiens; identical to SEQ ID NO: 355066

SEQ ID NO: 385112 - DNA, 492 bp, Homo Sapiens; identical to SEQ ID NO: 355067
  misc_feature (287)..(287): n is a, c, g, or t
  misc_feature (323)..(323): n is a, c, g, or t
  misc_feature (362)..(362): n is a, c, g, or t
  misc_feature (445)..(445): n is a, c, g, or t
  misc_feature (461)..(461): n is a, c, g, or t
  misc_feature (472)..(472): n is a, c, g, or t

SEQ ID NO: 385113 - DNA, 846 bp, Homo Sapiens; identical to SEQ ID NO: 355069

SEQ ID NO: 385114 - DNA, 1105 bp, Homo Sapiens; identical to SEQ ID NO: 355070

SEQ ID NO: 385115 - DNA, 1348 bp, Homo Sapiens; identical to SEQ ID NO: 355075

SEQ ID NO: 385116 - DNA, 529 bp, Homo Sapiens; identical to SEQ ID NO: 355076

SEQ ID NO: 385117 - DNA, 740 bp, Homo Sapiens; identical to SEQ ID NO: 355079
  misc_feature (224)..(232): n is a, c, g, or t
  misc_feature (255)..(307): n is a, c, g, or t

SEQ ID NO: 385118 - DNA, 949 bp, Homo Sapiens; identical to SEQ ID NO: 355080
  misc_feature (647)..(674): n is a, c, g, or t

SEQ ID NO: 385119 - DNA, 933 bp, Homo Sapiens; identical to SEQ ID NO: 355083

SEQ ID NO: 385120 - DNA, 1808 bp, Homo Sapiens; identical to SEQ ID NO: 355084
  misc_feature (1797)..(1797): n is a, c, g, or t
  misc_feature (1804)..(1804): n is a, c, g, or t

SEQ ID NO: 385121 - DNA, 407 bp, Homo Sapiens; identical to SEQ ID NO: 355085

SEQ ID NO: 385122 - DNA, 1955 bp, Homo Sapiens; identical to SEQ ID NO: 355087
  misc_feature (82)..(82): n is a, c, g, or t

SEQ ID NO: 385123 - DNA, 499 bp, Homo Sapiens; identical to SEQ ID NO: 355088
  misc_feature (106)..(106): n is a, c, g, or t
  misc_feature (142)..(142): n is a, c, g, or t
  misc_feature (153)..(153): n is a, c, g, or t

SEQ ID NO: 385124 - DNA, 462 bp, Homo Sapiens; identical to SEQ ID NO: 355089
  misc_feature (32)..(32): n is a, c, g, or t
  misc_feature (41)..(41): n is a, c, g, or t
  misc_feature (228)..(228): n is a, c, g, or t

SEQ ID NO: 385125 - DNA, 469 bp, Homo Sapiens; identical to SEQ ID NO: 355091

SEQ ID NO: 385126 - DNA, 1892 bp, Homo Sapiens; identical to SEQ ID NO: 355092
  misc_feature (1807)..(1807): n is a, c, g, or t
  misc_feature (1810)..(1810): n is a, c, g, or t
  misc_feature (1813)..(1816): n is a, c, g, or t
  misc_feature (1820)..(1820): n is a, c, g, or t
  misc_feature (1824)..(1829): n is a, c, g, or t

SEQ ID NO: 385127 - DNA, 924 bp, Homo Sapiens; identical to SEQ ID NO: 355093
  misc_feature (769)..(769): n is a, c, g, or t
  misc_feature (784)..(784): n is a, c, g, or t
  misc_feature (788)..(789): n is a, c, g, or t

SEQ ID NO: 385128 - DNA, 1150 bp, Homo Sapiens; identical to SEQ ID NO: 355095
  misc_feature (241)..(282): n is a, c, g, or t
  misc_feature (533)..(533): n is a, c, g, or t
  misc_feature (763)..(800): n is a, c, g, or t
  misc_feature (1047)..(1047): n is a, c, g, or t
  misc_feature (1099)..(1099): n is a, c, g, or t
  misc_feature (1108)..(1108): n is a, c, g, or t
  misc_feature (1120)..(1120): n is a, c, g, or t
  misc_feature (1134)..(1134): n is a, c, g, or t

SEQ ID NO: 385129 - DNA, 1864 bp, Homo Sapiens; identical to SEQ ID NO: 355096

SEQ ID NO: 385130 - DNA, 702 bp, Homo Sapiens; identical to SEQ ID NO: 355097

SEQ ID NO: 385131 - DNA, 864 bp, Homo Sapiens; identical to SEQ ID NO: 355098

SEQ ID NO: 385132 - DNA, 3793 bp, Homo Sapiens; identical to SEQ ID NO: 355104
  misc_feature (1846)..(1848): n is a, c, g, or t
  misc_feature (1851)..(1851): n is a, c, g, or t
  misc_feature (1856)..(1856): n is a, c, g, or t
  misc_feature (2101)..(2167): n is a, c, g, or t

SEQ ID NO: 385133 - DNA, 2046 bp, Homo Sapiens; identical to SEQ ID NO: 355105

SEQ ID NO: 385134 - DNA, 251 bp, Homo Sapiens; identical to SEQ ID NO: 355106
  misc_feature (113)..(115): n is a, c, g, or t
  misc_feature (122)..(122): n is a, c, g, or t

SEQ ID NO: 385135 - DNA, 1054 bp, Homo Sapiens; identical to SEQ ID NO: 355114
  misc_feature (10)..(10): n is a, c, g, or t
  misc_feature (16)..(16): n is a, c, g, or t
  misc_feature (18)..(18): n is a, c, g, or t
  misc_feature (22)..(22): n is a, c, g, or t
  misc_feature (37)..(37): n is a, c, g, or t
  misc_feature (40)..(40): n is a, c, g, or t

SEQ ID NO: 385136 - DNA, 2050 bp, Homo Sapiens; identical to SEQ ID NO: 355115
  misc_feature (1623)..(1623): n is a, c, g, or t
  misc_feature (1994)..(1994): n is a, c, g, or t

SEQ ID NO: 385137 - DNA, 1615 bp, Homo Sapiens; identical to SEQ ID NO: 355116

SEQ ID NO: 385138 - DNA, 490 bp, Homo Sapiens; identical to SEQ ID NO: 355117

SEQ ID NO: 385139 - DNA, 1045 bp, Homo Sapiens; identical to SEQ ID NO: 355118

SEQ ID NO: 385140 - DNA, 1096 bp, Homo Sapiens; identical to SEQ ID NO: 355119
  misc_feature (858)..(858): n is a, c, g, or t

SEQ ID NO: 385141 - DNA, 842 bp, Homo Sapiens; identical to SEQ ID NO: 355120

SEQ ID NO: 385142 - DNA, 2129 bp, Homo Sapiens; identical to SEQ ID NO: 355122
  misc_feature (790)..(790): n is a, c, g, or t

SEQ ID NO: 385143 - DNA, 401 bp, Homo Sapiens; identical to SEQ ID NO: 355123

SEQ ID NO: 385144 - DNA, 973 bp, Homo Sapiens; identical to SEQ ID NO: 355124

SEQ ID NO: 385145 - DNA, 981 bp, Homo Sapiens; identical to SEQ ID NO: 355125

SEQ ID NO: 385146 - DNA, 1131 bp, Homo Sapiens; identical to SEQ ID NO: 355126

SEQ ID NO: 385147 - DNA, 1664 bp, Homo Sapiens; identical to SEQ ID NO: 355131
  misc_feature (128)..(186): n is a, c, g, or t
  misc_feature (1523)..(1523): n is a, c, g, or t
  misc_feature (1526)..(1526): n is a, c, g, or t
  misc_feature (1537)..(1537): n is a, c, g, or t
  misc_feature (1565)..(1565): n is a, c, g, or t
  misc_feature (1578)..(1578): n is a, c, g, or t
  misc_feature (1582)..(1582): n is a, c, g, or t
  misc_feature (1584)..(1584): n is a, c, g, or t
  misc_feature (1588)..(1588): n is a, c, g, or t
  misc_feature (1597)..(1597): n is a, c, g, or t
  misc_feature (1599)..(1599): n is a, c, g, or t
  misc_feature (1605)..(1605): n is a, c, g, or t
  misc_feature (1607)..(1607): n is a, c, g, or t
  misc_feature (1609)..(1609): n is a, c, g, or t
  misc_feature (1611)..(1611): n is a, c, g, or t
  misc_feature (1615)..(1615): n is a, c, g, or t
  misc_feature (1619)..(1619): n is a, c, g, or t
  misc_feature (1624)..(1624): n is a, c, g, or t
  misc_feature (1630)..(1630): n is a, c, g, or t
  misc_feature (1643)..(1643): n is a, c, g, or t
  misc_feature (1647)..(1647): n is a, c, g, or t
  misc_feature (1649)..(1649): n is a, c, g, or t
  misc_feature (1653)..(1653): n is a, c, g, or t
  misc_feature (1657)..(1657): n is a, c, g, or t
  misc_feature (1663)..(1664): n is a, c, g, or t

SEQ ID NO: 385148 - DNA, 1426 bp, Homo Sapiens; identical to SEQ ID NO: 355132
  misc_feature (1181)..(1193): n is a, c, g, or t
  misc_feature (1393)..(1393): n is a, c, g, or t
  misc_feature (1401)..(1401): n is a, c, g, or t
  misc_feature (1408)..(1408): n is a, c, g, or t

SEQ ID NO: 385149 - DNA, 3096 bp, Homo Sapiens; identical to SEQ ID NO: 355133
  misc_feature (2759)..(2767): n is a, c, g, or t
  misc_feature (2808)..(2826): n is a, c, g, or t

SEQ ID NO: 385150 - DNA, 423 bp, Homo Sapiens; identical to SEQ ID NO: 355134

SEQ ID NO: 385151 - DNA, 619 bp, Homo Sapiens; identical to SEQ ID NO: 355135
  misc_feature (506)..(506): n is a, c, g, or t
  misc_feature (558)..(558): n is a, c, g, or t
  misc_feature (580)..(580): n is a, c, g, or t
  misc_feature (586)..(586): n is a, c, g, or t

SEQ ID NO: 385152 - DNA, 1241 bp, Homo Sapiens; identical to SEQ ID NO: 355136

SEQ ID NO: 385153 - DNA, 1061 bp, Homo Sapiens; identical to SEQ ID NO: 355137

SEQ ID NO: 385154 - DNA, 1367 bp, Homo Sapiens; identical to SEQ ID NO: 355139
  misc_feature (256)..(264): n is a, c, g, or t
  misc_feature (293)..(308): n is a, c, g, or t

SEQ ID NO: 385155 - DNA, 698 bp, Homo Sapiens; identical to SEQ ID NO: 355140
  misc_feature (619)..(619): n is a, c, g, or t

SEQ ID NO: 385156 - DNA, 1091 bp, Homo Sapiens; identical to SEQ ID NO: 355144

SEQ ID NO: 385157 - DNA, 393 bp, Homo Sapiens; identical to SEQ ID NO: 355145
  misc_feature (30)..(30): n is a, c, g, or t
  misc_feature (58)..(58): n is a, c, g, or t
  misc_feature (81)..(81): n is a, c, g, or t

SEQ ID NO: 385158 - DNA, 726 bp, Homo Sapiens; identical to SEQ ID NO: 355146
  misc_feature (111)..(111): n is a, c, g, or t
  misc_feature (344)..(344): n is a, c, g, or t

SEQ ID NO: 385159 - DNA, 1436 bp, Homo Sapiens; identical to SEQ ID NO: 355147

SEQ ID NO: 385160 - DNA, 439 bp, Homo Sapiens; identical to SEQ ID NO: 355148
  misc_feature (420)..(420): n is a, c, g, or t

SEQ ID NO: 385161 - DNA, 482 bp, Homo Sapiens; identical to SEQ ID NO: 355149
  misc_feature (274)..(274): n is a, c, g, or t

SEQ ID NO: 385162 - DNA, 1560 bp, Homo Sapiens; identical to SEQ ID NO: 355150
  misc_feature (1431)..(1431): n is a, c, g, or t
  misc_feature (1438)..(1438): n is a, c, g, or t
  misc_feature (1447)..(1447): n is a, c, g, or t
  misc_feature (1466)..(1466): n is a, c, g, or t
  misc_feature (1470)..(1470): n is a, c, g, or t
  misc_feature (1480)..(1480): n is a, c, g, or t
  misc_feature (1485)..(1485): n is a, c, g, or t
  misc_feature (1494)..(1494): n is a, c, g, or t
  misc_feature (1501)..(1501): n is a, c, g, or t
  misc_feature (1515)..(1515): n is a, c, g, or t
  misc_feature (1518)..(1518): n is a, c, g, or t
  misc_feature (1534)..(1534): n is a, c, g, or t
  misc_feature (1538)..(1538): n is a, c, g, or t
  misc_feature (1548)..(1549): n is a, c, g, or t
  misc_feature (1554)..(1554): n is a, c, g, or t

SEQ ID NO: 385163 - DNA, 1375 bp, Homo Sapiens; identical to SEQ ID NO: 355151

SEQ ID NO: 385164 - DNA, 926 bp, Homo Sapiens; identical to SEQ ID NO: 355152

SEQ ID NO: 385165 - DNA, 1068 bp, Homo Sapiens; identical to SEQ ID NO: 355153
  misc_feature (980)..(988): n is a, c, g, or t

SEQ ID NO: 385166 - DNA, 497 bp, Homo Sapiens; identical to SEQ ID NO: 355154
  misc_feature (391)..(410): n is a, c, g, or t

SEQ ID NO: 385167 - DNA, 1475 bp, Homo Sapiens; identical to SEQ ID NO: 355158

SEQ ID NO: 385168 - DNA, 271 bp, Homo Sapiens; identical to SEQ ID NO: 355159

SEQ ID NO: 385169 - DNA, 1648 bp, Homo Sapiens; identical to SEQ ID NO: 355160

SEQ ID NO: 385170 - DNA, 1089 bp, Homo Sapiens; identical to SEQ ID NO: 355161
  misc_feature (968)..(968): n is a, c, g, or t
  misc_feature (1011)..(1011): n is a, c, g, or t
  misc_feature (1013)..(1013): n is a, c, g, or t
  misc_feature (1018)..(1018): n is a, c, g, or t
  misc_feature (1029)..(1029): n is a, c, g, or t
  misc_feature (1031)..(1031): n is a, c, g, or t
  misc_feature (1051)..(1052): n is a, c, g, or t
  misc_feature (1055)..(1055): n is a, c, g, or t
  misc_feature (1059)..(1060): n is a, c, g, or t
  misc_feature (1062)..(1062): n is a, c, g, or t
  misc_feature (1068)..(1068): n is a, c, g, or t
  misc_feature (1072)..(1072): n is a, c, g, or t
  misc_feature (1083)..(1083): n is a, c, g, or t

SEQ ID NO: 385171 - DNA, 1150 bp, Homo Sapiens; identical to SEQ ID NO: 355162

SEQ ID NO: 385172 - DNA, 855 bp, Homo Sapiens; identical to SEQ ID NO: 355163
  misc_feature (330)..(330): n is a, c, g, or t

SEQ ID NO: 385173 - DNA, 1039 bp, Homo Sapiens; identical to SEQ ID NO: 355164
  misc_feature (8)..(8): n is a, c, g, or t
  misc_feature (18)..(18): n is a, c, g, or t
  misc_feature (26)..(26): n is a, c, g, or t
  misc_feature (32)..(32): n is a, c, g, or t
  misc_feature (39)..(39): n is a, c, g, or t
  misc_feature (49)..(49): n is a, c, g, or t
  misc_feature (983)..(983): n is a, c, g, or t

SEQ ID NO: 385174 - DNA, 931 bp, Homo Sapiens; identical to SEQ ID NO: 355166
  misc_feature (673)..(736): n is a, c, g, or t

SEQ ID NO: 385175 - DNA, 2282 bp, Homo Sapiens; identical to SEQ ID NO: 355167

SEQ ID NO: 385176 - DNA, 1377 bp, Homo Sapiens; identical to SEQ ID NO: 355168

SEQ ID NO: 385177 - DNA, 1056 bp, Homo Sapiens; identical to SEQ ID NO: 97689

SEQ ID NO: 385178 - DNA, 821 bp, Homo Sapiens; identical to SEQ ID NO: 355170

SEQ ID NO: 385179 - DNA, 749 bp, Homo Sapiens; identical to SEQ ID NO: 355171
  misc_feature (611)..(673): n is a, c, g, or t

SEQ ID NO: 385180 - DNA, 1785 bp, Homo Sapiens; identical to SEQ ID NO: 355179
  misc_feature (1334)..(1356): n is a, c, g, or t
  misc_feature (1403)..(1419): n is a, c, g, or t

SEQ ID NO: 385181 - DNA, 396 bp, Homo Sapiens; identical to SEQ ID NO: 355180
  misc_feature (76)..(76): n is a, c, g, or t
  misc_feature (136)..(136): n is a, c, g, or t
  misc_feature (280)..(280): n is a, c, g, or t
  misc_feature (353)..(353): n is a, c, g, or t
  misc_feature (368)..(368): n is a, c, g, or t
  misc_feature (374)..(374): n is a, c, g, or t

SEQ ID NO: 385182 - DNA, 1054 bp, Homo Sapiens; identical to SEQ ID NO: 355181

SEQ ID NO: 385183 - DNA, 415 bp, Homo Sapiens; identical to SEQ ID NO: 355182
  misc_feature (53)..(114): n is a, c, g, or t
  misc_feature (180)..(180): n is a, c, g, or t
  misc_feature (211)..(211): n is a, c, g, or t

SEQ ID NO: 385184 - DNA, 498 bp, Homo Sapiens; identical to SEQ ID NO: 355183
  misc_feature (11)..(11): n is a, c, g, or t
  misc_feature (32)..(32): n is a, c, g, or t
  misc_feature (41)..(41): n is a, c, g, or t

SEQ ID NO: 385185 - DNA, 1176 bp, Homo Sapiens; identical to SEQ ID NO: 355185
  misc_feature (1042)..(1042): n is a, c, g, or t
  misc_feature (1114)..(1114): n is a, c, g, or t

SEQ ID NO: 385186 - DNA, 920 bp, Homo Sapiens; identical to SEQ ID NO: 355186

SEQ ID NO: 385187 - DNA, 928 bp, Homo Sapiens; identical to SEQ ID NO: 355187

SEQ ID NO: 385188 - DNA, 1629 bp, Homo Sapiens; identical to SEQ ID NO: 355190

SEQ ID NO: 385189 - DNA, 1832 bp, Homo Sapiens; identical to SEQ ID NO: 355191
  misc_feature (835)..(835): n is a, c, g, or t
  misc_feature (841)..(841): n is a, c, g, or t
  misc_feature (852)..(852): n is a, c, g, or t
  misc_feature (871)..(871): n is a, c, g, or t
  misc_feature (877)..(877): n is a, c, g, or t
  misc_feature (880)..(880): n is a, c, g, or t
  misc_feature (900)..(900): n is a, c, g, or t
  misc_feature (912)..(912): n is a, c, g, or t
  misc_feature (944)..(944): n is a, c, g, or t

SEQ ID NO: 385190 - DNA, 1200 bp, Homo Sapiens; identical to SEQ ID NO: 355193
  misc_feature (975)..(975): n is a, c, g, or t

SEQ ID NO: 385191 - DNA, 1401 bp, Homo Sapiens; identical to SEQ ID NO: 355194

SEQ ID NO: 385192 - DNA, 579 bp, Homo Sapiens; identical to SEQ ID NO: 355195
  misc_feature (31)..(31): n is a, c, g, or t

SEQ ID NO: 385193 - DNA, 1648 bp, Homo Sapiens; identical to SEQ ID NO: 355197
  misc_feature (593)..(671): n is a, c, g, or t

SEQ ID NO: 385194 - DNA, 1221 bp, Homo Sapiens; identical to SEQ ID NO: 355198
  misc_feature (429)..(429): n is a, c, g, or t
  misc_feature (1211)..(1211): n is a, c, g, or t

SEQ ID NO: 385195 - DNA, 2403 bp, Homo Sapiens; identical to SEQ ID NO: 355200
  misc_feature (2371)..(2371): n is a, c, g, or t

SEQ ID NO: 385196 - DNA, 288 bp, Homo Sapiens; identical to SEQ ID NO: 355201
  misc_feature (100)..(100): n is a, c, g, or t
  misc_feature (225)..(237): n is a, c, g, or t

SEQ ID NO: 385197 - DNA, 2653 bp, Homo Sapiens; identical to SEQ ID NO: 355202
  misc_feature (291)..(334): n is a, c, g, or t
  misc_feature (533)..(533): n is a, c, g, or t
  misc_feature (1473)..(1490): n is a, c, g, or t
  misc_feature (1987)..(2000): n is a, c, g, or t

SEQ ID NO: 385198 - DNA, 2178 bp, Homo Sapiens; identical to SEQ ID NO: 355203
  misc_feature (655)..(655): n is a, c, g, or t
  misc_feature (660)..(660): n is a, c, g, or t
  misc_feature (1745)..(1770): n is a, c, g, or t

SEQ ID NO: 385199 - DNA, 512 bp, Homo Sapiens; identical to SEQ ID NO: 355204

SEQ ID NO: 385200 - DNA, 1234 bp, Homo Sapiens; identical to SEQ ID NO: 355205
  misc_feature (65)..(128): n is a, c, g, or t
  misc_feature (916)..(929): n is a, c, g, or t

SEQ ID NO: 385201 - DNA, 1116 bp, Homo Sapiens; identical to SEQ ID NO: 355206
  misc_feature (44)..(80): n is a, c, g, or t
  misc_feature (1022)..(1022): n is a, c, g, or t
  misc_feature (1057)..(1057): n is a, c, g, or t
  misc_feature (1064)..(1064): n is a, c, g, or t

SEQ ID NO: 385202 - DNA, 1201 bp, Homo Sapiens; identical to SEQ ID NO: 355207
  misc_feature (42)..(42): n is a, c, g, or t
  misc_feature (58)..(58): n is a, c, g, or t
  misc_feature (319)..(319): n is a, c, g, or t
  misc_feature (411)..(411): n is a, c, g, or t
  misc_feature (1086)..(1086): n is a, c, g, or t
  misc_feature (1122)..(1122): n is a, c, g, or t
  misc_feature (1126)..(1126): n is a, c, g, or t

SEQ ID NO: 385203 - DNA, 444 bp, Homo Sapiens; identical to SEQ ID NO: 355208

SEQ ID NO: 385204 - DNA, 422 bp, Homo Sapiens; identical to SEQ ID NO: 355209

SEQ ID NO: 385205 - DNA, 1607 bp, Homo Sapiens; identical to SEQ ID NO: 355210
  misc_feature (34)..(34): n is a, c, g, or t
  misc_feature (123)..(123): n is a, c, g, or t
  misc_feature (152)..(153): n is a, c, g, or t

SEQ ID NO: 385206 - DNA, 754 bp, Homo Sapiens; identical to SEQ ID NO: 355211

SEQ ID NO: 385207 - DNA, 1171 bp, Homo Sapiens; identical to SEQ ID NO: 355214
  misc_feature (801)..(801): n is a, c, g, or t
  misc_feature (1140)..(1140): n is a, c, g, or t

SEQ ID NO: 385208 - DNA, 1234 bp, Homo Sapiens; identical to SEQ ID NO: 355215

SEQ ID NO: 385209 - DNA, 2603 bp, Homo Sapiens; identical to SEQ ID NO: 355218
  misc_feature (45)..(45): n is a, c, g, or t
  misc_feature (89)..(89): n is a, c, g, or t
  misc_feature (273)..(273): n is a, c, g, or t
  misc_feature (301)..(301): n is a, c, g, or t
  misc_feature (303)..(303): n is a, c, g, or t
  misc_feature (340)..(340): n is a, c, g, or t
  misc_feature (347)..(347): n is a, c, g, or t
  misc_feature (357)..(357): n is a, c, g, or t
  misc_feature (365)..(365): n is a, c, g, or t
  misc_feature (385)..(385): n is a, c, g, or t
  misc_feature (388)..(389): n is a, c, g, or t
  misc_feature (409)..(409): n is a, c, g, or t
  misc_feature (413)..(413): n is a, c, g, or t
  misc_feature (457)..(457): n is a, c, g, or t
  misc_feature (726)..(726): n is a, c, g, or t
  misc_feature (1953)..(1953): n is a, c, g, or t
  misc_feature (2072)..(2072): n is a, c, g, or t
  misc_feature (2167)..(2167): n is a, c, g, or t
  misc_feature (2169)..(2169): n is a, c, g, or t
  misc_feature (2176)..(2176): n is a, c, g, or t
  misc_feature (2183)..(2186): n is a, c, g, or t
  misc_feature (2320)..(2320): n is a, c, g, or t
  misc_feature (2419)..(2419): n is a, c, g, or t

SEQ ID NO: 385210 - DNA, 593 bp, Homo Sapiens; identical to SEQ ID NO: 355219
  misc_feature (42)..(42): n is a, c, g, or t
  misc_feature (156)..(156): n is a, c, g, or t
  misc_feature (344)..(344): n is a, c, g, or t
  misc_feature (383)..(383): n is a, c, g, or t
  misc_feature (396)..(396): n is a, c, g, or t
  misc_feature (402)..(402): n is a, c, g, or t
  misc_feature (502)..(502): n is a, c, g, or t
  misc_feature (507)..(507): n is a, c, g, or t
  misc_feature (514)..(514): n is a, c, g, or t
  misc_feature (530)..(530): n is a, c, g, or t
  misc_feature (535)..(535): n is a, c, g, or t
  misc_feature (548)..(548): n is a, c, g, or t

SEQ ID NO: 385211 - DNA, 1102 bp, Homo Sapiens; identical to SEQ ID NO: 355221
  misc_feature (8)..(8): n is a, c, g, or t
  misc_feature (25)..(25): n is a, c, g, or t
  misc_feature (29)..(29): n is a, c, g, or t
  misc_feature (35)..(35): n is a, c, g, or t
  misc_feature (37)..(37): n is a, c, g, or t
  misc_feature (50)..(50): n is a, c, g, or t
  misc_feature (53)..(53): n is a, c, g, or t
  misc_feature (55)..(117): n is a, c, g, or t

SEQ ID NO: 385212 - DNA, 238 bp, Homo Sapiens; identical to SEQ ID NO: 355222

SEQ ID NO: 385213 - DNA, 1639 bp, Homo Sapiens; identical to SEQ ID NO: 355223
  misc_feature (1201)..(1201): n is a, c, g, or t
  misc_feature (1219)..(1219): n is a, c, g, or t
  misc_feature (1223)..(1225): n is a, c, g, or t
  misc_feature (1228)..(1231): n is a, c, g, or t
  misc_feature (1238)..(1238): n is a, c, g, or t
  misc_feature (1245)..(1249): n is a, c, g, or t
  misc_feature (1253)..(1254): n is a, c, g, or t
  misc_feature (1257)..(1257): n is a, c, g, or t
  misc_feature (1349)..(1349): n is a, c, g, or t
  misc_feature (1355)..(1355): n is a, c, g, or t
  misc_feature (1454)..(1454): n is a, c, g, or t

SEQ ID NO: 385214 - DNA, 1219 bp, Homo Sapiens; identical to SEQ ID NO: 355224
  misc_feature (51)..(87): n is a, c, g, or t

SEQ ID NO: 385215 - DNA, 3334 bp, Homo Sapiens; identical to SEQ ID NO: 355234
  misc_feature (2376)..(2376): n is a, c, g, or t

SEQ ID NO: 385216 - DNA, 857 bp, Homo Sapiens; identical to SEQ ID NO: 355235
  misc_feature (97)..(97): n is a, c, g, or t
  misc_feature (131)..(131): n is a, c, g, or t

SEQ ID NO: 385217 - DNA, 1159 bp, Homo Sapiens; identical to SEQ ID NO: 355236
  misc_feature (278)..(278): n is a, c, g, or t

SEQ ID NO: 385218 - DNA, 828 bp, Homo Sapiens; identical to SEQ ID NO: 355239
  misc_feature (445)..(445): n is a, c, g, or t
  misc_feature (740)..(748): n is a, c, g, or t

SEQ ID NO: 385219 - DNA, 524 bp, Homo Sapiens; identical to SEQ ID NO: 355240

SEQ ID NO: 385220 - DNA, 1147 bp, Homo Sapiens; identical to SEQ ID NO: 355241

SEQ ID NO: 385221 - DNA, 2041 bp, Homo Sapiens; identical to SEQ ID NO: 355244
  misc_feature (15)..(15): n is a, c, g, or t
  misc_feature (179)..(179): n is a, c, g, or t
  misc_feature (207)..(207): n is a, c, g, or t

SEQ ID NO: 385222 - DNA, 603 bp, Homo Sapiens; identical to SEQ ID NO: 355245

SEQ ID NO: 385223 - DNA, 996 bp, Homo Sapiens; identical to SEQ ID NO: 355246
  misc_feature (167)..(198): n is a, c, g, or t

SEQ ID NO: 385224 - DNA, 708 bp, Homo Sapiens; identical to SEQ ID NO: 355247

SEQ ID NO: 385225 - DNA, 810 bp, Homo Sapiens; identical to SEQ ID NO: 355248
  misc_feature (683)..(767): n is a, c, g, or t

SEQ ID NO: 385226 - DNA, 1216 bp, Homo Sapiens; identical to SEQ ID NO: 355249
  misc_feature (44)..(80): n is a, c, g, or t
  misc_feature (1116)..(1116): n is a, c, g, or t
  misc_feature (1120)..(1120): n is a, c, g, or t
  misc_feature (1150)..(1150): n is a, c, g, or t
  misc_feature (1157)..(1157): n is a, c, g, or t
  misc_feature (1164)..(1164): n is a, c, g, or t
  misc_feature (1171)..(1171): n is a, c, g, or t
  misc_feature (1181)..(1181): n is a, c, g, or t
  misc_feature (1183)..(1183): n is a, c, g, or t
  misc_feature (1202)..(1202): n is a, c, g, or t

SEQ ID NO: 385227 - DNA, 1202 bp, Homo Sapiens; identical to SEQ ID NO: 355250

SEQ ID NO: 385228 - DNA, 854 bp, Homo Sapiens; identical to SEQ ID NO: 355251
  misc_feature (114)..(114): n is a, c, g, or t
  misc_feature (190)..(190): n is a, c, g, or t
  misc_feature (194)..(194): n is a, c, g, or t
  misc_feature (220)..(220): n is a, c, g, or t
  misc_feature (248)..(248): n is a, c, g, or t
  misc_feature (304)..(304): n is a, c, g, or t

SEQ ID NO: 385229 - DNA, 946 bp, Homo Sapiens; identical to SEQ ID NO: 355252

SEQ ID NO: 385230 - DNA, 407 bp, Homo Sapiens; identical to SEQ ID NO: 355253
  misc_feature (385)..(385): n is a, c, g, or t

SEQ ID NO: 385231 - DNA, 945 bp, Homo Sapiens; identical to SEQ ID NO: 355256

SEQ ID NO: 385232 - DNA, 1345 bp, Homo Sapiens; identical to SEQ ID NO: 355257
  misc_feature (97)..(156): n is a, c, g, or t
  misc_feature (258)..(258): n is a, c, g, or t

SEQ ID NO: 385233 - DNA, 1944 bp, Homo Sapiens; identical to SEQ ID NO: 355259
  misc_feature (1924)..(1924): n is a, c, g, or t
  misc_feature (1933)..(1933): n is a, c, g, or t

SEQ ID NO: 385234 - DNA, 757 bp, Homo Sapiens; identical to SEQ ID NO: 355260

SEQ ID NO: 385235 - DNA, 2633 bp, Homo Sapiens; identical to SEQ ID NO: 355261
  misc_feature (60)..(90): n is a, c, g, or t
  misc_feature (1924)..(1924): n is a, c, g, or t
  misc_feature (2514)..(2514): n is a, c, g, or t
  misc_feature (2539)..(2539): n is a, c, g, or t
  misc_feature (2541)..(2541): n is a, c, g, or t
  misc_feature (2559)..(2559): n is a, c, g, or t
  misc_feature (2561)..(2561): n is a, c, g, or t
  misc_feature (2566)..(2566): n is a, c, g, or t
  misc_feature (2569)..(2569): n is a, c, g, or t
  misc_feature (2575)..(2575): n is a, c, g, or t
  misc_feature (2595)..(2595): n is a, c, g, or t
  misc_feature (2600)..(2600): n is a, c, g, or t
  misc_feature (2602)..(2602): n is a, c, g, or t
  misc_feature (2608)..(2608): n is a, c, g, or t
  misc_feature (2612)..(2612): n is a, c, g, or t
  misc_feature (2623)..(2623): n is a, c, g, or t
  misc_feature (2631)..(2631): n is a, c, g, or t
  misc_feature (2633)..(2633): n is a, c, g, or t

SEQ ID NO: 385236 - DNA, 677 bp, Homo Sapiens; identical to SEQ ID NO: 355262

SEQ ID NO: 385237 - DNA, 1382 bp, Homo Sapiens; identical to SEQ ID NO: 355263
  misc_feature (42)..(78): n is a, c, g, or t

SEQ ID NO: 385238 - DNA, 1112 bp, Homo Sapiens; identical to SEQ ID NO: 355264

SEQ ID NO: 385239 - DNA, 585 bp, Homo Sapiens; identical to SEQ ID NO: 355267

SEQ ID NO: 385240 - DNA, 1656 bp, Homo Sapiens; identical to SEQ ID NO: 355268
  misc_feature (329)..(329): n is a, c, g, or t

SEQ ID NO: 385241 - DNA, 454 bp, Homo Sapiens; identical to SEQ ID NO: 355269

SEQ ID NO: 385242 - DNA, 493 bp, Homo Sapiens; identical to SEQ ID NO: 355270
  misc_feature (31)..(31): n is a, c, g, or t
  misc_feature (43)..(43): n is a, c, g, or t

SEQ ID NO: 385243 - DNA, 2165 bp, Homo Sapiens; identical to SEQ ID NO: 355271
  misc_feature (1733)..(1843): n is a, c, g, or t
  misc_feature (1909)..(1965): n is a, c, g, or t
  misc_feature (2130)..(2130): n is a, c, g, or t
  misc_feature (2158)..(2158): n is a, c, g, or t

SEQ ID NO: 385244 - DNA, 1265 bp, Homo Sapiens; identical to SEQ ID NO: 355272
  misc_feature (129)..(207): n is a, c, g, or t

SEQ ID NO: 385245 - DNA, 1810 bp, Homo Sapiens; identical to SEQ ID NO: 355275
  misc_feature (819)..(884): n is a, c, g, or t
  misc_feature (1806)..(1806): n is a, c, g, or t

SEQ ID NO: 385246 - DNA, 1422 bp, Homo Sapiens; identical to SEQ ID NO: 355276

SEQ ID NO: 385247 - DNA, 2779 bp, Homo Sapiens; identical to SEQ ID NO: 355279
  misc_feature (2126)..(2171): n is a, c, g, or t
  misc_feature (2466)..(2498): n is a, c, g, or t

SEQ ID NO: 385248 - DNA, 1493 bp, Homo Sapiens; identical to SEQ ID NO: 355280
  misc_feature (153)..(153): n is a, c, g, or t
  misc_feature (181)..(181): n is a, c, g, or t
  misc_feature (216)..(216): n is a, c, g, or t
  misc_feature (231)..(282): n is a, c, g, or t

SEQ ID NO: 385249 - DNA, 1032 bp, Homo Sapiens; identical to SEQ ID NO: 355286

SEQ ID NO: 385250 - DNA, 1085 bp, Homo Sapiens; identical to SEQ ID NO: 355287

SEQ ID NO: 385251 - DNA, 826 bp, Homo Sapiens; identical to SEQ ID NO: 355288
  misc_feature (575)..(575): n is a, c, g, or t

SEQ ID NO: 385252 - DNA, 1291 bp, Homo Sapiens; identical to SEQ ID NO: 355289

SEQ ID NO: 385253 - DNA, 1010 bp, Homo Sapiens; identical to SEQ ID NO: 355290
  misc_feature (860)..(860): n is a, c, g, or t

SEQ ID NO: 385254 - DNA, 1383 bp, Homo Sapiens; identical to SEQ ID NO: 355291
  misc_feature (1012)..(1023): n is a, c, g, or t
  misc_feature (1095)..(1129): n is a, c, g, or t
  misc_feature (1195)..(1245): n is a, c, g, or t
  misc_feature (1299)..(1343): n is a, c, g, or t

SEQ ID NO: 385255 - DNA, 872 bp, Homo Sapiens; identical to SEQ ID NO: 355292
  misc_feature (63)..(63): n is a, c, g, or t

SEQ ID NO: 385256 - DNA, 1151 bp, Homo Sapiens; identical to SEQ ID NO: 355293

SEQ ID NO: 385257 - DNA, 957 bp, Homo Sapiens; identical to SEQ ID NO: 355294

SEQ ID NO: 385258 - DNA, 1144 bp, Homo Sapiens; identical to SEQ ID NO: 355295

SEQ ID NO: 385259 - DNA, 941 bp, Homo Sapiens; identical to SEQ ID NO: 355296
  misc_feature (519)..(519): n is a, c, g, or t
  misc_feature (560)..(560): n is a, c, g, or t
  misc_feature (708)..(708): n is a, c, g, or t
  misc_feature (797)..(797): n is a, c, g, or t

SEQ ID NO: 385260 - DNA, 1019 bp, Homo Sapiens; identical to SEQ ID NO: 355298
  misc_feature (89)..(180): n is a, c, g, or t

SEQ ID NO: 385261 - DNA, 857 bp, Homo Sapiens; identical to SEQ ID NO: 355299

SEQ ID NO: 385262 - DNA, 1772 bp, Homo Sapiens; identical to SEQ ID NO: 355301
  misc_feature (725)..(725): n is a, c, g, or t
  misc_feature (727)..(727): n is a, c, g, or t
  misc_feature (732)..(732): n is a, c, g, or t
  misc_feature (741)..(741): n is a, c, g, or t
  misc_feature (750)..(750): n is a, c, g, or t
  misc_feature (763)..(763): n is a, c, g, or t
  misc_feature (768)..(768): n is a, c, g, or t
  misc_feature (772)..(772): n is a, c, g, or t
  misc_feature (778)..(778): n is a, c, g, or t
  misc_feature (782)..(782): n is a, c, g, or t
  misc_feature (787)..(789): n is a, c, g, or t
  misc_feature (791)..(791): n is a, c, g, or t
  misc_feature (793)..(793): n is a, c, g, or t
  misc_feature (798)..(798): n is a, c, g, or t
  misc_feature (810)..(812): n is a, c, g, or t
  misc_feature (816)..(816): n is a, c, g, or t
  misc_feature (819)..(819): n is a, c, g, or t
  misc_feature (840)..(840): n is a, c, g, or t
  misc_feature (845)..(845): n is a, c, g, or t
  misc_feature (883)..(883): n is a, c, g, or t
  misc_feature (887)..(887): n is a, c, g, or t
  misc_feature (893)..(893): n is a, c, g, or t
  misc_feature (895)..(895): n is a, c, g, or t
  misc_feature (899)..(899): n is a, c, g, or t
  misc_feature (901)..(902): n is a, c, g, or t
  misc_feature (904)..(904): n is a, c, g, or t
  misc_feature (911)..(911): n is a, c, g, or t
  misc_feature (913)..(914): n is a, c, g, or t
  misc_feature (918)..(919): n is a, c, g, or t
  misc_feature (921)..(921): n is a, c, g, or t
  misc_feature (924)..(924): n is a, c, g, or t
  misc_feature (929)..(929): n is a, c, g, or t
  misc_feature (934)..(934): n is a, c, g, or t
  misc_feature (941)..(941): n is a, c, g, or t
  misc_feature (949)..(949): n is a, c, g, or t
  misc_feature (951)..(951): n is a, c, g, or t
  misc_feature (954)..(954): n is a, c, g, or t
  misc_feature (956)..(956): n is a, c, g, or t
  misc_feature (958)..(958): n is a, c, g, or t
  misc_feature (962)..(962): n is a, c, g, or t
  misc_feature (964)..(964): n is a, c, g, or t
  misc_feature (968)..(968): n is a, c, g, or t
  misc_feature (972)..(972): n is a, c, g, or t
  misc_feature (1007)..(1007): n is a, c, g, or t
  misc_feature (1011)..(1011): n is a, c, g, or t
  misc_feature (1035)..(1035): n is a, c, g, or t
  misc_feature (1046)..(1046): n is a, c, g, or t
  misc_feature (1062)..(1062): n is a, c, g, or t
  misc_feature (1071)..(1071): n is a, c, g, or t
  misc_feature (1124)..(1125): n is a, c, g, or t
  misc_feature (1130)..(1130): n is a, c, g, or t
  misc_feature (1132)..(1132): n is a, c, g, or t
  misc_feature (1151)..(1151): n is a, c, g, or t
  misc_feature (1154)..(1154): n is a, c, g, or t
  misc_feature (1165)..(1165): n is a, c, g, or t

SEQ ID NO: 385263 - DNA, 3196 bp, Homo Sapiens; identical to SEQ ID NO: 355302

SEQ ID NO: 385264 - DNA, 782 bp, Homo Sapiens; identical to SEQ ID NO: 355303

SEQ ID NO: 385265 - DNA, 774 bp, Homo Sapiens; identical to SEQ ID NO: 355304

SEQ ID NO: 385266 - DNA, 519 bp, Homo Sapiens; identical to SEQ ID NO: 355305
  misc_feature (468)..(468): n is a, c, g, or t

SEQ ID NO: 385267 - DNA, 799 bp, Homo Sapiens; identical to SEQ ID NO: 355306

SEQ ID NO: 385268 - DNA, 1010 bp, Homo Sapiens; identical to SEQ ID NO: 355307

SEQ ID NO: 385269 - DNA, 1229 bp, Homo Sapiens; identical to SEQ ID NO: 355311
  misc_feature (49)..(80): n is a, c, g, or t

SEQ ID NO: 385270 - DNA, 977 bp, Homo Sapiens; identical to SEQ ID NO: 355312

SEQ ID NO: 385271 - DNA, 1092 bp, Homo Sapiens; identical to SEQ ID NO: 355313
  misc_feature (13)..(13): n is a, c, g, or t
  misc_feature (34)..(35): n is a, c, g, or t
  misc_feature (741)..(741): n is a, c, g, or t
  misc_feature (966)..(966): n is a, c, g, or t
  misc_feature (980)..(980): n is a, c, g, or t
  misc_feature (1019)..(1019): n is a, c, g, or t
  misc_feature (1029)..(1029): n is a, c, g, or t
  misc_feature (1037)..(1037): n is a, c, g, or t

SEQ ID NO: 385272 - DNA, 1993 bp, Homo Sapiens; identical to SEQ ID NO: 355315
  misc_feature (97)..(159): n is a, c, g, or t
  misc_feature (704)..(704): n is a, c, g, or t

SEQ ID NO: 385273 - DNA, 923 bp, Homo Sapiens; identical to SEQ ID NO: 355316
  misc_feature (870)..(870): n is a, c, g, or t
  misc_feature (873)..(873): n is a, c, g, or t
  misc_feature (894)..(894): n is a, c, g, or t

SEQ ID NO: 385274 - DNA, 1398 bp, Homo Sapiens; identical to SEQ ID NO: 355317

SEQ ID NO: 385275 - DNA, 1062 bp, Homo Sapiens; identical to SEQ ID NO: 355318

SEQ ID NO: 385276 - DNA, 575 bp, Homo Sapiens; identical to SEQ ID NO: 355319

SEQ ID NO: 385277 - DNA, 1054 bp, Homo Sapiens; identical to SEQ ID NO: 355321

SEQ ID NO: 385278 - DNA, 1871 bp, Homo Sapiens; identical to SEQ ID NO: 355322

SEQ ID NO: 385279 - DNA, 1467 bp, Homo Sapiens; identical to SEQ ID NO: 355323

SEQ ID NO: 385280 - DNA, 659 bp, Homo Sapiens; identical to SEQ ID NO: 355324
  misc_feature (144)..(144): n is a, c, g, or t

SEQ ID NO: 385281 - DNA, 1592 bp, Homo Sapiens; identical to SEQ ID NO: 355325
  misc_feature (1337)..(1337): n is a, c, g, or t
  misc_feature (1464)..(1464): n is a, c, g, or t
  misc_feature (1470)..(1470): n is a, c, g, or t
  misc_feature (1478)..(1478): n is a, c, g, or t
  misc_feature (1495)..(1495): n is a, c, g, or t
  misc_feature (1561)..(1561): n is a, c, g, or t

SEQ ID NO: 385282 - DNA, 1673 bp, Homo Sapiens; identical to SEQ ID NO: 355326
  misc_feature (1532)..(1532): n is a, c, g, or t
  misc_feature (1554)..(1595): n is a, c, g, or t
  misc_feature (1611)..(1611): n is a, c, g, or t
  misc_feature (1616)..(1616): n is a, c, g, or t
  misc_feature (1624)..(1624): n is a, c, g, or t
  misc_feature (1654)..(1654): n is a, c, g, or t

SEQ ID NO: 385283 - DNA, 959 bp, Homo Sapiens; identical to SEQ ID NO: 355327
  misc_feature (489)..(541): n is a, c, g, or t

SEQ ID NO: 385284 - DNA, 663 bp, Homo Sapiens; identical to SEQ ID NO: 355328

SEQ ID NO: 385285 - DNA, 1308 bp, Homo Sapiens; identical to SEQ ID NO: 355329
  misc_feature (555)..(555): n is a, c, g, or t
  misc_feature (640)..(640): n is a, c, g, or t
  misc_feature (648)..(648): n is a, c, g, or t
  misc_feature (655)..(655): n is a, c, g, or t
  misc_feature (706)..(706): n is a, c, g, or t
  misc_feature (709)..(709): n is a, c, g, or t
  misc_feature (957)..(957): n is a, c, g, or t
  misc_feature (1021)..(1021): n is a, c, g, or t
  misc_feature (1085)..(1115): n is a, c, g, or t
  misc_feature (1146)..(1187): n is a, c, g, or t

SEQ ID NO: 385286 - DNA, 589 bp, Homo Sapiens; identical to SEQ ID NO: 355330

SEQ ID NO: 385287 - DNA, 1386 bp, Homo Sapiens; identical to SEQ ID NO: 355335
  misc_feature (447)..(520): n is a, c, g, or t
  misc_feature (523)..(553): n is a, c, g, or t
  misc_feature (718)..(778): n is a, c, g, or t
  misc_feature (811)..(871): n is a, c, g, or t
  misc_feature (1091)..(1120): n is a, c, g, or t
  misc_feature (1163)..(1277): n is a, c, g, or t

SEQ ID NO: 385288 - DNA, 1457 bp, Homo Sapiens; identical to SEQ ID NO: 355336

SEQ ID NO: 385289 - DNA, 1057 bp, Homo Sapiens; identical to SEQ ID NO: 355339
  misc_feature (44)..(44): n is a, c, g, or t
  misc_feature (857)..(902): n is a, c, g, or t

SEQ ID NO: 385290 - DNA, 993 bp, Homo Sapiens; identical to SEQ ID NO: 355340

SEQ ID NO: 385291 - DNA, 818 bp, Homo Sapiens; identical to SEQ ID NO: 355343
  misc_feature (71)..(71): n is a, c, g, or t
  misc_feature (85)..(85): n is a, c, g, or t
  misc_feature (108)..(108): n is a, c, g, or t

SEQ ID NO: 385292 - DNA, 1914 bp, Homo Sapiens; identical to SEQ ID NO: 355344
  misc_feature (1334)..(1410): n is a, c, g, or t
  misc_feature (1416)..(1467): n is a, c, g, or t

SEQ ID NO: 385293 - DNA, 992 bp, Homo Sapiens; identical to SEQ ID NO: 355346
  misc_feature (84)..(152): n is a, c, g, or t
  misc_feature (225)..(275): n is a, c, g, or t

SEQ ID NO: 385294 - DNA, 1820 bp, Homo Sapiens; identical to SEQ ID NO: 355347
  misc_feature (73)..(73): n is a, c, g, or t
  misc_feature (89)..(89): n is a, c, g, or t
  misc_feature (97)..(160): n is a, c, g, or t
  misc_feature (1097)..(1109): n is a, c, g, or t
  misc_feature (1555)..(1558): n is a, c, g, or t
  misc_feature (1560)..(1748): n is a, c, g, or t

SEQ ID NO: 385295 - DNA, 941 bp, Homo Sapiens; identical to SEQ ID NO: 355348
  misc_feature (56)..(100): n is a, c, g, or t
  misc_feature (104)..(139): n is a, c, g, or t

SEQ ID NO: 385296 - DNA, 1193 bp, Homo Sapiens; identical to SEQ ID NO: 355349

SEQ ID NO: 385297 - DNA, 929 bp, Homo Sapiens; identical to SEQ ID NO: 355350

SEQ ID NO: 385298 - DNA, 1394 bp, Homo Sapiens; identical to SEQ ID NO: 355351
  misc_feature (31)..(31): n is a, c, g, or t
  misc_feature (60)..(60): n is a, c, g, or t
  misc_feature (67)..(67): n is a, c, g, or t
  misc_feature (86)..(86): n is a, c, g, or t
  misc_feature (135)..(135): n is a, c, g, or t

SEQ ID NO: 385299 - DNA, 1096 bp, Homo Sapiens; identical to SEQ ID NO: 355356
  misc_feature (377)..(377): n is a, c, g, or t
  misc_feature (706)..(707): n is a, c, g, or t
  misc_feature (996)..(996): n is a, c, g, or t
  misc_feature (1012)..(1012): n is a, c, g, or t
  misc_feature (1078)..(1078): n is a, c, g, or t

SEQ ID NO: 385300 - DNA, 451 bp, Homo Sapiens; identical to SEQ ID NO: 355357
  misc_feature (15)..(15): n is a, c, g, or t
  misc_feature (88)..(88): n is a, c, g, or t

SEQ ID NO: 385301 - DNA, 372 bp, Homo Sapiens; identical to SEQ ID NO: 355358
  misc_feature (268)..(268): n is a, c, g, or t
  misc_feature (330)..(330): n is a, c, g, or t

SEQ ID NO: 385302 - DNA, 1909 bp, Homo Sapiens; identical to SEQ ID NO: 355363
  misc_feature (1704)..(1704): n is a, c, g, or t
  misc_feature (1772)..(1772): n is a, c, g, or t
  misc_feature (1818)..(1818): n is a, c, g, or t
  misc_feature (1864)..(1865): n is a, c, g, or t

SEQ ID NO: 385303 - DNA, 970 bp, Homo Sapiens; identical to SEQ ID NO: 355364

SEQ ID NO: 385304 - DNA, 1205 bp, Homo Sapiens; identical to SEQ ID NO: 355365
  misc_feature (469)..(482): n is a, c, g, or t
  misc_feature (698)..(720): n is a, c, g, or t

SEQ ID NO: 385305 - DNA, 419 bp, Homo Sapiens; identical to SEQ ID NO: 355366
  misc_feature (391)..(391): n is a, c, g, or t

SEQ ID NO: 385306 - DNA, 846 bp, Homo Sapiens; identical to SEQ ID NO: 355368
  misc_feature (512)..(550): n is a, c, g, or t

SEQ ID NO: 385307 - DNA, 844 bp, Homo Sapiens; identical to SEQ ID NO: 355369
  misc_feature (16)..(16): n is a, c, g, or t
  misc_feature (81)..(81): n is a, c, g, or t
  misc_feature (149)..(187): n is a, c, g, or t

SEQ ID NO: 385308 - DNA, 904 bp, Homo Sapiens; identical to SEQ ID NO: 355379

SEQ ID NO: 385309 - DNA, 392 bp, Homo Sapiens; identical to SEQ ID NO: 355380
  misc_feature (229)..(229): n is a, c, g, or t
  misc_feature (256)..(256): n is a, c, g, or t

SEQ ID NO: 385310 - DNA, 989 bp, Homo Sapiens; identical to SEQ ID NO: 355381
  misc_feature (36)..(36): n is a, c, g, or t
  misc_feature (47)..(47): n is a, c, g, or t
  misc_feature (179)..(179): n is a, c, g, or t

SEQ ID NO: 385311 - DNA, 234 bp, Homo Sapiens; identical to SEQ ID NO: 355389
  misc_feature (215)..(215): n is a, c, g, or t

SEQ ID NO: 385312 - DNA, 166 bp, Homo Sapiens; identical to SEQ ID NO: 355390
  misc_feature (11)..(11): n is a, c, g, or t
  misc_feature (31)..(31): n is a, c, g, or t

SEQ ID NO: 385313 - DNA, 932 bp, Homo Sapiens; identical to SEQ ID NO: 355395
  misc_feature (2)..(2): n is a, c, g, or t
  misc_feature (61)..(61): n is a, c, g, or t
  misc_feature (76)..(122): n is a, c, g, or t
  misc_feature (170)..(171): n is a, c, g, or t
  misc_feature (255)..(255): n is a, c, g, or t
  misc_feature (308)..(308): n is a, c, g, or t
  misc_feature (312)..(343): n is a, c, g, or t
  misc_feature (444)..(457): n is a, c, g, or t
  misc_feature (625)..(655): n is a, c, g, or t
  misc_feature (917)..(917): n is a, c, g, or t

SEQ ID NO: 385314 - DNA, 1342 bp, Homo Sapiens; identical to SEQ ID NO: 355396
  misc_feature (101)..(132): n is a, c, g, or t
  misc_feature (322)..(367): n is a, c, g, or t
  misc_feature (423)..(484): n is a, c, g, or t

SEQ ID NO: 385315 - DNA, 528 bp, Homo Sapiens; identical to SEQ ID NO: 355397
  misc_feature (116)..(116): n is a, c, g, or t
  misc_feature (238)..(238): n is a, c, g, or t
  misc_feature (244)..(304): n is a, c, g, or t
  misc_feature (360)..(393): n is a, c, g, or t
  misc_feature (397)..(397): n is a, c, g, or t
  misc_feature (402)..(402): n is a, c, g, or t
  misc_feature (473)..(473): n is a, c, g, or t
  misc_feature (483)..(483): n is a, c, g, or t
  misc_feature (513)..(513): n is a, c, g, or t

SEQ ID NO: 385316 - DNA, 769 bp, Homo Sapiens; identical to SEQ ID NO: 355399

SEQ ID NO: 385317 - DNA, 805 bp, Homo Sapiens; identical to SEQ ID NO: 355400

SEQ ID NO: 385318 - DNA, 2148 bp, Homo Sapiens; identical to SEQ ID NO: 355401

SEQ ID NO: 385319 - DNA, 483 bp, Homo Sapiens; identical to SEQ ID NO: 355402
  misc_feature (49)..(49): n is a, c, g, or t
  misc_feature (62)..(62): n is a, c, g, or t
  misc_feature (65)..(65): n is a, c, g, or t

SEQ ID NO: 385320 - DNA, 3051 bp, Homo Sapiens; identical to SEQ ID NO: 355405
  misc_feature (2493)..(2495): n is a, c, g, or t
  misc_feature (2499)..(2501): n is a, c, g, or t
  misc_feature (2503)..(2503): n is a, c, g, or t
  misc_feature (2512)..(2512): n is a, c, g, or t
  misc_feature (2514)..(2515): n is a, c, g, or t
  misc_feature (2517)..(2517): n is a, c, g, or t
  misc_feature (2519)..(2519): n is a, c, g, or t
  misc_feature (2523)..(2523): n is a, c, g, or t
  misc_feature (2527)..(2527): n is a, c, g, or t
  misc_feature (2530)..(2532): n is a, c, g, or t
  misc_feature (2536)..(2538): n is a, c, g, or t
  misc_feature (2540)..(2543): n is a, c, g, or t
  misc_feature (2546)..(2548): n is a, c, g, or t
  misc_feature (2550)..(2550): n is a, c, g, or t
  misc_feature (2553)..(2553): n is a, c, g, or t
  misc_feature (2595)..(2595): n is a, c, g, or t
  misc_feature (2597)..(2597): n is a, c, g, or t
  misc_feature (2599)..(2600): n is a, c, g, or t
  misc_feature (2602)..(2602): n is a, c, g, or t
  misc_feature (2612)..(2613): n is a, c, g, or t
  misc_feature (2615)..(2615): n is a, c, g, or t
  misc_feature (2629)..(2629): n is a, c, g, or t
  misc_feature (2710)..(2710): n is a, c, g, or t
  misc_feature (2715)..(2715): n is a, c, g, or t
  misc_feature (2728)..(2728): n is a, c, g, or t
  misc_feature (2739)..(2739): n is a, c, g, or t
  misc_feature (2762)..(2762): n is a, c, g, or t
  misc_feature (2775)..(2775): n is a, c, g, or t
  misc_feature (2788)..(2788): n is a, c, g, or t
  misc_feature (2792)..(2792): n is a, c, g, or t
  misc_feature (2796)..(2796): n is a, c, g, or t
  misc_feature (2804)..(2804): n is a, c, g, or t
  misc_feature (2807)..(2807): n is a, c, g, or t
  misc_feature (2809)..(2809): n is a, c, g, or t

SEQ ID NO: 385321 - DNA, 795 bp, Homo Sapiens; identical to SEQ ID NO: 355406
  misc_feature (728)..(728): n is a, c, g, or t
  misc_feature (739)..(739): n is a, c, g, or t

SEQ ID NO: 385322 - DNA, 1014 bp, Homo Sapiens; identical to SEQ ID NO: 355407
  misc_feature (18)..(18): n is a, c, g, or t
  misc_feature (78)..(78): n is a, c, g, or t

SEQ ID NO: 385323 - DNA, 1285 bp, Homo Sapiens; identical to SEQ ID NO: 355409
  misc_feature (495)..(606): n is a, c, g, or t

SEQ ID NO: 385324 - DNA, 333 bp, Homo Sapiens; identical to SEQ ID NO: 355410

SEQ ID NO: 385325 - DNA, 1544 bp, Homo Sapiens; identical to SEQ ID NO: 355416

SEQ ID NO: 385326 - DNA, 229 bp, Homo Sapiens; identical to SEQ ID NO: 355417

SEQ ID NO: 385327 - DNA, 617 bp, Homo Sapiens; identical to SEQ ID NO: 355423

SEQ ID NO: 385328 - DNA, 609 bp, Homo Sapiens; identical to SEQ ID NO: 355424

SEQ ID NO: 385329 - DNA, 885 bp, Homo Sapiens; identical to SEQ ID NO: 355430

SEQ ID NO: 385330 - DNA, 1137 bp, Homo Sapiens; identical to SEQ ID NO: 355431
  misc_feature (537)..(689): n is a, c, g, or t
  misc_feature (790)..(849): n is a, c, g, or t
  misc_feature (886)..(944): n is a, c, g, or t
  misc_feature (963)..(975): n is a, c, g, or t

SEQ ID NO: 385331 - DNA, 1056 bp, Homo Sapiens; identical to SEQ ID NO: 355433

SEQ ID NO: 385332 - DNA, 527 bp, Homo Sapiens; identical to SEQ ID NO: 355434
  misc_feature (37)..(37): n is a, c, g, or t
  misc_feature (411)..(411): n is a, c, g, or t
  misc_feature (438)..(438): n is a, c, g, or t
  misc_feature (449)..(449): n is a, c, g, or t

SEQ ID NO: 385333 - DNA, 935 bp, Homo Sapiens; identical to SEQ ID NO: 355442
  misc_feature (22)..(22): n is a, c, g, or t

SEQ ID NO: 385334 - DNA, 601 bp, Homo Sapiens; identical to SEQ ID NO: 355443
  misc_feature (352)..(352): n is a, c, g, or t

SEQ ID NO: 385335 - DNA, 652 bp, Homo Sapiens; identical to SEQ ID NO: 355448

SEQ ID NO: 385336 - DNA, 426 bp, Homo Sapiens; identical to SEQ ID NO: 355449
  misc_feature (16)..(16): n is a, c, g, or t
  misc_feature (30)..(30): n is a, c, g, or t
  misc_feature (61)..(61): n is a, c, g, or t

SEQ ID NO: 385337 - DNA, 2186 bp, Homo Sapiens; identical to SEQ ID NO: 355452
  misc_feature (1519)..(1519): n is a, c, g, or t
  misc_feature (1591)..(1591): n is a, c, g, or t
  misc_feature (1812)..(1812): n is a, c, g, or t

SEQ ID NO: 385338 - DNA, 1156 bp, Homo Sapiens; identical to SEQ ID NO: 355453

SEQ ID NO: 385339 - DNA, 367 bp, Homo Sapiens; identical to SEQ ID NO: 355454
  misc_feature (341)..(341): n is a, c, g, or t

SEQ ID NO: 385340 - DNA, 472 bp, Homo Sapiens; identical to SEQ ID NO: 355455
  misc_feature (47)..(102): n is a, c, g, or t

SEQ ID NO: 385341 - DNA, 413 bp, Homo Sapiens; identical to SEQ ID NO: 355456
  misc_feature (25)..(25): n is a, c, g, or t
  misc_feature (59)..(59): n is a, c, g, or t
  misc_feature (90)..(90): n is a, c, g, or t
  misc_feature (96)..(96): n is a, c, g, or t

SEQ ID NO: 385342 - DNA, 1128 bp, Homo Sapiens; identical to SEQ ID NO: 355457
  misc_feature (964)..(964): n is a, c, g, or t
  misc_feature (983)..(983): n is a, c, g, or t
  misc_feature (1004)..(1004): n is a, c, g, or t
  misc_feature (1024)..(1024): n is a, c, g, or t
  misc_feature (1041)..(1042): n is a, c, g, or t
  misc_feature (1050)..(1050): n is a, c, g, or t
  misc_feature (1063)..(1063): n is a, c, g, or t
  misc_feature (1073)..(1073): n is a, c, g, or t
  misc_feature (1076)..(1077): n is a, c, g, or t
  misc_feature (1081)..(1081): n is a, c, g, or t
  misc_feature (1083)..(1083): n is a, c, g, or t
  misc_feature (1086)..(1086): n is a, c, g, or t
  misc_feature (1093)..(1094): n is a, c, g, or t
  misc_feature (1108)..(1108): n is a, c, g, or t
  misc_feature (1126)..(1126): n is a, c, g, or t
  misc_feature (1128)..(1128): n is a, c, g, or t

SEQ ID NO: 385343 - DNA, 1544 bp, Homo Sapiens; identical to SEQ ID NO: 355458
  misc_feature (769)..(821): n is a, c, g, or t

SEQ ID NO: 385344 - DNA, 2167 bp, Homo Sapiens; identical to SEQ ID NO: 355462
  misc_feature (111)..(111): n is a, c, g, or t
  misc_feature (237)..(237): n is a, c, g, or t

SEQ ID NO: 385345 - DNA, 1079 bp, Homo Sapiens; identical to SEQ ID NO: 99129

SEQ ID NO: 385346 - DNA, 930 bp, Homo Sapiens; identical to SEQ ID NO: 355468
  misc_feature (223)..(223): n is a, c, g, or t

SEQ ID NO: 385347 - DNA, 385 bp, Homo Sapiens; identical to SEQ ID NO: 355469

SEQ ID NO: 385348 - DNA, 462 bp, Homo Sapiens; identical to SEQ ID NO: 355471

SEQ ID NO: 385349 - DNA, 1723 bp, Homo Sapiens; identical to SEQ ID NO: 355472
  misc_feature (1270)..(1270): n is a, c, g, or t

SEQ ID NO: 385350 - DNA, 530 bp, Homo Sapiens; identical to SEQ ID NO: 355478
  misc_feature (116)..(258): n is a, c, g, or t

SEQ ID NO: 385351 - DNA, 792 bp, Homo Sapiens; identical to SEQ ID NO: 355479
  misc_feature (80)..(271): n is a, c, g, or t

SEQ ID NO: 385352 - DNA, 298 bp, Homo Sapiens; identical to SEQ ID NO: 355484
  misc_feature (126)..(126): n is a, c, g, or t
  misc_feature (151)..(151): n is a, c, g, or t
  misc_feature (179)..(179): n is a, c, g, or t

SEQ ID NO: 385353 - DNA, 1035 bp, Homo Sapiens; identical to SEQ ID NO: 355485
  misc_feature (837)..(837): n is a, c, g, or t
  misc_feature (840)..(841): n is a, c, g, or t
  misc_feature (844)..(845): n is a, c, g, or t
  misc_feature (862)..(862): n is a, c, g, or t
  misc_feature (903)..(903): n is a, c, g, or t
  misc_feature (915)..(915): n is a, c, g, or t
  misc_feature (917)..(917): n is a, c, g, or t
  misc_feature (920)..(920): n is a, c, g, or t
  misc_feature (931)..(931): n is a, c, g, or t
  misc_feature (934)..(934): n is a, c, g, or t
  misc_feature (941)..(941): n is a, c, g, or t
  misc_feature (946)..(946): n is a, c, g, or t
  misc_feature (950)..(950): n is a, c, g, or t
  misc_feature (958)..(958): n is a, c, g, or t
  misc_feature (966)..(966): n is a, c, g, or t
  misc_feature (973)..(973): n is a, c, g, or t
  misc_feature (975)..(975): n is a, c, g, or t
  misc_feature (979)..(979): n is a, c, g, or t
  misc_feature (982)..(983): n is a, c, g, or t
  misc_feature (988)..(988): n is a, c, g, or t
  misc_feature (991)..(992): n is a, c, g, or t
  misc_feature (999)..(999): n is a, c, g, or t
  misc_feature (1003)..(1004): n is a, c, g, or t
  misc_feature (1010)..(1010): n is a, c, g, or t
  misc_feature (1020)..(1020): n is a, c, g, or t

SEQ ID NO: 385354 - DNA, 307 bp, Homo Sapiens; identical to SEQ ID NO: 355494
  misc_feature (90)..(103): n is a, c, g, or t

SEQ ID NO: 385355 - DNA, 640 bp, Homo Sapiens; identical to SEQ ID NO: 355495
  misc_feature (628)..(628): n is a, c, g, or t

SEQ ID NO: 385356 - DNA, 560 bp, Homo Sapiens; identical to SEQ ID NO: 355504
  misc_feature (505)..(505): n is a, c, g, or t

SEQ ID NO: 385357 - DNA, 1366 bp, Homo Sapiens; identical to SEQ ID NO: 355505

SEQ ID NO: 385358 - DNA, 1631 bp, Homo Sapiens; identical to SEQ ID NO: 355507

SEQ ID NO: 385359 - DNA, 447 bp, Homo Sapiens; identical to SEQ ID NO: 355508

SEQ ID NO: 385360 - DNA, 1233 bp, Homo Sapiens; identical to SEQ ID NO: 355509

SEQ ID NO: 385361 - DNA, 918 bp, Homo Sapiens; identical to SEQ ID NO: 355510

SEQ ID NO: 385362 - DNA, 665 bp, Homo Sapiens; identical to SEQ ID NO: 355523

SEQ ID NO: 385363 - DNA, 569 bp, Homo Sapiens; identical to SEQ ID NO: 355524
  misc_feature (14)..(14): n is a, c, g, or t
  misc_feature (47)..(47): n is a, c, g, or t
  misc_feature (58)..(58): n is a, c, g, or t
  misc_feature (82)..(82): n is a, c, g, or t
  misc_feature (90)..(90): n is a, c, g, or t
  misc_feature (102)..(102): n is a, c, g, or t
  misc_feature (108)..(108): n is a, c, g, or t
  misc_feature (137)..(137): n is a, c, g, or t

SEQ ID NO: 385364 - DNA, 841 bp, Homo Sapiens; identical to SEQ ID NO: 355525
  misc_feature (465)..(465): n is a, c, g, or t
  misc_feature (474)..(474): n is a, c, g, or t
  misc_feature (803)..(803): n is a, c, g, or t

SEQ ID NO: 385365 - DNA, 819 bp, Homo Sapiens; identical to SEQ ID NO: 355526

SEQ ID NO: 385366 - DNA, 1634 bp, Homo Sapiens; identical to SEQ ID NO: 355527
  misc_feature (1449)..(1585): n is a, c, g, or t

SEQ ID NO: 385367 - DNA, 476 bp, Homo Sapiens; identical to SEQ ID NO: 355528
  misc_feature (426)..(426): n is a, c, g, or t
  misc_feature (457)..(457): n is a, c, g, or t

SEQ ID NO: 385368 - DNA, 1196 bp, Homo Sapiens; identical to SEQ ID NO: 355536
  misc_feature (321)..(383): n is a, c, g, or t

SEQ ID NO: 385369 - DNA, 1144 bp, Homo Sapiens; identical to SEQ ID NO: 355537
  misc_feature (989)..(989): n is a, c, g, or t

SEQ ID NO: 385370 - DNA, 562 bp, Homo Sapiens; identical to SEQ ID NO: 355540
  misc_feature (33)..(33): n is a, c, g, or t

SEQ ID NO: 385371 - DNA, 820 bp, Homo Sapiens; identical to SEQ ID NO: 355541

SEQ ID NO: 385372 - DNA, 1089 bp, Homo Sapiens; identical to SEQ ID NO: 355547

SEQ ID NO: 385373 - DNA, 1556 bp, Homo Sapiens; identical to SEQ ID NO: 355548
  misc_feature (552)..(552): n is a, c, g, or t
  misc_feature (562)..(562): n is a, c, g, or t
  misc_feature (1199)..(1234): n is a, c, g, or t

SEQ ID NO: 385374 - DNA, 853 bp, Homo Sapiens; identical to SEQ ID NO: 355549
  misc_feature (254)..(309): n is a, c, g, or t
  misc_feature (321)..(402): n is a, c, g, or t

SEQ ID NO: 385375 - DNA, 693 bp, Homo Sapiens; identical to SEQ ID NO: 355553
  misc_feature (73)..(73): n is a, c, g, or t
  misc_feature (81)..(81): n is a, c, g, or t
  misc_feature (87)..(87): n is a, c, g, or t
  misc_feature (100)..(100): n is a, c, g, or t
  misc_feature (208)..(208): n is a, c, g, or t

SEQ ID NO: 385376 - DNA, 1015 bp, Homo Sapiens; identical to SEQ ID NO: 355554
  misc_feature (33)..(33): n is a, c, g, or t
  misc_feature (55)..(55): n is a, c, g, or t
  misc_feature (66)..(66): n is a, c, g, or t
  misc_feature (81)..(81): n is a, c, g, or t
  misc_feature (91)..(91): n is a, c, g, or t
  misc_feature (125)..(125): n is a, c, g, or t
  misc_feature (131)..(131): n is a, c, g, or t
  misc_feature (145)..(145): n is a, c, g, or t
  misc_feature (640)..(655): n is a, c, g, or t

SEQ ID NO: 385377 - DNA, 1121 bp, Homo Sapiens; identical to SEQ ID NO: 355555

SEQ ID NO: 385378 - DNA, 636 bp, Homo Sapiens; identical to SEQ ID NO: 355556
  misc_feature (14)..(14): n is a, c, g, or t
  misc_feature (412)..(567): n is a, c, g, or t
  misc_feature (580)..(593): n is a, c, g, or t

SEQ ID NO: 385379 - DNA, 2016 bp, Homo Sapiens; identical to SEQ ID NO: 355564
  misc_feature (882)..(918): n is a, c, g, or t
  misc_feature (1084)..(1084): n is a, c, g, or t
  misc_feature (1360)..(1360): n is a, c, g, or t
  misc_feature (1362)..(1362): n is a, c, g, or t
  misc_feature (1369)..(1369): n is a, c, g, or t
  misc_feature (1374)..(1374): n is a, c, g, or t

SEQ ID NO: 385380 - DNA, 588 bp, Homo Sapiens; identical to SEQ ID NO: 355565
  misc_feature (543)..(543): n is a, c, g, or t

SEQ ID NO: 385381 - DNA, 1300 bp, Homo Sapiens; identical to SEQ ID NO: 355566
  misc_feature (693)..(707): n is a, c, g, or t
  misc_feature (854)..(949): n is a, c, g, or t

SEQ ID NO: 385382 - DNA, 452 bp, Homo Sapiens; identical to SEQ ID NO: 355567
  misc_feature (46)..(46): n is a, c, g, or t

SEQ ID NO: 385383 - DNA, 720 bp, Homo Sapiens; identical to SEQ ID NO: 355568

SEQ ID NO: 385384 - DNA, 1527 bp, Homo Sapiens; identical to SEQ ID NO: 355569
  misc_feature (858)..(914): n is a, c, g, or t
  misc_feature (1143)..(1143): n is a, c, g, or t
  misc_feature (1156)..(1156): n is a, c, g, or t
  misc_feature (1160)..(1160): n is a, c, g, or t
  misc_feature (1272)..(1272): n is a, c, g, or t
  misc_feature (1402)..(1402): n is a, c, g, or t

SEQ ID NO: 385385 - DNA, 3064 bp, Homo Sapiens; identical to SEQ ID NO: 355585
  misc_feature (1957)..(2007): n is a, c, g, or t
  misc_feature (2012)..(2012): n is a, c, g, or t
  misc_feature (2062)..(2062): n is a, c, g, or t
  misc_feature (2778)..(2780): n is a, c, g, or t
  misc_feature (2792)..(2792): n is a, c, g, or t
  misc_feature (2799)..(2799): n is a, c, g, or t
  misc_feature (2807)..(2807): n is a, c, g, or t
  misc_feature (2809)..(2809): n is a, c, g, or t
  misc_feature (2860)..(2869): n is a, c, g, or t
  misc_feature (2872)..(2872): n is a, c, g, or t
  misc_feature (2877)..(2877): n is a, c, g, or t
  misc_feature (2900)..(2900): n is a, c, g, or t
  misc_feature (2904)..(2909): n is a, c, g, or t
  misc_feature (2911)..(2912): n is a, c, g, or t

SEQ ID NO: 385386 - DNA, 1087 bp, Homo Sapiens; identical to SEQ ID NO: 355586
  misc_feature (42)..(78): n is a, c, g, or t
  misc_feature (1020)..(1020): n is a, c, g, or t
  misc_feature (1032)..(1032): n is a, c, g, or t
  misc_feature (1044)..(1044): n is a, c, g, or t

SEQ ID NO: 385387 - DNA, 425 bp, Homo Sapiens; identical to SEQ ID NO: 355587
  misc_feature (363)..(372): n is a, c, g, or t

SEQ ID NO: 385388 - DNA, 1191 bp, Homo Sapiens; identical to SEQ ID NO: 355594
  misc_feature (24)..(24): n is a, c, g, or t
  misc_feature (43)..(43): n is a, c, g, or t
  misc_feature (336)..(336): n is a, c, g, or t

SEQ ID NO: 385389 - DNA, 517 bp, Homo Sapiens; identical to SEQ ID NO: 355595
  misc_feature (22)..(22): n is a, c, g, or t
  misc_feature (35)..(35): n is a, c, g, or t
  misc_feature (471)..(471): n is a, c, g, or t

SEQ ID NO: 385390 - DNA, 909 bp, Homo Sapiens; identical to SEQ ID NO: 355596

SEQ ID NO: 385391 - DNA, 1067 bp, Homo Sapiens; identical to SEQ ID NO: 355597

SEQ ID NO: 385392 - DNA, 754 bp, Homo Sapiens; identical to SEQ ID NO: 355600
  misc_feature (85)..(119): n is a, c, g, or t
  misc_feature (319)..(319): n is a, c, g, or t

SEQ ID NO: 385393 - DNA, 1675 bp, Homo Sapiens; identical to SEQ ID NO: 355601
  misc_feature (998)..(1016): n is a, c, g, or t
  misc_feature (1574)..(1608): n is a, c, g, or t

SEQ ID NO: 385394 - DNA, 1099 bp, Homo Sapiens; identical to SEQ ID NO: 355602
  misc_feature (987)..(1010): n is a, c, g, or t

SEQ ID NO: 385395 - DNA, 616 bp, Homo Sapiens; identical to SEQ ID NO: 355603
  misc_feature (92)..(126): n is a, c, g, or t
  misc_feature (572)..(572): n is a, c, g, or t
  misc_feature (582)..(582): n is a, c, g, or t

SEQ ID NO: 385396 - DNA, 883 bp, Homo Sapiens; identical to SEQ ID NO: 355611

SEQ ID NO: 385397 - DNA, 1001 bp, Homo Sapiens; identical to SEQ ID NO: 355612
  misc_feature (634)..(634): n is a, c, g, or t
  misc_feature (697)..(707): n is a, c, g, or t
  misc_feature (731)..(766): n is a, c, g, or t
  misc_feature (803)..(803): n is a, c, g, or t

SEQ ID NO: 385398 - DNA, 2516 bp, Homo Sapiens; identical to SEQ ID NO: 355613
  misc_feature (919)..(919): n is a, c, g, or t
  misc_feature (1599)..(1626): n is a, c, g, or t
  misc_feature (2188)..(2188): n is a, c, g, or t

SEQ ID NO: 385399 - DNA, 2710 bp, Homo Sapiens; identical to SEQ ID NO: 355616
  misc_feature (2550)..(2598): n is a, c, g, or t

SEQ ID NO: 385400 - DNA, 152 bp, Homo Sapiens; identical to SEQ ID NO: 355617

SEQ ID NO: 385401 - DNA, 2266 bp, Homo Sapiens; identical to SEQ ID NO: 355619
  misc_feature (232)..(232): n is a, c, g, or t
  misc_feature (798)..(810): n is a, c, g, or t
  misc_feature (1774)..(1865): n is a, c, g, or t
  misc_feature (2061)..(2073): n is a, c, g, or t

SEQ ID NO: 385402 - DNA, 2885 bp, Homo Sapiens; identical to SEQ ID NO: 355620
  misc_feature (2657)..(2669): n is a, c, g, or t

SEQ ID NO: 385403 - DNA, 1914 bp, Homo Sapiens; identical to SEQ ID NO: 355622
  misc_feature (1284)..(1336): n is a, c, g, or t

SEQ ID NO: 385404 - DNA, 1070 bp, Homo Sapiens; identical to SEQ ID NO: 355623
  misc_feature (461)..(513): n is a, c, g, or t

SEQ ID NO: 385405 - DNA, 1120 bp, Homo Sapiens; identical to SEQ ID NO: 355624

SEQ ID NO: 385406 - DNA, 1488 bp, Homo Sapiens; identical to SEQ ID NO: 355625
  misc_feature (18)..(18): n is a, c, g, or t
  misc_feature (20)..(20): n is a, c, g, or t
  misc_feature (23)..(23): n is a, c, g, or t
  misc_feature (342)..(342): n is a, c, g, or t
  misc_feature (1042)..(1092): n is a, c, g, or t
  misc_feature (1187)..(1226): n is a, c, g, or t
  misc_feature (1317)..(1317): n is a, c, g, or t
  misc_feature (1319)..(1319): n is a, c, g, or t
  misc_feature (1376)..(1376): n is a, c, g, or t
  misc_feature (1429)..(1429): n is a, c, g, or t
  misc_feature (1486)..(1486): n is a, c, g, or t

SEQ ID NO: 385407 - DNA, 490 bp, Homo Sapiens; identical to SEQ ID NO: 355626
  misc_feature (341)..(407): n is a, c, g, or t

SEQ ID NO: 385408 - DNA, 1045 bp, Homo Sapiens; identical to SEQ ID NO: 355628
  misc_feature (543)..(543): n is a, c, g, or t
  misc_feature (550)..(550): n is a, c, g, or t
  misc_feature (976)..(976): n is a, c, g, or t
  misc_feature (979)..(979): n is a, c, g, or t
  misc_feature (982)..(983): n is a, c, g, or t
  misc_feature (989)..(989): n is a, c, g, or t
  misc_feature (1003)..(1003): n is a, c, g, or t
  misc_feature (1007)..(1007): n is a, c, g, or t
  misc_feature (1020)..(1020): n is a, c, g, or t
  misc_feature (1027)..(1027): n is a, c, g, or t
  misc_feature (1036)..(1036): n is a, c, g, or t

SEQ ID NO: 385409 - DNA, 1059 bp, Homo Sapiens; identical to SEQ ID NO: 355629
  misc_feature (784)..(784): n is a, c, g, or t
  misc_feature (885)..(887): n is a, c, g, or t
  misc_feature (924)..(924): n is a, c, g, or t
  misc_feature (933)..(933): n is a, c, g, or t
  misc_feature (938)..(938): n is a, c, g, or t
  misc_feature (945)..(945): n is a, c, g, or t
  misc_feature (947)..(947): n is a, c, g, or t
  misc_feature (953)..(953): n is a, c, g, or t
  misc_feature (956)..(956): n is a, c, g, or t
  misc_feature (958)..(958): n is a, c, g, or t
  misc_feature (977)..(977): n is a, c, g, or t
  misc_feature (983)..(983): n is a, c, g, or t
  misc_feature (986)..(986): n is a, c, g, or t
  misc_feature (992)..(992): n is a, c, g, or t
  misc_feature (994)..(994): n is a, c, g, or t
  misc_feature (1001)..(1001): n is a, c, g, or t
  misc_feature (1011)..(1011): n is a, c, g, or t
  misc_feature (1017)..(1017): n is a, c, g, or t
  misc_feature (1021)..(1021): n is a, c, g, or t
  misc_feature (1023)..(1023): n is a, c, g, or t
  misc_feature (1027)..(1027): n is a, c, g, or t
  misc_feature (1031)..(1031): n is a, c, g, or t
  misc_feature (1044)..(1044): n is a, c, g, or t
  misc_feature (1047)..(1047): n is a, c, g, or t

SEQ ID NO: 385410 - DNA, 1087 bp, Homo Sapiens; identical to SEQ ID NO: 355630
  misc_feature (956)..(956): n is a, c, g, or t
  misc_feature (990)..(990): n is a, c, g, or t
  misc_feature (994)..(994): n is a, c, g, or t
  misc_feature (1000)..(1000): n is a, c, g, or t
  misc_feature (1010)..(1010): n is a, c, g, or t
  misc_feature (1013)..(1013): n is a, c, g, or t
  misc_feature (1018)..(1018): n is a, c, g, or t
  misc_feature (1022)..(1025): n is a, c, g, or t
  misc_feature (1029)..(1029): n is a, c, g, or t
  misc_feature (1031)..(1031): n is a, c, g, or t
  misc_feature (1037)..(1038): n is a, c, g, or t
  misc_feature (1045)..(1045): n is a, c, g, or t
  misc_feature (1051)..(1051): n is a, c, g, or t
  misc_feature (1056)..(1056): n is a, c, g, or t
  misc_feature (1061)..(1061): n is a, c, g, or t
  misc_feature (1063)..(1063): n is a, c, g, or t
  misc_feature (1066)..(1068): n is a, c, g, or t
  misc_feature (1076)..(1077): n is a, c, g, or t
  misc_feature (1082)..(1082): n is a, c, g, or t

SEQ ID NO: 385411 - DNA, 2182 bp, Homo Sapiens; identical to SEQ ID NO: 355631

SEQ ID NO: 385412 - DNA, 502 bp, Homo Sapiens; identical to SEQ ID NO: 355632

SEQ ID NO: 385413 - DNA, 2028 bp, Homo Sapiens; identical to SEQ ID NO: 355633
  misc_feature (2001)..(2001): n is a, c, g, or t

SEQ ID NO: 385414 - DNA, 1152 bp, Homo Sapiens; identical to SEQ ID NO: 355634
  misc_feature (1133)..(1133): n is a, c, g, or t

SEQ ID NO: 385415 - DNA, 1487 bp, Homo Sapiens; identical to SEQ ID NO: 355637

SEQ ID NO: 385416 - DNA, 1963 bp, Homo Sapiens; identical to SEQ ID NO: 355638
  misc_feature (1302)..(1302): n is a, c, g, or t
  misc_feature (1308)..(1308): n is a, c, g, or t
  misc_feature (1354)..(1354): n is a, c, g, or t
  misc_feature (1361)..(1361): n is a, c, g, or t
  misc_feature (1709)..(1709): n is a, c, g, or t
  misc_feature (1752)..(1752): n is a, c, g, or t

SEQ ID NO: 385417 - DNA, 1808 bp, Homo Sapiens; identical to SEQ ID NO: 355639
  misc_feature (64)..(104): n is a, c, g, or t
  misc_feature (1781)..(1781): n is a, c, g, or t
  misc_feature (1784)..(1784): n is a, c, g, or t
  misc_feature (1788)..(1788): n is a, c, g, or t

SEQ ID NO: 385418 - DNA, 936 bp, Homo Sapiens; identical to SEQ ID NO: 355640
  misc_feature (51)..(51): n is a, c, g, or t
  misc_feature (118)..(118): n is a, c, g, or t
  misc_feature (193)..(208): n is a, c, g, or t
  misc_feature (211)..(211): n is a, c, g, or t

SEQ ID NO: 385419 - DNA, 1120 bp, Homo Sapiens; identical to SEQ ID NO: 355641
  misc_feature (288)..(316): n is a, c, g, or t

SEQ ID NO: 385420 - DNA, 1675 bp, Homo Sapiens; identical to SEQ ID NO: 355642

SEQ ID NO: 385421 - DNA, 1130 bp, Homo Sapiens; identical to SEQ ID NO: 355643
  misc_feature (166)..(166): n is a, c, g, or t

SEQ ID NO: 385422 - DNA, 1382 bp, Homo Sapiens; identical to SEQ ID NO: 355645
  misc_feature (104)..(104): n is a, c, g, or t
  misc_feature (385)..(445): n is a, c, g, or t
  misc_feature (481)..(563): n is a, c, g, or t
  misc_feature (1240)..(1240): n is a, c, g, or t
  misc_feature (1271)..(1283): n is a, c, g, or t

SEQ ID NO: 385423 - DNA, 1317 bp, Homo Sapiens; identical to SEQ ID NO: 355646
  misc_feature (199)..(239): n is a, c, g, or t
  misc_feature (290)..(301): n is a, c, g, or t
  misc_feature (513)..(720): n is a, c, g, or t
  misc_feature (728)..(827): n is a, c, g, or t
  misc_feature (860)..(901): n is a, c, g, or t
  misc_feature (931)..(940): n is a, c, g, or t
  misc_feature (1023)..(1037): n is a, c, g, or t
  misc_feature (1116)..(1124): n is a, c, g, or t
  misc_feature (1164)..(1190): n is a, c, g, or t

SEQ ID NO: 385424 - DNA, 1070 bp, Homo Sapiens; identical to SEQ ID NO: 355647
  misc_feature (97)..(163): n is a, c, g, or t
  misc_feature (781)..(821): n is a, c, g, or t
  misc_feature (872)..(884): n is a, c, g, or t

SEQ ID NO: 385425 - DNA, 2187 bp, Homo Sapiens; identical to SEQ ID NO: 355651
  misc_feature (47)..(83): n is a, c, g, or t
  misc_feature (1781)..(1781): n is a, c, g, or t
  misc_feature (1786)..(1786): n is a, c, g, or t
  misc_feature (1842)..(1842): n is a, c, g, or t
  misc_feature (1859)..(1859): n is a, c, g, or t
  misc_feature (1864)..(1864): n is a, c, g, or t
  misc_feature (1873)..(1873): n is a, c, g, or t
  misc_feature (1952)..(1952): n is a, c, g, or t
  misc_feature (2118)..(2118): n is a, c, g, or t
  misc_feature (2185)..(2185): n is a, c, g, or t

SEQ ID NO: 385426 - DNA, 514 bp, Homo Sapiens; identical to SEQ ID NO: 355652

SEQ ID NO: 385427 - DNA, 912 bp, Homo Sapiens; identical to SEQ ID NO: 355653
  misc_feature (152)..(152): n is a, c, g, or t

SEQ ID NO: 385428 - DNA, 396 bp, Homo Sapiens; identical to SEQ ID NO: 355654

SEQ ID NO: 385429 - DNA, 2609 bp, Homo Sapiens; identical to SEQ ID NO: 355655
  misc_feature (15)..(15): n is a, c, g, or t
  misc_feature (2070)..(2105): n is a, c, g, or t
  misc_feature (2407)..(2454): n is a, c, g, or t
  misc_feature (2470)..(2489): n is a, c, g, or t

SEQ ID NO: 385430 - DNA, 1016 bp, Homo Sapiens; identical to SEQ ID NO: 355656

SEQ ID NO: 385431 - DNA, 1633 bp, Homo Sapiens; identical to SEQ ID NO: 355658

SEQ ID NO: 385432 - DNA, 471 bp, Homo Sapiens; identical to SEQ ID NO: 355659
  misc_feature (407)..(407): n is a, c, g, or t
  misc_feature (432)..(432): n is a, c, g, or t
  misc_feature (449)..(449): n is a, c, g, or t
  misc_feature (456)..(456): n is a, c, g, or t

SEQ ID NO: 385433 - DNA, 1944 bp, Homo Sapiens; identical to SEQ ID NO: 355661
  misc_feature (23)..(23): n is a, c, g, or t
  misc_feature (33)..(33): n is a, c, g, or t
  misc_feature (44)..(44): n is a, c, g, or t
  misc_feature (46)..(46): n is a, c, g, or t
  misc_feature (61)..(61): n is a, c, g, or t
  misc_feature (89)..(89): n is a, c, g, or t
  misc_feature (229)..(229): n is a, c, g, or t
  misc_feature (263)..(263): n is a, c, g, or t
  misc_feature (299)..(299): n is a, c, g, or t
  misc_feature (306)..(306): n is a, c, g, or t
  misc_feature (309)..(309): n is a, c, g, or t
  misc_feature (313)..(314): n is a, c, g, or t
  misc_feature (318)..(318): n is a, c, g, or t
  misc_feature (324)..(324): n is a, c, g, or t
  misc_feature (332)..(332): n is a, c, g, or t

SEQ ID NO: 385434 - DNA, 1359 bp, Homo Sapiens; identical to SEQ ID NO: 355662
  misc_feature (47)..(83): n is a, c, g, or t

SEQ ID NO: 385435 - DNA, 775 bp, Homo Sapiens; identical to SEQ ID NO: 355663
  misc_feature (15)..(15): n is a, c, g, or t
  misc_feature (44)..(44): n is a, c, g, or t

SEQ ID NO: 385436 - DNA, 1871 bp, Homo Sapiens; identical to SEQ ID NO: 355681

SEQ ID NO: 385437 - DNA, 862 bp, Homo Sapiens; identical to SEQ ID NO: 355682

SEQ ID NO: 385438 - DNA, 1113 bp, Homo Sapiens; identical to SEQ ID NO: 355683
  misc_feature (5)..(5): n is a, c, g, or t
  misc_feature (8)..(8): n is a, c, g, or t
  misc_feature (11)..(11): n is a, c, g, or t
  misc_feature (17)..(17): n is a, c, g, or t
  misc_feature (29)..(29): n is a, c, g, or t
  misc_feature (34)..(34): n is a, c, g, or t
  misc_feature (39)..(39): n is a, c, g, or t
  misc_feature (46)..(46): n is a, c, g, or t
  misc_feature (55)..(55): n is a, c, g, or t
  misc_feature (109)..(109): n is a, c, g, or t

SEQ ID NO: 385439 - DNA, 2150 bp, Homo Sapiens; identical to SEQ ID NO: 355684

SEQ ID NO: 385440 - DNA, 1442 bp, Homo Sapiens; identical to SEQ ID NO: 355685
  misc_feature (615)..(615): n is a, c, g, or t
  misc_feature (712)..(712): n is a, c, g, or t
  misc_feature (734)..(734): n is a, c, g, or t
  misc_feature (830)..(830): n is a, c, g, or t
  misc_feature (928)..(928): n is a, c, g, or t

SEQ ID NO: 385441 - DNA, 1198 bp, Homo Sapiens; identical to SEQ ID NO: 355686
  misc_feature (73)..(73): n is a, c, g, or t
  misc_feature (255)..(255): n is a, c, g, or t

SEQ ID NO: 385442 - DNA, 770 bp, Homo Sapiens; identical to SEQ ID NO: 355687
  misc_feature (146)..(157): n is a, c, g, or t
  misc_feature (572)..(582): n is a, c, g, or t
  misc_feature (584)..(594): n is a, c, g, or t

SEQ ID NO: 385443 - DNA, 648 bp, Homo Sapiens; identical to SEQ ID NO: 355688

SEQ ID NO: 385444 - DNA, 1029 bp, Homo Sapiens; identical to SEQ ID NO: 355689
  misc_feature (10)..(10): n is a, c, g, or t
  misc_feature (18)..(18): n is a, c, g, or t
  misc_feature (22)..(22): n is a, c, g, or t
  misc_feature (29)..(29): n is a, c, g, or t
  misc_feature (33)..(33): n is a, c, g, or t
  misc_feature (36)..(36): n is a, c, g, or t
  misc_feature (40)..(40): n is a, c, g, or t
  misc_feature (47)..(48): n is a, c, g, or t
  misc_feature (60)..(60): n is a, c, g, or t
  misc_feature (69)..(69): n is a, c, g, or t
  misc_feature (76)..(76): n is a, c, g, or t
  misc_feature (78)..(79): n is a, c, g, or t
  misc_feature (86)..(86): n is a, c, g, or t
  misc_feature (95)..(95): n is a, c, g, or t
  misc_feature (103)..(103): n is a, c, g, or t
  misc_feature (108)..(108): n is a, c, g, or t
  misc_feature (110)..(212): n is a, c, g, or t
  misc_feature (229)..(229): n is a, c, g, or t
  misc_feature (234)..(234): n is a, c, g, or t
  misc_feature (236)..(237): n is a, c, g, or t
  misc_feature (250)..(250): n is a, c, g, or t

SEQ ID NO: 385445 - DNA, 2012 bp, Homo Sapiens; identical to SEQ ID NO: 355690
  misc_feature (1959)..(1959): n is a, c, g, or t

SEQ ID NO: 385446 - DNA, 638 bp, Homo Sapiens; identical to SEQ ID NO: 355691
  misc_feature (460)..(461): n is a, c, g, or t
  misc_feature (480)..(481): n is a, c, g, or t

SEQ ID NO: 385447 - DNA, 1143 bp, Homo Sapiens; identical to SEQ ID NO: 355692
  misc_feature (42)..(52): n is a, c, g, or t
  misc_feature (312)..(323): n is a, c, g, or t
  misc_feature (584)..(627): n is a, c, g, or t

SEQ ID NO: 385448 - DNA, 2187 bp, Homo Sapiens; identical to SEQ ID NO: 355694
  misc_feature (143)..(143): n is a, c, g, or t
  misc_feature (190)..(190): n is a, c, g, or t
  misc_feature (197)..(197): n is a, c, g, or t
  misc_feature (220)..(220): n is a, c, g, or t
  misc_feature (356)..(356): n is a, c, g, or t
  misc_feature (371)..(371): n is a, c, g, or t
  misc_feature (416)..(471): n is a, c, g, or t
  misc_feature (474)..(474): n is a, c, g, or t
  misc_feature (491)..(491): n is a, c, g, or t
  misc_feature (494)..(494): n is a, c, g, or t
  misc_feature (500)..(500): n is a, c, g, or t
  misc_feature (503)..(503): n is a, c, g, or t
  misc_feature (507)..(507): n is a, c, g, or t
  misc_feature (518)..(518): n is a, c, g, or t
  misc_feature (521)..(521): n is a, c, g, or t
  misc_feature (526)..(527): n is a, c, g, or t
  misc_feature (540)..(541): n is a, c, g, or t
  misc_feature (578)..(578): n is a, c, g, or t

SEQ ID NO: 385449 - DNA, 810 bp, Homo Sapiens; identical to SEQ ID NO: 355695

SEQ ID NO: 385450 - DNA, 1740 bp, Homo Sapiens; identical to SEQ ID NO: 355703
  misc_feature (5)..(5): n is a, c, g, or t
  misc_feature (60)..(60): n is a, c, g, or t
  misc_feature (104)..(104): n is a, c, g, or t
  misc_feature (787)..(787): n is a, c, g, or t
  misc_feature (1663)..(1700): n is a, c, g, or t

SEQ ID NO: 385451 - DNA, 1469 bp, Homo Sapiens; identical to SEQ ID NO: 355704
  misc_feature (1042)..(1082): n is a, c, g, or t

SEQ ID NO: 385452 - DNA, 1848 bp, Homo Sapiens; identical to SEQ ID NO: 355705

SEQ ID NO: 385453 - DNA, 519 bp, Homo Sapiens; identical to SEQ ID NO: 355706
  misc_feature (495)..(495): n is a, c, g, or t

SEQ ID NO: 385454 - DNA, 586 bp, Homo Sapiens; identical to SEQ ID NO: 355707

SEQ ID NO: 385455 - DNA, 536 bp, Homo Sapiens; identical to SEQ ID NO: 355708
  misc_feature (502)..(502): n is a, c, g, or t
  misc_feature (509)..(509): n is a, c, g, or t

SEQ ID NO: 385456 - DNA, 1292 bp, Homo Sapiens; identical to SEQ ID NO: 355715
  misc_feature (64)..(64): n is a, c, g, or t
  misc_feature (565)..(565): n is a, c, g, or t
  misc_feature (585)..(585): n is a, c, g, or t
  misc_feature (623)..(624): n is a, c, g, or t
  misc_feature (675)..(712): n is a, c, g, or t

SEQ ID NO: 385457 - DNA, 811 bp, Homo Sapiens; identical to SEQ ID NO: 355716
  misc_feature (529)..(529): n is a, c, g, or t
  misc_feature (569)..(569): n is a, c, g, or t
  misc_feature (574)..(574): n is a, c, g, or t
  misc_feature (775)..(775): n is a, c, g, or t

SEQ ID NO: 385458 - DNA, 1105 bp, Homo Sapiens; identical to SEQ ID NO: 355717
  misc_feature (725)..(765): n is a, c, g, or t
  misc_feature (868)..(868): n is a, c, g, or t
  misc_feature (1052)..(1061): n is a, c, g, or t

SEQ ID NO: 385459 - DNA, 956 bp, Homo Sapiens; identical to SEQ ID NO: 355718
  misc_feature (866)..(866): n is a, c, g, or t
  misc_feature (879)..(879): n is a, c, g, or t
  misc_feature (929)..(929): n is a, c, g, or t
  misc_feature (953)..(953): n is a, c, g, or t

SEQ ID NO: 385460 - DNA, 807 bp, Homo Sapiens; identical to SEQ ID NO: 355719

SEQ ID NO: 385461 - DNA, 853 bp, Homo Sapiens; identical to SEQ ID NO: 355724
  misc_feature (97)..(148): n is a, c, g, or t
  misc_feature (530)..(530): n is a, c, g, or t
  misc_feature (553)..(553): n is a, c, g, or t
  misc_feature (555)..(555): n is a, c, g, or t
  misc_feature (674)..(674): n is a, c, g, or t
  misc_feature (685)..(685): n is a, c, g, or t
  misc_feature (691)..(691): n is a, c, g, or t
  misc_feature (704)..(705): n is a, c, g, or t
  misc_feature (714)..(715): n is a, c, g, or t
  misc_feature (717)..(717): n is a, c, g, or t
  misc_feature (721)..(721): n is a, c, g, or t
  misc_feature (724)..(727): n is a, c, g, or t
  misc_feature (776)..(776): n is a, c, g, or t
  misc_feature (785)..(785): n is a, c, g, or t
  misc_feature (790)..(790): n is a, c, g, or t
  misc_feature (793)..(793): n is a, c, g, or t
  misc_feature (795)..(795): n is a, c, g, or t
  misc_feature (798)..(798): n is a, c, g, or t
  misc_feature (800)..(801): n is a, c, g, or t
  misc_feature (804)..(804): n is a, c, g, or t
  misc_feature (816)..(816): n is a, c, g, or t

SEQ ID NO: 385462 - DNA, 2595 bp, Homo Sapiens; identical to SEQ ID NO: 355725
  misc_feature (52)..(88): n is a, c, g, or t
  misc_feature (2128)..(2128): n is a, c, g, or t
  misc_feature (2140)..(2140): n is a, c, g, or t
  misc_feature (2578)..(2578): n is a, c, g, or t

SEQ ID NO: 385463 - DNA, 930 bp, Homo Sapiens; identical to SEQ ID NO: 355727
  misc_feature (917)..(917): n is a, c, g, or t

SEQ ID NO: 385464 - DNA, 3301 bp, Homo Sapiens; identical to SEQ ID NO: 355728

SEQ ID NO: 385465 - DNA, 912 bp, Homo Sapiens; identical to SEQ ID NO: 355729

SEQ ID NO: 385466 - DNA, 1205 bp, Homo Sapiens; identical to SEQ ID NO: 355730

SEQ ID NO: 385467 - DNA, 880 bp, Homo Sapiens; identical to SEQ ID NO: 355731
  misc_feature (650)..(650): n is a, c, g, or t
  misc_feature (657)..(657): n is a, c, g, or t

SEQ ID NO: 385468 - DNA, 827 bp, Homo Sapiens; identical to SEQ ID NO: 355732

SEQ ID NO: 385469 - DNA, 936 bp, Homo Sapiens; identical to SEQ ID NO: 355733

SEQ ID NO: 385470 - DNA, 917 bp, Homo Sapiens; identical to SEQ ID NO: 355734

SEQ ID NO: 385471 - DNA, 1027 bp, Homo Sapiens; identical to SEQ ID NO: 355735
  misc_feature (6)..(6): n is a, c, g, or t
  misc_feature (14)..(14): n is a, c, g, or t
  misc_feature (19)..(19): n is a, c, g, or t
  misc_feature (38)..(39): n is a, c, g, or t
  misc_feature (46)..(46): n is a, c, g, or t
  misc_feature (50)..(50): n is a, c, g, or t
  misc_feature (57)..(57): n is a, c, g, or t
  misc_feature (72)..(72): n is a, c, g, or t
  misc_feature (77)..(77): n is a, c, g, or t
  misc_feature (81)..(81): n is a, c, g, or t
  misc_feature (86)..(86): n is a, c, g, or t
  misc_feature (96)..(96): n is a, c, g, or t
  misc_feature (102)..(102): n is a, c, g, or t
  misc_feature (108)..(108): n is a, c, g, or t
  misc_feature (111)..(121): n is a, c, g, or t
  misc_feature (123)..(123): n is a, c, g, or t
  misc_feature (125)..(125): n is a, c, g, or t
  misc_feature (127)..(127): n is a, c, g, or t
  misc_feature (130)..(132): n is a, c, g, or t
  misc_feature (136)..(136): n is a, c, g, or t
  misc_feature (139)..(139): n is a, c, g, or t
  misc_feature (144)..(146): n is a, c, g, or t
  misc_feature (150)..(150): n is a, c, g, or t
  misc_feature (176)..(176): n is a, c, g, or t
  misc_feature (185)..(185): n is a, c, g, or t
  misc_feature (189)..(189): n is a, c, g, or t
  misc_feature (202)..(202): n is a, c, g, or t
  misc_feature (232)..(232): n is a, c, g, or t
  misc_feature (247)..(247): n is a, c, g, or t
  misc_feature (264)..(264): n is a, c, g, or t
  misc_feature (270)..(271): n is a, c, g, or t
  misc_feature (273)..(273): n is a, c, g, or t
  misc_feature (275)..(276): n is a, c, g, or t
  misc_feature (279)..(279): n is a, c, g, or t
  misc_feature (295)..(295): n is a, c, g, or t
  misc_feature (298)..(299): n is a, c, g, or t
  misc_feature (303)..(303): n is a, c, g, or t
  misc_feature (308)..(308): n is a, c, g, or t
  misc_feature (317)..(317): n is a, c, g, or t
  misc_feature (331)..(331): n is a, c, g, or t
  misc_feature (336)..(336): n is a, c, g, or t
  misc_feature (338)..(338): n is a, c, g, or t
  misc_feature (351)..(352): n is a, c, g, or t
  misc_feature (358)..(358): n is a, c, g, or t
  misc_feature (361)..(361): n is a, c, g, or t
  misc_feature (365)..(377): n is a, c, g, or t

SEQ ID NO: 385472 - DNA, 1644 bp, Homo Sapiens; identical to SEQ ID NO: 355736
  misc_feature (1030)..(1030): n is a, c, g, or t
  misc_feature (1034)..(1034): n is a, c, g, or t
  misc_feature (1039)..(1040): n is a, c, g, or t

SEQ ID NO: 385473 - DNA, 1815 bp, Homo Sapiens; identical to SEQ ID NO: 355743
  misc_feature (991)..(991): n is a, c, g, or t
  misc_feature (1180)..(1180): n is a, c, g, or t
  misc_feature (1337)..(1468): n is a, c, g, or t
  misc_feature (1680)..(1689): n is a, c, g, or t
  misc_feature (1734)..(1734): n is a, c, g, or t
  misc_feature (1767)..(1769): n is a, c, g, or t
  misc_feature (1771)..(1771): n is a, c, g, or t
  misc_feature (1773)..(1773): n is a, c, g, or t
  misc_feature (1775)..(1775): n is a, c, g, or t
  misc_feature (1798)..(1798): n is a, c, g, or t

SEQ ID NO: 385474 - DNA, 626 bp, Homo Sapiens; identical to SEQ ID NO: 355744

SEQ ID NO: 385475 - DNA, 1759 bp, Homo Sapiens; identical to SEQ ID NO: 355745
  misc_feature (82)..(113): n is a, c, g, or t

SEQ ID NO: 385476 - DNA, 347 bp, Homo Sapiens; identical to SEQ ID NO: 355751

SEQ ID NO: 385477 - DNA, 2461 bp, Homo Sapiens; identical to SEQ ID NO: 355752
  misc_feature (1837)..(1899): n is a, c, g, or t

SEQ ID NO: 385478 - DNA, 1533 bp, Homo Sapiens; identical to SEQ ID NO: 355755
  misc_feature (1268)..(1298): n is a, c, g, or t

SEQ ID NO: 385479 - DNA, 667 bp, Homo Sapiens; identical to SEQ ID NO: 355756
  misc_feature (186)..(186): n is a, c, g, or t
  misc_feature (439)..(439): n is a, c, g, or t
  misc_feature (448)..(448): n is a, c, g, or t
  misc_feature (452)..(465): n is a, c, g, or t
  misc_feature (584)..(617): n is a, c, g, or t

SEQ ID NO: 385480 - DNA, 1922 bp, Homo Sapiens; identical to SEQ ID NO: 355758
  misc_feature (287)..(311): n is a, c, g, or t

SEQ ID NO: 385481 - DNA, 1549 bp, Homo Sapiens; identical to SEQ ID NO: 355759

SEQ ID NO: 385482 - DNA, 1383 bp, Homo Sapiens; identical to SEQ ID NO: 355764
  misc_feature (969)..(980): n is a, c, g, or t

SEQ ID NO: 385483 - DNA, 478 bp, Homo Sapiens; identical to SEQ ID NO: 355765
  misc_feature (15)..(15): n is a, c, g, or t
  misc_feature (23)..(23): n is a, c, g, or t
  misc_feature (33)..(33): n is a, c, g, or t
  misc_feature (49)..(61): n is a, c, g, or t
  misc_feature (72)..(72): n is a, c, g, or t

SEQ ID NO: 385484 - DNA, 1606 bp, Homo Sapiens; identical to SEQ ID NO: 355766
  misc_feature (976)..(976): n is a, c, g, or t
  misc_feature (1335)..(1335): n is a, c, g, or t
  misc_feature (1342)..(1377): n is a, c, g, or t

SEQ ID NO: 385485 - DNA, 1147 bp, Homo Sapiens; identical to SEQ ID NO: 355767
  misc_feature (1011)..(1011): n is a, c, g, or t
  misc_feature (1019)..(1019): n is a, c, g, or t
  misc_feature (1021)..(1021): n is a, c, g, or t
  misc_feature (1024)..(1024): n is a, c, g, or t
  misc_feature (1027)..(1027): n is a, c, g, or t
  misc_feature (1034)..(1034): n is a, c, g, or t
  misc_feature (1040)..(1040): n is a, c, g, or t
  misc_feature (1054)..(1054): n is a, c, g, or t
  misc_feature (1071)..(1072): n is a, c, g, or t
  misc_feature (1074)..(1074): n is a, c, g, or t
  misc_feature (1086)..(1087): n is a, c, g, or t
  misc_feature (1091)..(1091): n is a, c, g, or t
  misc_feature (1099)..(1099): n is a, c, g, or t
  misc_feature (1120)..(1120): n is a, c, g, or t
  misc_feature (1132)..(1132): n is a, c, g, or t
  misc_feature (1136)..(1137): n is a, c, g, or t
  misc_feature (1143)..(1143): n is a, c, g, or t
  misc_feature (1147)..(1147): n is a, c, g, or t

SEQ ID NO: 385486 - DNA, 1798 bp, Homo Sapiens; identical to SEQ ID NO: 355768
  misc_feature (22)..(22): n is a, c, g, or t

SEQ ID NO: 385487 - DNA, 1344 bp, Homo Sapiens; identical to SEQ ID NO: 355769

SEQ ID NO: 385488 - DNA, 1480 bp, Homo Sapiens; identical to SEQ ID NO: 355774
  misc_feature (1403)..(1439): n is a, c, g, or t

SEQ ID NO: 385489 - DNA, 947 bp, Homo Sapiens; identical to SEQ ID NO: 355775

SEQ ID NO: 385490 - DNA, 1067 bp, Homo Sapiens; identical to SEQ ID NO: 355776
  misc_feature (18)..(18): n is a, c, g, or t
  misc_feature (900)..(971): n is a, c, g, or t

SEQ ID NO: 385491 - DNA, 456 bp, Homo Sapiens; identical to SEQ ID NO: 355777
  misc_feature (83)..(83): n is a, c, g, or t

SEQ ID NO: 385492 - DNA, 482 bp, Homo Sapiens; identical to SEQ ID NO: 355778
  misc_feature (15)..(15): n is a, c, g, or t
  misc_feature (463)..(463): n is a, c, g, or t

SEQ ID NO: 385493 - DNA, 458 bp, Homo Sapiens; identical to SEQ ID NO: 355779
  misc_feature (17)..(17): n is a, c, g, or t
  misc_feature (42)..(42): n is a, c, g, or t
  misc_feature (60)..(60): n is a, c, g, or t
  misc_feature (68)..(68): n is a, c, g, or t
  misc_feature (75)..(75): n is a, c, g, or t
  misc_feature (84)..(84): n is a, c, g, or t
  misc_feature (138)..(138): n is a, c, g, or t
  misc_feature (167)..(167): n is a, c, g, or t
  misc_feature (193)..(193): n is a, c, g, or t

SEQ ID NO: 385494 - DNA, 2032 bp, Homo Sapiens; identical to SEQ ID NO: 355780
  misc_feature (982)..(982): n is a, c, g, or t
  misc_feature (1447)..(1448): n is a, c, g, or t
  misc_feature (1493)..(1508): n is a, c, g, or t
  misc_feature (1511)..(1794): n is a, c, g, or t
  misc_feature (1806)..(1903): n is a, c, g, or t
  misc_feature (2020)..(2020): n is a, c, g, or t
  misc_feature (2023)..(2023): n is a, c, g, or t
  misc_feature (2027)..(2027): n is a, c, g, or t
  misc_feature (2029)..(2029): n is a, c, g, or t

SEQ ID NO: 385495 - DNA, 224 bp, Homo Sapiens; identical to SEQ ID NO: 355781

SEQ ID NO: 385496 - DNA, 926 bp, Homo Sapiens; identical to SEQ ID NO: 355782
  misc_feature (50)..(86): n is a, c, g, or t

SEQ ID NO: 385497 - DNA, 955 bp, Homo Sapiens; identical to SEQ ID NO: 355784
  misc_feature (626)..(651): n is a, c, g, or t

SEQ ID NO: 385498 - DNA, 2099 bp, Homo Sapiens; identical to SEQ ID NO: 355785
  misc_feature (319)..(331): n is a, c, g, or t
  misc_feature (709)..(722): n is a, c, g, or t
  misc_feature (812)..(812): n is a, c, g, or t
  misc_feature (835)..(835): n is a, c, g, or t
  misc_feature (1486)..(1499): n is a, c, g, or t

SEQ ID NO: 385499 - DNA, 540 bp, Homo Sapiens; identical to SEQ ID NO: 355786
  misc_feature (47)..(47): n is a, c, g, or t
  misc_feature (105)..(105): n is a, c, g, or t
  misc_feature (117)..(117): n is a, c, g, or t

SEQ ID NO: 385500 - DNA, 551 bp, Homo Sapiens; identical to SEQ ID NO: 355787
  misc_feature (37)..(37): n is a, c, g, or t
  misc_feature (66)..(66): n is a, c, g, or t
  misc_feature (72)..(72): n is a, c, g, or t
  misc_feature (79)..(79): n is a, c, g, or t
  misc_feature (105)..(105): n is a, c, g, or t
  misc_feature (127)..(127): n is a, c, g, or t
  misc_feature (134)..(134): n is a, c, g, or t
  misc_feature (428)..(453): n is a, c, g, or t

SEQ ID NO: 385501 - DNA, 1482 bp, Homo Sapiens; identical to SEQ ID NO: 355789
  misc_feature (23)..(23): n is a, c, g, or t

SEQ ID NO: 385502 - DNA, 480 bp, Homo Sapiens; identical to SEQ ID NO: 355790
  misc_feature (27)..(27): n is a, c, g, or t
  misc_feature (49)..(49): n is a, c, g, or t
  misc_feature (218)..(249): n is a, c, g, or t
  misc_feature (412)..(412): n is a, c, g, or t

SEQ ID NO: 385503 - DNA, 1083 bp, Homo Sapiens; identical to SEQ ID NO: 355793
  misc_feature (1032)..(1032): n is a, c, g, or t
  misc_feature (1065)..(1065): n is a, c, g, or t
  misc_feature (1076)..(1076): n is a, c, g, or t

SEQ ID NO: 385504 - DNA, 1531 bp, Homo Sapiens; identical to SEQ ID NO: 355794
  misc_feature (23)..(23): n is a, c, g, or t
  misc_feature (45)..(81): n is a, c, g, or t

SEQ ID NO: 385505 - DNA, 484 bp, Homo Sapiens; identical to SEQ ID NO: 355795
  misc_feature (67)..(67): n is a, c, g, or t
  misc_feature (72)..(72): n is a, c, g, or t
  misc_feature (195)..(195): n is a, c, g, or t

SEQ ID NO: 385506 - DNA, 2396 bp, Homo Sapiens; identical to SEQ ID NO: 355796
  misc_feature (1517)..(1525): n is a, c, g, or t

SEQ ID NO: 385507 - DNA, 473 bp, Homo Sapiens; identical to SEQ ID NO: 355797
  misc_feature (449)..(449): n is a, c, g, or t
  misc_feature (454)..(454): n is a, c, g, or t

SEQ ID NO: 385508 - DNA, 1326 bp, Homo Sapiens; identical to SEQ ID NO: 355800
  misc_feature (211)..(211): n is a, c, g, or t
  misc_feature (261)..(261): n is a, c, g, or t
  misc_feature (264)..(264): n is a, c, g, or t
  misc_feature (294)..(294): n is a, c, g, or t
  misc_feature (1280)..(1280): n is a, c, g, or t

SEQ ID NO: 385509 - DNA, 988 bp, Homo Sapiens; identical to SEQ ID NO: 355801

SEQ ID NO: 385510 - DNA, 1051 bp, Homo Sapiens; identical to SEQ ID NO: 355802
  misc_feature (795)..(867): n is a, c, g, or t

SEQ ID NO: 385511 - DNA, 611 bp, Homo Sapiens; identical to SEQ ID NO: 355803
  misc_feature (173)..(348): n is a, c, g, or t
  misc_feature (452)..(468): n is a, c, g, or t

SEQ ID NO: 385512 - DNA, 1050 bp, Homo Sapiens; identical to SEQ ID NO: 355804
  misc_feature (949)..(979): n is a, c, g, or t
  misc_feature (990)..(990): n is a, c, g, or t
  misc_feature (994)..(994): n is a, c, g, or t
  misc_feature (1003)..(1003): n is a, c, g, or t
  misc_feature (1015)..(1015): n is a, c, g, or t
  misc_feature (1035)..(1035): n is a, c, g, or t
  misc_feature (1038)..(1038): n is a, c, g, or t
  misc_feature (1046)..(1046): n is a, c, g, or t

SEQ ID NO: 385513 - DNA, 603 bp, Homo Sapiens; identical to SEQ ID NO: 355805
  misc_feature (400)..(429): n is a, c, g, or t

SEQ ID NO: 385514 - DNA, 1482 bp, Homo Sapiens; identical to SEQ ID NO: 355806

SEQ ID NO: 385515 - DNA, 968 bp, Homo Sapiens; identical to SEQ ID NO: 355807

SEQ ID NO: 385516 - DNA, 1116 bp, Homo Sapiens; identical to SEQ ID NO: 355808
  misc_feature (1066)..(1074): n is a, c, g, or t

SEQ ID NO: 385517 - DNA, 1359 bp, Homo Sapiens; identical to SEQ ID NO: 355810
  misc_feature (591)..(628): n is a, c, g, or t

SEQ ID NO: 385518 - DNA, 1676 bp, Homo Sapiens; identical to SEQ ID NO: 355811
  misc_feature (69)..(120): n is a, c, g, or t
  misc_feature (742)..(755): n is a, c, g, or t
  misc_feature (1214)..(1214): n is a, c, g, or t

SEQ ID NO: 385519 - DNA, 245 bp, Homo Sapiens; identical to SEQ ID NO: 355812

SEQ ID NO: 385520 - DNA, 506 bp, Homo Sapiens; identical to SEQ ID NO: 355813

SEQ ID NO: 385521 - DNA, 1028 bp, Homo Sapiens; identical to SEQ ID NO: 355814
  misc_feature (16)..(16): n is a, c, g, or t
  misc_feature (55)..(55): n is a, c, g, or t
  misc_feature (966)..(979): n is a, c, g, or t

SEQ ID NO: 385522 - DNA, 1039 bp, Homo Sapiens; identical to SEQ ID NO: 355815
  misc_feature (910)..(910): n is a, c, g, or t
  misc_feature (925)..(925): n is a, c, g, or t
  misc_feature (953)..(953): n is a, c, g, or t
  misc_feature (955)..(955): n is a, c, g, or t
  misc_feature (958)..(958): n is a, c, g, or t
  misc_feature (1037)..(1037): n is a, c, g, or t

SEQ ID NO: 385523 - DNA, 1059 bp, Homo Sapiens; identical to SEQ ID NO: 355816
  misc_feature (933)..(933): n is a, c, g, or t
  misc_feature (963)..(963): n is a, c, g, or t
  misc_feature (968)..(968): n is a, c, g, or t
  misc_feature (986)..(986): n is a, c, g, or t
  misc_feature (999)..(999): n is a, c, g, or t
  misc_feature (1002)..(1002): n is a, c, g, or t
  misc_feature (1010)..(1010): n is a, c, g, or t
  misc_feature (1020)..(1020): n is a, c, g, or t
  misc_feature (1035)..(1035): n is a, c, g, or t
  misc_feature (1037)..(1037): n is a, c, g, or t
  misc_feature (1053)..(1053): n is a, c, g, or t
  misc_feature (1055)..(1055): n is a, c, g, or t

SEQ ID NO: 385524 - DNA, 2055 bp, Homo Sapiens; identical to SEQ ID NO: 355817
  misc_feature (1675)..(1675): n is a, c, g, or t
  misc_feature (1713)..(1714): n is a, c, g, or t
  misc_feature (1757)..(1757): n is a, c, g, or t
  misc_feature (1832)..(1832): n is a, c, g, or t
  misc_feature (1838)..(1838): n is a, c, g, or t
  misc_feature (1877)..(1877): n is a, c, g, or t
  misc_feature (1880)..(1880): n is a, c, g, or t
  misc_feature (1892)..(1892): n is a, c, g, or t
  misc_feature (1898)..(1899): n is a, c, g, or t
  misc_feature (1907)..(1907): n is a, c, g, or t
  misc_feature (1978)..(1978): n is a, c, g, or t
  misc_feature (1987)..(1987): n is a, c, g, or t
  misc_feature (1990)..(1990): n is a, c, g, or t
  misc_feature (1994)..(1995): n is a, c, g, or t
  misc_feature (1999)..(1999): n is a, c, g, or t
  misc_feature (2007)..(2007): n is a, c, g, or t
  misc_feature (2010)..(2010): n is a, c, g, or t
  misc_feature (2021)..(2021): n is a, c, g, or t
  misc_feature (2024)..(2024): n is a, c, g, or t
  misc_feature (2032)..(2032): n is a, c, g, or t
  misc_feature (2050)..(2050): n is a, c, g, or t

SEQ ID NO: 385525 - DNA, 1011 bp, Homo Sapiens; identical to SEQ ID NO: 355818

SEQ ID NO: 385526 - DNA, 1146 bp, Homo Sapiens; identical to SEQ ID NO: 355819

SEQ ID NO: 385527 - DNA, 1144 bp, Homo Sapiens; identical to SEQ ID NO: 355821
  misc_feature (826)..(826): n is a, c, g, or t
  misc_feature (944)..(944): n is a, c, g, or t
  misc_feature (968)..(968): n is a, c, g, or t

SEQ ID NO: 385528 - DNA, 1735 bp, Homo Sapiens; identical to SEQ ID NO: 355822

SEQ ID NO: 385529 - DNA, 1090 bp, Homo Sapiens; identical to SEQ ID NO: 355823
  misc_feature (38)..(38): n is a, c, g, or t
  misc_feature (218)..(218): n is a, c, g, or t
  misc_feature (220)..(221): n is a, c, g, or t
  misc_feature (225)..(275): n is a, c, g, or t

SEQ ID NO: 385530 - DNA, 1039 bp, Homo Sapiens; identical to SEQ ID NO: 355824

SEQ ID NO: 385531 - DNA, 1542 bp, Homo Sapiens; identical to SEQ ID NO: 355827

SEQ ID NO: 385532 - DNA, 426 bp, Homo Sapiens; identical to SEQ ID NO: 355828
  misc_feature (23)..(23): n is a, c, g, or t

SEQ ID NO: 385533 - DNA, 1525 bp, Homo Sapiens; identical to SEQ ID NO: 355829
  misc_feature (7)..(7): n is a, c, g, or t
  misc_feature (94)..(94): n is a, c, g, or t
  misc_feature (1474)..(1474): n is a, c, g, or t

SEQ ID NO: 385534 - DNA, 394 bp, Homo Sapiens; identical to SEQ ID NO: 355830
  misc_feature (23)..(23): n is a, c, g, or t
  misc_feature (234)..(234): n is a, c, g, or t

SEQ ID NO: 385535 - DNA, 1710 bp, Homo Sapiens; identical to SEQ ID NO: 355831

SEQ ID NO: 385536 - DNA, 1042 bp, Homo Sapiens; identical to SEQ ID NO: 355832
  misc_feature (957)..(993): n is a, c, g, or t

SEQ ID NO: 385537 - DNA, 1243 bp, Homo Sapiens; identical to SEQ ID NO: 355834
  misc_feature (33)..(33): n is a, c, g, or t
  misc_feature (1052)..(1052): n is a, c, g, or t
  misc_feature (1063)..(1063): n is a, c, g, or t
  misc_feature (1070)..(1070): n is a, c, g, or t
  misc_feature (1073)..(1073): n is a, c, g, or t
  misc_feature (1090)..(1090): n is a, c, g, or t
  misc_feature (1099)..(1099): n is a, c, g, or t
  misc_feature (1103)..(1103): n is a, c, g, or t
  misc_feature (1134)..(1134): n is a, c, g, or t
  misc_feature (1178)..(1178): n is a, c, g, or t
  misc_feature (1187)..(1187): n is a, c, g, or t
  misc_feature (1189)..(1190): n is a, c, g, or t
  misc_feature (1193)..(1193): n is a, c, g, or t
  misc_feature (1196)..(1196): n is a, c, g, or t
  misc_feature (1210)..(1210): n is a, c, g, or t
  misc_feature (1213)..(1213): n is a, c, g, or t
  misc_feature (1224)..(1224): n is a, c, g, or t
  misc_feature (1232)..(1232): n is a, c, g, or t

SEQ ID NO: 385538 - DNA, 2251 bp, Homo Sapiens; identical to SEQ ID NO: 355835

SEQ ID NO: 385539 - DNA, 1252 bp, Homo Sapiens; identical to SEQ ID NO: 355840
  misc_feature (60)..(60): n is a, c, g, or t
  misc_feature (65)..(78): n is a, c, g, or t
  misc_feature (97)..(97): n is a, c, g, or t

SEQ ID NO: 385540 - DNA, 442 bp, Homo Sapiens; identical to SEQ ID NO: 355841
  misc_feature (119)..(136): n is a, c, g, or t

SEQ ID NO: 385541 - DNA, 484 bp, Homo Sapiens; identical to SEQ ID NO: 355842
  misc_feature (195)..(195): n is a, c, g, or t

SEQ ID NO: 385542 - DNA, 1220 bp, Homo Sapiens; identical to SEQ ID NO: 355843

SEQ ID NO: 385543 - DNA, 1093 bp, Homo Sapiens; identical to SEQ ID NO: 355844
  misc_feature (716)..(726): n is a, c, g, or t
  misc_feature (768)..(776): n is a, c, g, or t

SEQ ID NO: 385544 - DNA, 2691 bp, Homo Sapiens; identical to SEQ ID NO: 355845
  misc_feature (57)..(57): n is a, c, g, or t
  misc_feature (100)..(110): n is a, c, g, or t
  misc_feature (177)..(177): n is a, c, g, or t

SEQ ID NO: 385545 - DNA, 469 bp, Homo Sapiens; identical to SEQ ID NO: 355846
  misc_feature (279)..(374): n is a, c, g, or t
  misc_feature (450)..(450): n is a, c, g, or t

SEQ ID NO: 385546 - DNA, 1442 bp, Homo Sapiens; identical to SEQ ID NO: 355847
  misc_feature (468)..(502): n is a, c, g, or t
  misc_feature (729)..(729): n is a, c, g, or t

SEQ ID NO: 385547 - DNA, 1340 bp, Homo Sapiens; identical to SEQ ID NO: 355848
  misc_feature (922)..(956): n is a, c, g, or t
  misc_feature (1003)..(1003): n is a, c, g, or t
  misc_feature (1046)..(1046): n is a, c, g, or t
  misc_feature (1090)..(1090): n is a, c, g, or t
  misc_feature (1197)..(1208): n is a, c, g, or t
  misc_feature (1264)..(1279): n is a, c, g, or t

SEQ ID NO: 385548 - DNA, 1426 bp, Homo Sapiens; identical to SEQ ID NO: 355849
  misc_feature (1196)..(1230): n is a, c, g, or t
  misc_feature (1347)..(1355): n is a, c, g, or t

SEQ ID NO: 385549 - DNA, 1349 bp, Homo Sapiens; identical to SEQ ID NO: 355851
  misc_feature (452)..(452): n is a, c, g, or t
  misc_feature (750)..(750): n is a, c, g, or t
  misc_feature (755)..(755): n is a, c, g, or t
  misc_feature (770)..(771): n is a, c, g, or t
  misc_feature (792)..(792): n is a, c, g, or t
  misc_feature (802)..(802): n is a, c, g, or t
  misc_feature (847)..(847): n is a, c, g, or t
  misc_feature (850)..(851): n is a, c, g, or t
  misc_feature (857)..(857): n is a, c, g, or t
  misc_feature (864)..(864): n is a, c, g, or t
  misc_feature (867)..(867): n is a, c, g, or t
  misc_feature (873)..(873): n is a, c, g, or t
  misc_feature (885)..(885): n is a, c, g, or t
  misc_feature (888)..(888): n is a, c, g, or t
  misc_feature (891)..(891): n is a, c, g, or t
  misc_feature (898)..(898): n is a, c, g, or t
  misc_feature (907)..(907): n is a, c, g, or t
  misc_feature (909)..(909): n is a, c, g, or t
  misc_feature (916)..(916): n is a, c, g, or t
  misc_feature (919)..(919): n is a, c, g, or t
  misc_feature (921)..(921): n is a, c, g, or t
  misc_feature (923)..(923): n is a, c, g, or t
  misc_feature (928)..(929): n is a, c, g, or t
  misc_feature (931)..(931): n is a, c, g, or t
  misc_feature (934)..(936): n is a, c, g, or t
  misc_feature (938)..(938): n is a, c, g, or t
  misc_feature (955)..(955): n is a, c, g, or t
  misc_feature (957)..(957): n is a, c, g, or t
  misc_feature (959)..(963): n is a, c, g, or t
  misc_feature (965)..(966): n is a, c, g, or t
  misc_feature (974)..(975): n is a, c, g, or t
  misc_feature (977)..(977): n is a, c, g, or t
  misc_feature (983)..(984): n is a, c, g, or t
  misc_feature (986)..(986): n is a, c, g, or t
  misc_feature (990)..(990): n is a, c, g, or t
  misc_feature (994)..(996): n is a, c, g, or t
  misc_feature (1004)..(1005): n is a, c, g, or t
  misc_feature (1007)..(1007): n is a, c, g, or t
  misc_feature (1009)..(1010): n is a, c, g, or t
  misc_feature (1014)..(1014): n is a, c, g, or t
  misc_feature (1016)..(1016): n is a, c, g, or t
  misc_feature (1025)..(1025): n is a, c, g, or t
  misc_feature (1043)..(1043): n is a, c, g, or t
  misc_feature (1060)..(1060): n is a, c, g, or t
  misc_feature (1083)..(1083): n is a, c, g, or t
  misc_feature (1086)..(1086): n is a, c, g, or t
  misc_feature (1094)..(1094): n is a, c, g, or t
  misc_feature (1101)..(1102): n is a, c, g, or t
  misc_feature (1111)..(1111): n is a, c, g, or t
  misc_feature (1118)..(1118): n is a, c, g, or t
  misc_feature (1144)..(1144): n is a, c, g, or t
  misc_feature (1148)..(1148): n is a, c, g, or t
  misc_feature (1151)..(1152): n is a, c, g, or t
  misc_feature (1159)..(1159): n is a, c, g, or t
  misc_feature (1169)..(1169): n is a, c, g, or t
  misc_feature (1183)..(1183): n is a, c, g, or t
  misc_feature (1185)..(1185): n is a, c, g, or t
  misc_feature (1192)..(1192): n is a, c, g, or t
  misc_feature (1326)..(1327): n is a, c, g, or t

SEQ ID NO: 385550 - DNA, 745 bp, Homo Sapiens; identical to SEQ ID NO: 355852
  misc_feature (4)..(4): n is a, c, g, or t
  misc_feature (6)..(6): n is a, c, g, or t
  misc_feature (14)..(14): n is a, c, g, or t
  misc_feature (18)..(18): n is a, c, g, or t
  misc_feature (29)..(29): n is a, c, g, or t
  misc_feature (48)..(48): n is a, c, g, or t
  misc_feature (50)..(50): n is a, c, g, or t
  misc_feature (52)..(53): n is a, c, g, or t
  misc_feature (69)..(69): n is a, c, g, or t
  misc_feature (73)..(73): n is a, c, g, or t
  misc_feature (75)..(75): n is a, c, g, or t
  misc_feature (77)..(77): n is a, c, g, or t
  misc_feature (81)..(81): n is a, c, g, or t
  misc_feature (83)..(83): n is a, c, g, or t
  misc_feature (86)..(86): n is a, c, g, or t
  misc_feature (94)..(94): n is a, c, g, or t
  misc_feature (101)..(101): n is a, c, g, or t
  misc_feature (118)..(118): n is a, c, g, or t
  misc_feature (123)..(123): n is a, c, g, or t
  misc_feature (132)..(132): n is a, c, g, or t
  misc_feature (139)..(139): n is a, c, g, or t
  misc_feature (147)..(147): n is a, c, g, or t
  misc_feature (150)..(150): n is a, c, g, or t
  misc_feature (164)..(164): n is a, c, g, or t
  misc_feature (166)..(167): n is a, c, g, or t
  misc_feature (186)..(187): n is a, c, g, or t
  misc_feature (201)..(201): n is a, c, g, or t
  misc_feature (204)..(204): n is a, c, g, or t
  misc_feature (212)..(212): n is a, c, g, or t
  misc_feature (223)..(223): n is a, c, g, or t
  misc_feature (225)..(226): n is a, c, g, or t
  misc_feature (229)..(230): n is a, c, g, or t
  misc_feature (232)..(232): n is a, c, g, or t
  misc_feature (236)..(236): n is a, c, g, or t
  misc_feature (238)..(238): n is a, c, g, or t
  misc_feature (259)..(259): n is a, c, g, or t
  misc_feature (265)..(265): n is a, c, g, or t

SEQ ID NO: 385551 - DNA, 1683 bp, Homo Sapiens; identical to SEQ ID NO: 355854
  misc_feature (293)..(293): n is a, c, g, or t

SEQ ID NO: 385552 - DNA, 1122 bp, Homo Sapiens; identical to SEQ ID NO: 355855

SEQ ID NO: 385553 - DNA, 1873 bp, Homo Sapiens; identical to SEQ ID NO: 355856
  misc_feature (28)..(28): n is a, c, g, or t
  misc_feature (38)..(38): n is a, c, g, or t
  misc_feature (45)..(45): n is a, c, g, or t
  misc_feature (1742)..(1751): n is a, c, g, or t

SEQ ID NO: 385554 - DNA, 1538 bp, Homo Sapiens; identical to SEQ ID NO: 355857

SEQ ID NO: 385555 - DNA, 1030 bp, Homo Sapiens; identical to SEQ ID NO: 355858
  misc_feature (7)..(7): n is a, c, g, or t
  misc_feature (13)..(13): n is a, c, g, or t
  misc_feature (15)..(15): n is a, c, g, or t
  misc_feature (21)..(21): n is a, c, g, or t
  misc_feature (32)..(32): n is a, c, g, or t
  misc_feature (48)..(48): n is a, c, g, or t
  misc_feature (69)..(69): n is a, c, g, or t
  misc_feature (79)..(79): n is a, c, g, or t
  misc_feature (98)..(99): n is a, c, g, or t
  misc_feature (101)..(101): n is a, c, g, or t
  misc_feature (271)..(271): n is a, c, g, or t
  misc_feature (387)..(387): n is a, c, g, or t

SEQ ID NO: 385556 - DNA, 1534 bp, Homo Sapiens; identical to SEQ ID NO: 355859
  misc_feature (1378)..(1396): n is a, c, g, or t

SEQ ID NO: 385557 - DNA, 928 bp, Homo Sapiens; identical to SEQ ID NO: 355860

SEQ ID NO: 385558 - DNA, 437 bp, Homo Sapiens; identical to SEQ ID NO: 355861

SEQ ID NO: 385559 - DNA, 1268 bp, Homo Sapiens; identical to SEQ ID NO: 355862
  misc_feature (1243)..(1243): n is a, c, g, or t

SEQ ID NO: 385560 - DNA, 2740 bp, Homo Sapiens; identical to SEQ ID NO: 355865
  misc_feature (2014)..(2014): n is a, c, g, or t
  misc_feature (2018)..(2018): n is a, c, g, or t
  misc_feature (2142)..(2142): n is a, c, g, or t
  misc_feature (2153)..(2153): n is a, c, g, or t
  misc_feature (2155)..(2155): n is a, c, g, or t
  misc_feature (2212)..(2212): n is a, c, g, or t
  misc_feature (2229)..(2229): n is a, c, g, or t
  misc_feature (2252)..(2267): n is a, c, g, or t
  misc_feature (2345)..(2345): n is a, c, g, or t
  misc_feature (2352)..(2352): n is a, c, g, or t
  misc_feature (2390)..(2390): n is a, c, g, or t
  misc_feature (2404)..(2404): n is a, c, g, or t
  misc_feature (2413)..(2413): n is a, c, g, or t
  misc_feature (2420)..(2420): n is a, c, g, or t
  misc_feature (2431)..(2431): n is a, c, g, or t
  misc_feature (2434)..(2434): n is a, c, g, or t
  misc_feature (2454)..(2454): n is a, c, g, or t
  misc_feature (2464)..(2464): n is a, c, g, or t
  misc_feature (2467)..(2467): n is a, c, g, or t
  misc_feature (2477)..(2477): n is a, c, g, or t
  misc_feature (2512)..(2512): n is a, c, g, or t
  misc_feature (2536)..(2537): n is a, c, g, or t
  misc_feature (2540)..(2540): n is a, c, g, or t
  misc_feature (2549)..(2549): n is a, c, g, or t
  misc_feature (2553)..(2553): n is a, c, g, or t
  misc_feature (2584)..(2584): n is a, c, g, or t
  misc_feature (2613)..(2613): n is a, c, g, or t
  misc_feature (2624)..(2624): n is a, c, g, or t
  misc_feature (2649)..(2649): n is a, c, g, or t
  misc_feature (2653)..(2653): n is a, c, g, or t
  misc_feature (2660)..(2660): n is a, c, g, or t
  misc_feature (2691)..(2691): n is a, c, g, or t
  misc_feature (2706)..(2706): n is a, c, g, or t
  misc_feature (2708)..(2708): n is a, c, g, or t
  misc_feature (2718)..(2718): n is a, c, g, or t

SEQ ID NO: 385561 - DNA, 779 bp, Homo Sapiens; identical to SEQ ID NO: 355866
  misc_feature (458)..(551): n is a, c, g, or t

SEQ ID NO: 385562 - DNA, 770 bp, Homo Sapiens; identical to SEQ ID NO: 355867

SEQ ID NO: 385563 - DNA, 996 bp, Homo Sapiens; identical to SEQ ID NO: 355868
  misc_feature (885)..(885): n is a, c, g, or t

SEQ ID NO: 385564 - DNA, 1081 bp, Homo Sapiens; identical to SEQ ID NO: 355869

SEQ ID NO: 385565 - DNA, 1675 bp, Homo Sapiens; identical to SEQ ID NO: 355873
  misc_feature (1622)..(1630): n is a, c, g, or t

SEQ ID NO: 385566 - DNA, 945 bp, Homo Sapiens; identical to SEQ ID NO: 355874
  misc_feature (686)..(686): n is a, c, g, or t

SEQ ID NO: 385567 - DNA, 1056 bp, Homo Sapiens; identical to SEQ ID NO: 355875

SEQ ID NO: 385568 - DNA, 863 bp, Homo Sapiens; identical to SEQ ID NO: 355876

SEQ ID NO: 385569 - DNA, 530 bp, Homo Sapiens; identical to SEQ ID NO: 355877
  misc_feature (493)..(493): n is a, c, g, or t

SEQ ID NO: 385570 - DNA, 793 bp, Homo Sapiens; identical to SEQ ID NO: 355878
  misc_feature (100)..(135): n is a, c, g, or t
  misc_feature (233)..(233): n is a, c, g, or t

SEQ ID NO: 385571 - DNA, 1700 bp, Homo Sapiens; identical to SEQ ID NO: 355879
  misc_feature (100)..(135): n is a, c, g, or t
  misc_feature (1560)..(1560): n is a, c, g, or t
  misc_feature (1564)..(1564): n is a, c, g, or t
  misc_feature (1585)..(1585): n is a, c, g, or t

SEQ ID NO: 385572 - DNA, 1134 bp, Homo Sapiens; identical to SEQ ID NO: 355883

SEQ ID NO: 385573 - DNA, 2191 bp, Homo Sapiens; identical to SEQ ID NO: 355884
  misc_feature (1580)..(1664): n is a, c, g, or t
  misc_feature (2126)..(2126): n is a, c, g, or t

SEQ ID NO: 385574 - DNA, 1681 bp, Homo Sapiens; identical to SEQ ID NO: 355891
  misc_feature (1676)..(1676): n is a, c, g, or t

SEQ ID NO: 385575 - DNA, 751 bp, Homo Sapiens; identical to SEQ ID NO: 355892

SEQ ID NO: 385576 - DNA, 387 bp, Homo Sapiens; identical to SEQ ID NO: 355893

SEQ ID NO: 385577 - DNA, 984 bp, Homo Sapiens; identical to SEQ ID NO: 355896
  misc_feature (6)..(6): n is a, c, g, or t
  misc_feature (19)..(19): n is a, c, g, or t
  misc_feature (28)..(28): n is a, c, g, or t
  misc_feature (34)..(34): n is a, c, g, or t
  misc_feature (38)..(38): n is a, c, g, or t
  misc_feature (41)..(41): n is a, c, g, or t
  misc_feature (43)..(43): n is a, c, g, or t
  misc_feature (56)..(56): n is a, c, g, or t
  misc_feature (62)..(62): n is a, c, g, or t
  misc_feature (66)..(66): n is a, c, g, or t
  misc_feature (70)..(71): n is a, c, g, or t
  misc_feature (74)..(74): n is a, c, g, or t
  misc_feature (76)..(76): n is a, c, g, or t
  misc_feature (84)..(84): n is a, c, g, or t
  misc_feature (88)..(88): n is a, c, g, or t
  misc_feature (105)..(105): n is a, c, g, or t
  misc_feature (120)..(120): n is a, c, g, or t
  misc_feature (201)..(201): n is a, c, g, or t
  misc_feature (394)..(394): n is a, c, g, or t
  misc_feature (652)..(652): n is a, c, g, or t
  misc_feature (706)..(706): n is a, c, g, or t
  misc_feature (757)..(757): n is a, c, g, or t

SEQ ID NO: 385578 - DNA, 387 bp, Homo Sapiens; identical to SEQ ID NO: 355897

SEQ ID NO: 385579 - DNA, 435 bp, Homo Sapiens; identical to SEQ ID NO: 355899
  misc_feature (17)..(17): n is a, c, g, or t
  misc_feature (357)..(394): n is a, c, g, or t

SEQ ID NO: 385580 - DNA, 1921 bp, Homo Sapiens; identical to SEQ ID NO: 355900
  misc_feature (50)..(86): n is a, c, g, or t
  misc_feature (1858)..(1858): n is a, c, g, or t

SEQ ID NO: 385581 - DNA, 794 bp, Homo Sapiens; identical to SEQ ID NO: 355903

SEQ ID NO: 385582 - DNA, 1259 bp, Homo Sapiens; identical to SEQ ID NO: 355904

SEQ ID NO: 385583 - DNA, 1342 bp, Homo Sapiens; identical to SEQ ID NO: 355906
  misc_feature (59)..(59): n is a, c, g, or t
  misc_feature (85)..(85): n is a, c, g, or t
  misc_feature (93)..(93): n is a, c, g, or t
  misc_feature (107)..(107): n is a, c, g, or t
  misc_feature (115)..(115): n is a, c, g, or t
  misc_feature (117)..(117): n is a, c, g, or t
  misc_feature (119)..(119): n is a, c, g, or t
  misc_feature (123)..(124): n is a, c, g, or t
  misc_feature (126)..(126): n is a, c, g, or t
  misc_feature (128)..(128): n is a, c, g, or t
  misc_feature (130)..(130): n is a, c, g, or t
  misc_feature (132)..(133): n is a, c, g, or t
  misc_feature (141)..(141): n is a, c, g, or t
  misc_feature (144)..(144): n is a, c, g, or t
  misc_feature (152)..(154): n is a, c, g, or t
  misc_feature (170)..(170): n is a, c, g, or t
  misc_feature (172)..(172): n is a, c, g, or t
  misc_feature (175)..(176): n is a, c, g, or t
  misc_feature (180)..(180): n is a, c, g, or t
  misc_feature (184)..(184): n is a, c, g, or t
  misc_feature (189)..(189): n is a, c, g, or t
  misc_feature (198)..(198): n is a, c, g, or t
  misc_feature (205)..(208): n is a, c, g, or t
  misc_feature (210)..(211): n is a, c, g, or t
  misc_feature (213)..(213): n is a, c, g, or t
  misc_feature (215)..(217): n is a, c, g, or t
  misc_feature (261)..(262): n is a, c, g, or t
  misc_feature (265)..(265): n is a, c, g, or t
  misc_feature (267)..(267): n is a, c, g, or t
  misc_feature (274)..(274): n is a, c, g, or t
  misc_feature (276)..(277): n is a, c, g, or t
  misc_feature (284)..(284): n is a, c, g, or t
  misc_feature (294)..(295): n is a, c, g, or t
  misc_feature (303)..(303): n is a, c, g, or t
  misc_feature (306)..(306): n is a, c, g, or t
  misc_feature (310)..(310): n is a, c, g, or t
  misc_feature (313)..(313): n is a, c, g, or t
  misc_feature (315)..(315): n is a, c, g, or t
  misc_feature (534)..(534): n is a, c, g, or t
  misc_feature (750)..(750): n is a, c, g, or t
  misc_feature (904)..(904): n is a, c, g, or t
  misc_feature (1061)..(1061): n is a, c, g, or t

SEQ ID NO: 385584 - DNA, 426 bp, Homo Sapiens; identical to SEQ ID NO: 355907
  misc_feature (327)..(327): n is a, c, g, or t
  misc_feature (370)..(370): n is a, c, g, or t
  misc_feature (378)..(378): n is a, c, g, or t
  misc_feature (400)..(400): n is a, c, g, or t

SEQ ID NO: 385585 - DNA, 718 bp, Homo Sapiens; identical to SEQ ID NO: 355910
  misc_feature (15)..(15): n is a, c, g, or t
  misc_feature (28)..(28): n is a, c, g, or t
  misc_feature (33)..(33): n is a, c, g, or t
  misc_feature (38)..(38): n is a, c, g, or t
  misc_feature (49)..(50): n is a, c, g, or t
  misc_feature (73)..(73): n is a, c, g, or t
  misc_feature (75)..(75): n is a, c, g, or t
  misc_feature (131)..(131): n is a, c, g, or t
  misc_feature (173)..(173): n is a, c, g, or t
  misc_feature (194)..(194): n is a, c, g, or t
  misc_feature (223)..(223): n is a, c, g, or t
  misc_feature (251)..(251): n is a, c, g, or t
  misc_feature (283)..(283): n is a, c, g, or t
  misc_feature (292)..(292): n is a, c, g, or t
  misc_feature (298)..(298): n is a, c, g, or t
  misc_feature (305)..(305): n is a, c, g, or t
  misc_feature (308)..(308): n is a, c, g, or t
  misc_feature (326)..(326): n is a, c, g, or t
  misc_feature (328)..(328): n is a, c, g, or t

SEQ ID NO: 385586 - DNA, 704 bp, Homo Sapiens; identical to SEQ ID NO: 355911
  misc_feature (66)..(102): n is a, c, g, or t

SEQ ID NO: 385587 - DNA, 1025 bp, Homo Sapiens; identical to SEQ ID NO: 355914

SEQ ID NO: 385588 - DNA, 1042 bp, Homo Sapiens; identical to SEQ ID NO: 355915

SEQ ID NO: 385589 - DNA, 1653 bp, Homo Sapiens; identical to SEQ ID NO: 355917
  misc_feature (5)..(5): n is a, c, g, or t
  misc_feature (7)..(7): n is a, c, g, or t
  misc_feature (19)..(19): n is a, c, g, or t
  misc_feature (22)..(22): n is a, c, g, or t
  misc_feature (24)..(24): n is a, c, g, or t
  misc_feature (26)..(26): n is a, c, g, or t
  misc_feature (39)..(40): n is a, c, g, or t
  misc_feature (47)..(47): n is a, c, g, or t
  misc_feature (55)..(55): n is a, c, g, or t
  misc_feature (61)..(61): n is a, c, g, or t
  misc_feature (74)..(74): n is a, c, g, or t
  misc_feature (83)..(84): n is a, c, g, or t
  misc_feature (104)..(104): n is a, c, g, or t
  misc_feature (107)..(107): n is a, c, g, or t
  misc_feature (127)..(127): n is a, c, g, or t
  misc_feature (130)..(130): n is a, c, g, or t
  misc_feature (134)..(134): n is a, c, g, or t
  misc_feature (152)..(152): n is a, c, g, or t
  misc_feature (154)..(155): n is a, c, g, or t
  misc_feature (183)..(183): n is a, c, g, or t
  misc_feature (193)..(193): n is a, c, g, or t
  misc_feature (287)..(287): n is a, c, g, or t
  misc_feature (302)..(302): n is a, c, g, or t
  misc_feature (317)..(317): n is a, c, g, or t
  misc_feature (1065)..(1082): n is a, c, g, or t

SEQ ID NO: 385590 - DNA, 1066 bp, Homo Sapiens; identical to SEQ ID NO: 355918

SEQ ID NO: 385591 - DNA, 1613 bp, Homo Sapiens; identical to SEQ ID NO: 355919
  misc_feature (899)..(899): n is a, c, g, or t
  misc_feature (930)..(930): n is a, c, g, or t
  misc_feature (936)..(936): n is a, c, g, or t
  misc_feature (956)..(956): n is a, c, g, or t
  misc_feature (1067)..(1067): n is a, c, g, or t
  misc_feature (1105)..(1105): n is a, c, g, or t
  misc_feature (1124)..(1124): n is a, c, g, or t
  misc_feature (1216)..(1216): n is a, c, g, or t
  misc_feature (1508)..(1508): n is a, c, g, or t
  misc_feature (1517)..(1518): n is a, c, g, or t
  misc_feature (1526)..(1526): n is a, c, g, or t
  misc_feature (1528)..(1528): n is a, c, g, or t
  misc_feature (1534)..(1535): n is a, c, g, or t
  misc_feature (1537)..(1538): n is a, c, g, or t
  misc_feature (1540)..(1540): n is a, c, g, or t
  misc_feature (1542)..(1542): n is a, c, g, or t
  misc_feature (1551)..(1552): n is a, c, g, or t
  misc_feature (1559)..(1559): n is a, c, g, or t
  misc_feature (1574)..(1574): n is a, c, g, or t
  misc_feature (1577)..(1577): n is a, c, g, or t
  misc_feature (1587)..(1588): n is a, c, g, or t
  misc_feature (1603)..(1603): n is a, c, g, or t
  misc_feature (1608)..(1608): n is a, c, g, or t

SEQ ID NO: 385592 - DNA, 1118 bp, Homo Sapiens; identical to SEQ ID NO: 355920
  misc_feature (16)..(16): n is a, c, g, or t
  misc_feature (32)..(32): n is a, c, g, or t
  misc_feature (37)..(37): n is a, c, g, or t
  misc_feature (50)..(50): n is a, c, g, or t
  misc_feature (58)..(58): n is a, c, g, or t
  misc_feature (61)..(61): n is a, c, g, or t
  misc_feature (63)..(64): n is a, c, g, or t
  misc_feature (80)..(80): n is a, c, g, or t
  misc_feature (149)..(149): n is a, c, g, or t
  misc_feature (169)..(169): n is a, c, g, or t
  misc_feature (184)..(184): n is a, c, g, or t
  misc_feature (198)..(198): n is a, c, g, or t
  misc_feature (230)..(230): n is a, c, g, or t
  misc_feature (293)..(293): n is a, c, g, or t
  misc_feature (301)..(301): n is a, c, g, or t
  misc_feature (305)..(305): n is a, c, g, or t
  misc_feature (353)..(353): n is a, c, g, or t
  misc_feature (363)..(413): n is a, c, g, or t

SEQ ID NO: 385593 - DNA, 1118 bp, Homo Sapiens; identical to SEQ ID NO: 355921
  misc_feature (687)..(687): n is a, c, g, or t
  misc_feature (958)..(958): n is a, c, g, or t
  misc_feature (974)..(974): n is a, c, g, or t
  misc_feature (1008)..(1008): n is a, c, g, or t
  misc_feature (1026)..(1026): n is a, c, g, or t
  misc_feature (1041)..(1041): n is a, c, g, or t
  misc_feature (1045)..(1045): n is a, c, g, or t
  misc_feature (1048)..(1048): n is a, c, g, or t
  misc_feature (1051)..(1051): n is a, c, g, or t
  misc_feature (1057)..(1057): n is a, c, g, or t
  misc_feature (1065)..(1065): n is a, c, g, or t
  misc_feature (1076)..(1076): n is a, c, g, or t
  misc_feature (1080)..(1080): n is a, c, g, or t
  misc_feature (1090)..(1090): n is a, c, g, or t
  misc_feature (1093)..(1093): n is a, c, g, or t
  misc_feature (1095)..(1095): n is a, c, g, or t
  misc_feature (1101)..(1101): n is a, c, g, or t
  misc_feature (1107)..(1107): n is a, c, g, or t
  misc_feature (1111)..(1111): n is a, c, g, or t

SEQ ID NO: 385594 - DNA, 1506 bp, Homo Sapiens; identical to SEQ ID NO: 355922
  misc_feature (1228)..(1228): n is a, c, g, or t
  misc_feature (1230)..(1348): n is a, c, g, or t
  misc_feature (1405)..(1445): n is a, c, g, or t

SEQ ID NO: 385595 - DNA, 1970 bp, Homo Sapiens; identical to SEQ ID NO: 355927
  misc_feature (453)..(503): n is a, c, g, or t
  misc_feature (1951)..(1951): n is a, c, g, or t

SEQ ID NO: 385596 - DNA, 957 bp, Homo Sapiens; identical to SEQ ID NO: 355928
  misc_feature (227)..(291): n is a, c, g, or t

SEQ ID NO: 385597 - DNA, 1012 bp, Homo Sapiens; identical to SEQ ID NO: 355929
  misc_feature (570)..(634): n is a, c, g, or t

SEQ ID NO: 385598 - DNA, 906 bp, Homo Sapiens; identical to SEQ ID NO: 355936
  misc_feature (793)..(793): n is a, c, g, or t

SEQ ID NO: 385599 - DNA, 1012 bp, Homo Sapiens; identical to SEQ ID NO: 355937
  misc_feature (958)..(958): n is a, c, g, or t
  misc_feature (960)..(960): n is a, c, g, or t
  misc_feature (964)..(964): n is a, c, g, or t
  misc_feature (970)..(970): n is a, c, g, or t
  misc_feature (972)..(972): n is a, c, g, or t
  misc_feature (974)..(975): n is a, c, g, or t
  misc_feature (981)..(981): n is a, c, g, or t
  misc_feature (997)..(997): n is a, c, g, or t
  misc_feature (1000)..(1000): n is a, c, g, or t
  misc_feature (1002)..(1002): n is a, c, g, or t
  misc_feature (1010)..(1010): n is a, c, g, or t

SEQ ID NO: 385600 - DNA, 1313 bp, Homo Sapiens; identical to SEQ ID NO: 355938

SEQ ID NO: 385601 - DNA, 801 bp, Homo Sapiens; identical to SEQ ID NO: 355939

SEQ ID NO: 385602 - DNA, 854 bp, Homo Sapiens; identical to SEQ ID NO: 355941

SEQ ID NO: 385603 - DNA, 974 bp, Homo Sapiens; identical to SEQ ID NO: 355942
  misc_feature (885)..(885): n is a, c, g, or t

SEQ ID NO: 385604 - DNA, 1085 bp, Homo Sapiens; identical to SEQ ID NO: 355943

SEQ ID NO: 385605 - DNA, 1327 bp, Homo Sapiens; identical to SEQ ID NO: 355944
  misc_feature (1022)..(1065): n is a, c, g, or t

SEQ ID NO: 385606 - DNA, 1858 bp, Homo Sapiens; identical to SEQ ID NO: 355945

SEQ ID NO: 385607 - DNA, 974 bp, Homo Sapiens; identical to SEQ ID NO: 355946

SEQ ID NO: 385608 - DNA, 488 bp, Homo Sapiens; identical to SEQ ID NO: 355947
  misc_feature (468)..(468): n is a, c, g, or t

SEQ ID NO: 385609 - DNA, 591 bp, Homo Sapiens; identical to SEQ ID NO: 355949
  misc_feature (419)..(419): n is a, c, g, or t
  misc_feature (576)..(576): n is a, c, g, or t

SEQ ID NO: 385610 - DNA, 868 bp, Homo Sapiens; identical to SEQ ID NO: 355950
  misc_feature (65)..(108): n is a, c, g, or t

SEQ ID NO: 385611 - DNA, 899 bp, Homo Sapiens; identical to SEQ ID NO: 78785
  misc_feature (722)..(722): n is a, c, g, or t
  misc_feature (728)..(729): n is a, c, g, or t
  misc_feature (740)..(742): n is a, c, g, or t

SEQ ID NO: 385612 - DNA, 836 bp, Homo Sapiens; identical to SEQ ID NO: 355952
  misc_feature (29)..(29): n is a, c, g, or t
  misc_feature (81)..(117): n is a, c, g, or t

SEQ ID NO: 385613 - DNA, 1095 bp, Homo Sapiens; identical to SEQ ID NO: 355953
  misc_feature (44)..(96): n is a, c, g, or t
  misc_feature (106)..(106): n is a, c, g, or t
  misc_feature (126)..(126): n is a, c, g, or t
  misc_feature (134)..(207): n is a, c, g, or t
  misc_feature (222)..(222): n is a, c, g, or t
  misc_feature (226)..(226): n is a, c, g, or t
  misc_feature (228)..(228): n is a, c, g, or t
  misc_feature (1001)..(1020): n is a, c, g, or t

SEQ ID NO: 385614 - DNA, 1106 bp, Homo Sapiens; identical to SEQ ID NO: 355954
  misc_feature (3)..(3): n is a, c, g, or t
  misc_feature (10)..(10): n is a, c, g, or t
  misc_feature (38)..(38): n is a, c, g, or t

SEQ ID NO: 385615 - DNA, 992 bp, Homo Sapiens; identical to SEQ ID NO: 355955
  misc_feature (48)..(84): n is a, c, g, or t

SEQ ID NO: 385616 - DNA, 1758 bp, Homo Sapiens; identical to SEQ ID NO: 355957

SEQ ID NO: 385617 - DNA, 1005 bp, Homo Sapiens; identical to SEQ ID NO: 355958

SEQ ID NO: 385618 - DNA, 705 bp, Homo Sapiens; identical to SEQ ID NO: 355959

SEQ ID NO: 385619 - DNA, 1620 bp, Homo Sapiens; identical to SEQ ID NO: 355960

SEQ ID NO: 385620 - DNA, 839 bp, Homo Sapiens; identical to SEQ ID NO: 355961

SEQ ID NO: 385621 - DNA, 1716 bp, Homo Sapiens; identical to SEQ ID NO: 355964
  misc_feature (492)..(533): n is a, c, g, or t
  misc_feature (597)..(611): n is a, c, g, or t
  misc_feature (1196)..(1222): n is a, c, g, or t

SEQ ID NO: 385622 - DNA, 987 bp, Homo Sapiens; identical to SEQ ID NO: 355965
  misc_feature (889)..(914): n is a, c, g, or t
  misc_feature (917)..(917): n is a, c, g, or t
  misc_feature (923)..(923): n is a, c, g, or t
  misc_feature (937)..(937): n is a, c, g, or t
  misc_feature (945)..(945): n is a, c, g, or t
  misc_feature (962)..(962): n is a, c, g, or t
  misc_feature (964)..(964): n is a, c, g, or t
  misc_feature (973)..(973): n is a, c, g, or t
  misc_feature (980)..(980): n is a, c, g, or t

SEQ ID NO: 385623 - DNA, 1631 bp, Homo Sapiens; identical to SEQ ID NO: 355967
  misc_feature (61)..(61): n is a, c, g, or t
  misc_feature (84)..(84): n is a, c, g, or t
  misc_feature (231)..(231): n is a, c, g, or t
  misc_feature (260)..(260): n is a, c, g, or t
  misc_feature (270)..(270): n is a, c, g, or t
  misc_feature (284)..(284): n is a, c, g, or t
  misc_feature (331)..(331): n is a, c, g, or t
  misc_feature (362)..(362): n is a, c, g, or t
  misc_feature (398)..(411): n is a, c, g, or t
  misc_feature (416)..(489): n is a, c, g, or t
  misc_feature (525)..(525): n is a, c, g, or t
  misc_feature (544)..(673): n is a, c, g, or t

SEQ ID NO: 385624 - DNA, 2068 bp, Homo Sapiens; identical to SEQ ID NO: 355968
  misc_feature (1512)..(1611): n is a, c, g, or t
  misc_feature (1638)..(1638): n is a, c, g, or t

SEQ ID NO: 385625 - DNA, 1107 bp, Homo Sapiens; identical to SEQ ID NO: 355969

SEQ ID NO: 385626 - DNA, 606 bp, Homo Sapiens; identical to SEQ ID NO: 355970

SEQ ID NO: 385627 - DNA, 1685 bp, Homo Sapiens; identical to SEQ ID NO: 355972

SEQ ID NO: 385628 - DNA, 1219 bp, Homo Sapiens; identical to SEQ ID NO: 355973
  misc_feature (1160)..(1160): n is a, c, g, or t

SEQ ID NO: 385629 - DNA, 2014 bp, Homo Sapiens; identical to SEQ ID NO: 355975
  misc_feature (1451)..(1451): n is a, c, g, or t
  misc_feature (1456)..(1456): n is a, c, g, or t
  misc_feature (1592)..(1593): n is a, c, g, or t
  misc_feature (1595)..(1595): n is a, c, g, or t
  misc_feature (1598)..(1598): n is a, c, g, or t
  misc_feature (1981)..(1981): n is a, c, g, or t
  misc_feature (1995)..(1995): n is a, c, g, or t

SEQ ID NO: 385630 - DNA, 896 bp, Homo Sapiens; identical to SEQ ID NO: 355976

SEQ ID NO: 385631 - DNA, 968 bp, Homo Sapiens; identical to SEQ ID NO: 355977

SEQ ID NO: 385632 - DNA, 549 bp, Homo Sapiens; identical to SEQ ID NO: 355978
  misc_feature (104)..(117): n is a, c, g, or t

SEQ ID NO: 385633 - DNA, 1471 bp, Homo Sapiens; identical to SEQ ID NO: 355979

SEQ ID NO: 385634 - DNA, 970 bp, Homo Sapiens; identical to SEQ ID NO: 355980

SEQ ID NO: 385635 - DNA, 1098 bp, Homo Sapiens; identical to SEQ ID NO: 355987
  misc_feature (9)..(9): n is a, c, g, or t
  misc_feature (12)..(12): n is a, c, g, or t
  misc_feature (14)..(14): n is a, c, g, or t
  misc_feature (25)..(26): n is a, c, g, or t
  misc_feature (74)..(74): n is a, c, g, or t
  misc_feature (81)..(81): n is a, c, g, or t
  misc_feature (117)..(117): n is a, c, g, or t
  misc_feature (125)..(125): n is a, c, g, or t

SEQ ID NO: 385636 - DNA, 2163 bp, Homo Sapiens; identical to SEQ ID NO: 355988

SEQ ID NO: 385637 - DNA, 999 bp, Homo Sapiens; identical to SEQ ID NO: 355990
  misc_feature (996)..(996): n is a, c, g, or t

SEQ ID NO: 385638 - DNA, 1782 bp, Homo Sapiens; identical to SEQ ID NO: 355991
  misc_feature (102)..(102): n is a, c, g, or t

SEQ ID NO: 385639 - DNA, 2189 bp, Homo Sapiens; identical to SEQ ID NO: 355992

SEQ ID NO: 385640 - DNA, 281 bp, Homo Sapiens; identical to SEQ ID NO: 355993

SEQ ID NO: 385641 - DNA, 1014 bp, Homo Sapiens; identical to SEQ ID NO: 355994

SEQ ID NO: 385642 - DNA, 1014 bp, Homo Sapiens; identical to SEQ ID NO: 355995
  misc_feature (195)..(195): n is a, c, g, or t
  misc_feature (936)..(936): n is a, c, g, or t

SEQ ID NO: 385643 - DNA, 763 bp, Homo Sapiens; identical to SEQ ID NO: 355996

SEQ ID NO: 385644 - DNA, 811 bp, Homo Sapiens; identical to SEQ ID NO: 355997
  misc_feature (394)..(457): n is a, c, g, or t

SEQ ID NO: 385645 - DNA, 266 bp, Homo Sapiens; identical to SEQ ID NO: 355998
  misc_feature (248)..(248): n is a, c, g, or t

SEQ ID NO: 385646 - DNA, 480 bp, Homo Sapiens; identical to SEQ ID NO: 355999
  misc_feature (221)..(284): n is a, c, g, or t

SEQ ID NO: 385647 - DNA, 1384 bp, Homo Sapiens; identical to SEQ ID NO: 356000

SEQ ID NO: 385648 - DNA, 733 bp, Homo Sapiens; identical to SEQ ID NO: 356001

SEQ ID NO: 385649 - DNA, 1213 bp, Homo Sapiens; identical to SEQ ID NO: 356003
  misc_feature (855)..(855): n is a, c, g, or t

SEQ ID NO: 385650 - DNA, 2784 bp, Homo Sapiens; identical to SEQ ID NO: 356004
  misc_feature (800)..(801): n is a, c, g, or t

SEQ ID NO: 385651 - DNA, 1709 bp, Homo Sapiens; identical to SEQ ID NO: 356007
  misc_feature (149)..(149): n is a, c, g, or t
  misc_feature (235)..(235): n is a, c, g, or t
  misc_feature (922)..(922): n is a, c, g, or t
  misc_feature (970)..(970): n is a, c, g, or t
  misc_feature (978)..(980): n is a, c, g, or t
  misc_feature (1014)..(1014): n is a, c, g, or t
  misc_feature (1033)..(1033): n is a, c, g, or t
  misc_feature (1047)..(1048): n is a, c, g, or t
  misc_feature (1053)..(1053): n is a, c, g, or t
  misc_feature (1056)..(1056): n is a, c, g, or t
  misc_feature (1064)..(1065): n is a, c, g, or t
  misc_feature (1069)..(1069): n is a, c, g, or t
  misc_feature (1095)..(1095): n is a, c, g, or t
  misc_feature (1119)..(1119): n is a, c, g, or t
  misc_feature (1125)..(1125): n is a, c, g, or t
  misc_feature (1131)..(1131): n is a, c, g, or t
  misc_feature (1662)..(1662): n is a, c, g, or t
  misc_feature (1686)..(1688): n is a, c, g, or t

SEQ ID NO: 385652 - DNA, 646 bp, Homo Sapiens; identical to SEQ ID NO: 356008
  misc_feature (23)..(23): n is a, c, g, or t
  misc_feature (167)..(167): n is a, c, g, or t

SEQ ID NO: 385653 - DNA, 1091 bp, Homo Sapiens; identical to SEQ ID NO: 356011
  misc_feature (940)..(940): n is a, c, g, or t
  misc_feature (950)..(950): n is a, c, g, or t
  misc_feature (955)..(955): n is a, c, g, or t
  misc_feature (957)..(957): n is a, c, g, or t
  misc_feature (961)..(962): n is a, c, g, or t
  misc_feature (978)..(978): n is a, c, g, or t
  misc_feature (985)..(985): n is a, c, g, or t
  misc_feature (1010)..(1010): n is a, c, g, or t
  misc_feature (1014)..(1014): n is a, c, g, or t
  misc_feature (1021)..(1021): n is a, c, g, or t
  misc_feature (1023)..(1023): n is a, c, g, or t
  misc_feature (1031)..(1031): n is a, c, g, or t
  misc_feature (1038)..(1038): n is a, c, g, or t
  misc_feature (1040)..(1049): n is a, c, g, or t
  misc_feature (1054)..(1054): n is a, c, g, or t
  misc_feature (1061)..(1061): n is a, c, g, or t
  misc_feature (1070)..(1070): n is a, c, g, or t
  misc_feature (1072)..(1073): n is a, c, g, or t

SEQ ID NO: 385654 - DNA, 857 bp, Homo Sapiens; identical to SEQ ID NO: 356012

SEQ ID NO: 385655 - DNA, 1142 bp, Homo Sapiens; identical to SEQ ID NO: 356013

SEQ ID NO: 385656 - DNA, 1828 bp, Homo Sapiens; identical to SEQ ID NO: 356014

SEQ ID NO: 385657 - DNA, 1251 bp, Homo Sapiens; identical to SEQ ID NO: 356015
  misc_feature (513)..(521): n is a, c, g, or t
  misc_feature (685)..(685): n is a, c, g, or t

SEQ ID NO: 385658 - DNA, 1062 bp, Homo Sapiens; identical to SEQ ID NO: 356016

SEQ ID NO: 385659 - DNA, 1023 bp, Homo Sapiens; identical to SEQ ID NO: 356017
  misc_feature (69)..(77): n is a, c, g, or t

SEQ ID NO: 385660 - DNA, 1815 bp, Homo Sapiens; identical to SEQ ID NO: 356021

SEQ ID NO: 385661 - DNA, 1090 bp, Homo Sapiens; identical to SEQ ID NO: 356022

SEQ ID NO: 385662 - DNA, 1128 bp, Homo Sapiens; identical to SEQ ID NO: 356025

SEQ ID NO: 385663 - DNA, 2105 bp, Homo Sapiens; identical to SEQ ID NO: 356026

SEQ ID NO: 385664 - DNA, 1517 bp, Homo Sapiens; identical to SEQ ID NO: 356027
  misc_feature (698)..(706): n is a, c, g, or t
  misc_feature (832)..(910): n is a, c, g, or t
  misc_feature (960)..(972): n is a, c, g, or t
  misc_feature (1022)..(1046): n is a, c, g, or t
  misc_feature (1049)..(1065): n is a, c, g, or t
  misc_feature (1141)..(1141): n is a, c, g, or t
  misc_feature (1157)..(1216): n is a, c, g, or t
  misc_feature (1269)..(1269): n is a, c, g, or t
  misc_feature (1275)..(1275): n is a, c, g, or t
  misc_feature (1410)..(1452): n is a, c, g, or t
  misc_feature (1477)..(1478): n is a, c, g, or t

SEQ ID NO: 385665 - DNA, 1108 bp, Homo Sapiens; identical to SEQ ID NO: 356028

SEQ ID NO: 385666 - DNA, 1723 bp, Homo Sapiens; identical to SEQ ID NO: 356031
  misc_feature (1072)..(1072): n is a, c, g, or t

SEQ ID NO: 385667 - DNA, 663 bp, Homo Sapiens; identical to SEQ ID NO: 356032

SEQ ID NO: 385668 - DNA, 1047 bp, Homo Sapiens; identical to SEQ ID NO: 356035
  misc_feature (710)..(819): n is a, c, g, or t

SEQ ID NO: 385669 - DNA, 1088 bp, Homo Sapiens; identical to SEQ ID NO: 356036
  misc_feature (57)..(93): n is a, c, g, or t

SEQ ID NO: 385670 - DNA, 1029 bp, Homo Sapiens; identical to SEQ ID NO: 356039
  misc_feature (9)..(9): n is a, c, g, or t
  misc_feature (14)..(15): n is a, c, g, or t
  misc_feature (36)..(36): n is a, c, g, or t
  misc_feature (41)..(41): n is a, c, g, or t
  misc_feature (43)..(43): n is a, c, g, or t
  misc_feature (47)..(49): n is a, c, g, or t
  misc_feature (53)..(53): n is a, c, g, or t
  misc_feature (56)..(56): n is a, c, g, or t
  misc_feature (59)..(59): n is a, c, g, or t
  misc_feature (61)..(62): n is a, c, g, or t
  misc_feature (66)..(67): n is a, c, g, or t
  misc_feature (72)..(72): n is a, c, g, or t
  misc_feature (74)..(74): n is a, c, g, or t
  misc_feature (79)..(79): n is a, c, g, or t
  misc_feature (83)..(83): n is a, c, g, or t
  misc_feature (88)..(89): n is a, c, g, or t
  misc_feature (91)..(91): n is a, c, g, or t
  misc_feature (105)..(105): n is a, c, g, or t
  misc_feature (110)..(111): n is a, c, g, or t
  misc_feature (115)..(116): n is a, c, g, or t
  misc_feature (120)..(120): n is a, c, g, or t
  misc_feature (124)..(125): n is a, c, g, or t
  misc_feature (129)..(129): n is a, c, g, or t
  misc_feature (131)..(131): n is a, c, g, or t
  misc_feature (147)..(147): n is a, c, g, or t
  misc_feature (156)..(156): n is a, c, g, or t
  misc_feature (161)..(161): n is a, c, g, or t
  misc_feature (163)..(163): n is a, c, g, or t
  misc_feature (168)..(168): n is a, c, g, or t
  misc_feature (171)..(171): n is a, c, g, or t
  misc_feature (192)..(192): n is a, c, g, or t
  misc_feature (200)..(200): n is a, c, g, or t
  misc_feature (217)..(217): n is a, c, g, or t
  misc_feature (223)..(223): n is a, c, g, or t
  misc_feature (227)..(227): n is a, c, g, or t
  misc_feature (229)..(230): n is a, c, g, or t
  misc_feature (232)..(251): n is a, c, g, or t
  misc_feature (586)..(586): n is a, c, g, or t

SEQ ID NO: 385671 - DNA, 904 bp, Homo Sapiens; identical to SEQ ID NO: 356040
  misc_feature (835)..(835): n is a, c, g, or t

SEQ ID NO: 385672 - DNA, 1336 bp, Homo Sapiens; identical to SEQ ID NO: 356044
  misc_feature (1073)..(1136): n is a, c, g, or t

SEQ ID NO: 385673 - DNA, 1333 bp, Homo Sapiens; identical to SEQ ID NO: 356045
  misc_feature (460)..(510): n is a, c, g, or t

SEQ ID NO: 385674 - DNA, 1493 bp, Homo Sapiens; identical to SEQ ID NO: 356046
  misc_feature (12)..(12): n is a, c, g, or t
  misc_feature (914)..(914): n is a, c, g, or t
  misc_feature (939)..(939): n is a, c, g, or t
  misc_feature (952)..(952): n is a, c, g, or t
  misc_feature (1031)..(1031): n is a, c, g, or t
  misc_feature (1049)..(1049): n is a, c, g, or t
  misc_feature (1290)..(1290): n is a, c, g, or t
  misc_feature (1292)..(1292): n is a, c, g, or t
  misc_feature (1343)..(1343): n is a, c, g, or t
  misc_feature (1363)..(1363): n is a, c, g, or t
  misc_feature (1377)..(1377): n is a, c, g, or t
  misc_feature (1386)..(1386): n is a, c, g, or t
  misc_feature (1425)..(1425): n is a, c, g, or t
  misc_feature (1450)..(1450): n is a, c, g, or t
  misc_feature (1487)..(1487): n is a, c, g, or t

SEQ ID NO: 385675 - DNA, 1084 bp, Homo Sapiens; identical to SEQ ID NO: 356047
  misc_feature (49)..(85): n is a, c, g, or t
  misc_feature (290)..(327): n is a, c, g, or t

SEQ ID NO: 385676 - DNA, 2748 bp, Homo Sapiens; identical to SEQ ID NO: 356048
  misc_feature (51)..(51): n is a, c, g, or t

SEQ ID NO: 385677 - DNA, 524 bp, Homo Sapiens; identical to SEQ ID NO: 77827

SEQ ID NO: 385678 - DNA, 1540 bp, Homo Sapiens; identical to SEQ ID NO: 356051
  misc_feature (10)..(10): n is a, c, g, or t
  misc_feature (18)..(19): n is a, c, g, or t
  misc_feature (26)..(26): n is a, c, g, or t
  misc_feature (36)..(36): n is a, c, g, or t
  misc_feature (42)..(42): n is a, c, g, or t
  misc_feature (54)..(54): n is a, c, g, or t
  misc_feature (59)..(59): n is a, c, g, or t
  misc_feature (63)..(63): n is a, c, g, or t
  misc_feature (88)..(88): n is a, c, g, or t
  misc_feature (103)..(103): n is a, c, g, or t
  misc_feature (109)..(109): n is a, c, g, or t
  misc_feature (1275)..(1337): n is a, c, g, or t

SEQ ID NO: 385679 - DNA, 1098 bp, Homo Sapiens; identical to SEQ ID NO: 356052

SEQ ID NO: 385680 - DNA, 1215 bp, Homo Sapiens; identical to SEQ ID NO: 356053
  misc_feature (160)..(160): n is a, c, g, or t
  misc_feature (208)..(208): n is a, c, g, or t
  misc_feature (225)..(275): n is a, c, g, or t
  misc_feature (550)..(612): n is a, c, g, or t

SEQ ID NO: 385681 - DNA, 176 bp, Homo Sapiens; identical to SEQ ID NO: 356054

SEQ ID NO: 385682 - DNA, 452 bp, Homo Sapiens; identical to SEQ ID NO: 356055
  misc_feature (104)..(104): n is a, c, g, or t

SEQ ID NO: 385683 - DNA, 1047 bp, Homo Sapiens; identical to SEQ ID NO: 356056
  misc_feature (920)..(920): n is a, c, g, or t
  misc_feature (989)..(989): n is a, c, g, or t
  misc_feature (1011)..(1011): n is a, c, g, or t
  misc_feature (1014)..(1014): n is a, c, g, or t
  misc_feature (1020)..(1020): n is a, c, g, or t
  misc_feature (1022)..(1022): n is a, c, g, or t
  misc_feature (1032)..(1032): n is a, c, g, or t

SEQ ID NO: 385684 - DNA, 2057 bp, Homo Sapiens; identical to SEQ ID NO: 356057
  misc_feature (42)..(42): n is a, c, g, or t
  misc_feature (89)..(89): n is a, c, g, or t
  misc_feature (147)..(147): n is a, c, g, or t
  misc_feature (428)..(428): n is a, c, g, or t

SEQ ID NO: 385685 - DNA, 1636 bp, Homo Sapiens; identical to SEQ ID NO: 356058
  misc_feature (1530)..(1552): n is a, c, g, or t

SEQ ID NO: 385686 - DNA, 476 bp, Homo Sapiens; identical to SEQ ID NO: 356059
  misc_feature (364)..(384): n is a, c, g, or t

SEQ ID NO: 385687 - DNA, 506 bp, Homo Sapiens; identical to SEQ ID NO: 356060
  misc_feature (400)..(420): n is a, c, g, or t

SEQ ID NO: 385688 - DNA, 1102 bp, Homo Sapiens; identical to SEQ ID NO: 98939
  misc_feature (895)..(895): n is a, c, g, or t

SEQ ID NO: 385689 - DNA, 2154 bp, Homo Sapiens; identical to SEQ ID NO: 356062

SEQ ID NO: 385690 - DNA, 1743 bp, Homo Sapiens; identical to SEQ ID NO: 356068

SEQ ID NO: 385691 - DNA, 401 bp, Homo Sapiens; identical to SEQ ID NO: 356069

SEQ ID NO: 385692 - DNA, 1487 bp, Homo Sapiens; identical to SEQ ID NO: 356072
  misc_feature (38)..(38): n is a, c, g, or t

SEQ ID NO: 385693 - DNA, 915 bp, Homo Sapiens; identical to SEQ ID NO: 356073

SEQ ID NO: 385694 - DNA, 463 bp, Homo Sapiens; identical to SEQ ID NO: 356074
  misc_feature (21)..(21): n is a, c, g, or t
  misc_feature (29)..(29): n is a, c, g, or t
  misc_feature (39)..(39): n is a, c, g, or t
  misc_feature (244)..(244): n is a, c, g, or t

SEQ ID NO: 385695 - DNA, 1925 bp, Homo Sapiens; identical to SEQ ID NO: 356078
  misc_feature (106)..(106): n is a, c, g, or t

SEQ ID NO: 385696 - DNA, 936 bp, Homo Sapiens; identical to SEQ ID NO: 356079

SEQ ID NO: 385697 - DNA, 2167 bp, Homo Sapiens; identical to SEQ ID NO: 356087

SEQ ID NO: 385698 - DNA, 815 bp, Homo Sapiens; identical to SEQ ID NO: 356088
  misc_feature (34)..(34): n is a, c, g, or t
  misc_feature (100)..(161): n is a, c, g, or t

SEQ ID NO: 385699 - DNA, 1247 bp, Homo Sapiens; identical to SEQ ID NO: 356089

SEQ ID NO: 385700 - DNA, 943 bp, Homo Sapiens; identical to SEQ ID NO: 356090

SEQ ID NO: 385701 - DNA, 994 bp, Homo Sapiens; identical to SEQ ID NO: 356091
  misc_feature (11)..(11): n is a, c, g, or t
  misc_feature (864)..(864): n is a, c, g, or t

SEQ ID NO: 385702 - DNA, 1221 bp, Homo Sapiens; identical to SEQ ID NO: 356092
  misc_feature (169)..(169): n is a, c, g, or t
  misc_feature (1121)..(1157): n is a, c, g, or t

SEQ ID NO: 385703 - DNA, 1552 bp, Homo Sapiens; identical to SEQ ID NO: 356093
  misc_feature (1263)..(1272): n is a, c, g, or t

SEQ ID NO: 385704 - DNA, 502 bp, Homo Sapiens; identical to SEQ ID NO: 356094
  misc_feature (14)..(14): n is a, c, g, or t
  misc_feature (214)..(223): n is a, c, g, or t

SEQ ID NO: 385705 - DNA, 736 bp, Homo Sapiens; identical to SEQ ID NO: 356095

SEQ ID NO: 385706 - DNA, 2166 bp, Homo Sapiens; identical to SEQ ID NO: 356097
  misc_feature (81)..(81): n is a, c, g, or t
  misc_feature (84)..(84): n is a, c, g, or t
  misc_feature (96)..(120): n is a, c, g, or t
  misc_feature (127)..(127): n is a, c, g, or t
  misc_feature (163)..(163): n is a, c, g, or t
  misc_feature (174)..(174): n is a, c, g, or t
  misc_feature (318)..(318): n is a, c, g, or t
  misc_feature (343)..(343): n is a, c, g, or t
  misc_feature (345)..(345): n is a, c, g, or t
  misc_feature (362)..(396): n is a, c, g, or t
  misc_feature (541)..(541): n is a, c, g, or t
  misc_feature (1439)..(1439): n is a, c, g, or t
  misc_feature (2163)..(2163): n is a, c, g, or t

SEQ ID NO: 385707 - DNA, 849 bp, Homo Sapiens; identical to SEQ ID NO: 356098

SEQ ID NO: 385708 - DNA, 2173 bp, Homo Sapiens; identical to SEQ ID NO: 356099

SEQ ID NO: 385709 - DNA, 910 bp, Homo Sapiens; identical to SEQ ID NO: 356100

SEQ ID NO: 385710 - DNA, 1165 bp, Homo Sapiens; identical to SEQ ID NO: 356101

SEQ ID NO: 385711 - DNA, 818 bp, Homo Sapiens; identical to SEQ ID NO: 356102

SEQ ID NO: 385712 - DNA, 1197 bp, Homo Sapiens; identical to SEQ ID NO: 356103

SEQ ID NO: 385713 - DNA, 624 bp, Homo Sapiens; identical to SEQ ID NO: 356105
  misc_feature (471)..(471): n is a, c, g, or t
  misc_feature (586)..(586): n is a, c, g, or t

SEQ ID NO: 385714 - DNA, 193 bp, Homo Sapiens; identical to SEQ ID NO: 356106

SEQ ID NO: 385715 - DNA, 977 bp, Homo Sapiens; identical to SEQ ID NO: 356107
  misc_feature (624)..(675): n is a, c, g, or t

SEQ ID NO: 385716 - DNA, 1808 bp, Homo Sapiens; identical to SEQ ID NO: 356108

SEQ ID NO: 385717 - DNA, 878 bp, Homo Sapiens; identical to SEQ ID NO: 356109

SEQ ID NO: 385718 - DNA, 693 bp, Homo Sapiens; identical to SEQ ID NO: 356113
  misc_feature (26)..(26): n is a, c, g, or t
  misc_feature (96)..(96): n is a, c, g, or t
  misc_feature (489)..(499): n is a, c, g, or t
  misc_feature (506)..(595): n is a, c, g, or t

SEQ ID NO: 385719 - DNA, 1805 bp, Homo Sapiens; identical to SEQ ID NO: 356114
  misc_feature (488)..(488): n is a, c, g, or t
  misc_feature (1085)..(1085): n is a, c, g, or t
  misc_feature (1267)..(1356): n is a, c, g, or t

SEQ ID NO: 385720 - DNA, 612 bp, Homo Sapiens; identical to SEQ ID NO: 356115
  misc_feature (451)..(510): n is a, c, g, or t

SEQ ID NO: 385721 - DNA, 1099 bp, Homo Sapiens; identical to SEQ ID NO: 356116
  misc_feature (44)..(76): n is a, c, g, or t

SEQ ID NO: 385722 - DNA, 1069 bp, Homo Sapiens; identical to SEQ ID NO: 356117

SEQ ID NO: 385723 - DNA, 902 bp, Homo Sapiens; identical to SEQ ID NO: 356118

SEQ ID NO: 385724 - DNA, 901 bp, Homo Sapiens; identical to SEQ ID NO: 356119

SEQ ID NO: 385725 - DNA, 1799 bp, Homo Sapiens; identical to SEQ ID NO: 356120

SEQ ID NO: 385726 - DNA, 1072 bp, Homo Sapiens; identical to SEQ ID NO: 356122
  misc_feature (21)..(21): n is a, c, g, or t
  misc_feature (54)..(54): n is a, c, g, or t
  misc_feature (82)..(82): n is a, c, g, or t
  misc_feature (141)..(263): n is a, c, g, or t
  misc_feature (939)..(939): n is a, c, g, or t
  misc_feature (957)..(957): n is a, c, g, or t
  misc_feature (982)..(982): n is a, c, g, or t
  misc_feature (1011)..(1011): n is a, c, g, or t

SEQ ID NO: 385727 - DNA, 1184 bp, Homo Sapiens; identical to SEQ ID NO: 356123
  misc_feature (71)..(91): n is a, c, g, or t
  misc_feature (231)..(253): n is a, c, g, or t
  misc_feature (736)..(858): n is a, c, g, or t

SEQ ID NO: 385728 - DNA, 1607 bp, Homo Sapiens; identical to SEQ ID NO: 356128

SEQ ID NO: 385729 - DNA, 1128 bp, Homo Sapiens; identical to SEQ ID NO: 356129
  misc_feature (965)..(965): n is a, c, g, or t
  misc_feature (975)..(975): n is a, c, g, or t
  misc_feature (985)..(985): n is a, c, g, or t
  misc_feature (1030)..(1030): n is a, c, g, or t
  misc_feature (1043)..(1043): n is a, c, g, or t
  misc_feature (1048)..(1048): n is a, c, g, or t
  misc_feature (1055)..(1055): n is a, c, g, or t
  misc_feature (1080)..(1080): n is a, c, g, or t
  misc_feature (1092)..(1092): n is a, c, g, or t
  misc_feature (1106)..(1106): n is a, c, g, or t
  misc_feature (1116)..(1116): n is a, c, g, or t

SEQ ID NO: 385730 - DNA, 1008 bp, Homo Sapiens; identical to SEQ ID NO: 356130
  misc_feature (912)..(912): n is a, c, g, or t

SEQ ID NO: 385731 - DNA, 1072 bp, Homo Sapiens; identical to SEQ ID NO: 356131

SEQ ID NO: 385732 - DNA, 1692 bp, Homo Sapiens; identical to SEQ ID NO: 356135

SEQ ID NO: 385733 - DNA, 645 bp, Homo Sapiens; identical to SEQ ID NO: 356136
  misc_feature (48)..(48): n is a, c, g, or t

SEQ ID NO: 385734 - DNA, 862 bp, Homo Sapiens; identical to SEQ ID NO: 356143

SEQ ID NO: 385735 - DNA, 2459 bp, Homo Sapiens; identical to SEQ ID NO: 356144
  misc_feature (1993)..(2054): n is a, c, g, or t

SEQ ID NO: 385736 - DNA, 1122 bp, Homo Sapiens; identical to SEQ ID NO: 356146
  misc_feature (903)..(903): n is a, c, g, or t
  misc_feature (963)..(963): n is a, c, g, or t
  misc_feature (987)..(987): n is a, c, g, or t
  misc_feature (1002)..(1002): n is a, c, g, or t
  misc_feature (1004)..(1004): n is a, c, g, or t
  misc_feature (1008)..(1008): n is a, c, g, or t
  misc_feature (1025)..(1025): n is a, c, g, or t
  misc_feature (1046)..(1046): n is a, c, g, or t
  misc_feature (1048)..(1048): n is a, c, g, or t
  misc_feature (1050)..(1050): n is a, c, g, or t
  misc_feature (1060)..(1060): n is a, c, g, or t
  misc_feature (1071)..(1071): n is a, c, g, or t
  misc_feature (1073)..(1073): n is a, c, g, or t
  misc_feature (1086)..(1086): n is a, c, g, or t
  misc_feature (1093)..(1093): n is a, c, g, or t
  misc_feature (1096)..(1096): n is a, c, g, or t
  misc_feature (1098)..(1098): n is a, c, g, or t
  misc_feature (1100)..(1100): n is a, c, g, or t
  misc_feature (1102)..(1102): n is a, c, g, or t
  misc_feature (1107)..(1107): n is a, c, g, or t
  misc_feature (1116)..(1116): n is a, c, g, or t
  misc_feature (1118)..(1118): n is a, c, g, or t

SEQ ID NO: 385737 - DNA, 2559 bp, Homo Sapiens; identical to SEQ ID NO: 356147
  misc_feature (1006)..(1006): n is a, c, g, or t
  misc_feature (1185)..(1185): n is a, c, g, or t
  misc_feature (2450)..(2487): n is a, c, g, or t
  misc_feature (2490)..(2498): n is a, c, g, or t

SEQ ID NO: 385738 - DNA, 748 bp, Homo Sapiens; identical to SEQ ID NO: 356148

SEQ ID NO: 385739 - DNA, 1030 bp, Homo Sapiens; identical to SEQ ID NO: 356151
  misc_feature (50)..(50): n is a, c, g, or t
  misc_feature (67)..(67): n is a, c, g, or t
  misc_feature (75)..(75): n is a, c, g, or t
  misc_feature (84)..(84): n is a, c, g, or t
  misc_feature (546)..(546): n is a, c, g, or t
  misc_feature (548)..(549): n is a, c, g, or t
  misc_feature (551)..(551): n is a, c, g, or t
  misc_feature (553)..(563): n is a, c, g, or t
  misc_feature (568)..(569): n is a, c, g, or t
  misc_feature (575)..(575): n is a, c, g, or t
  misc_feature (603)..(603): n is a, c, g, or t
  misc_feature (605)..(605): n is a, c, g, or t
  misc_feature (667)..(667): n is a, c, g, or t
  misc_feature (702)..(702): n is a, c, g, or t
  misc_feature (743)..(743): n is a, c, g, or t
  misc_feature (747)..(748): n is a, c, g, or t
  misc_feature (793)..(793): n is a, c, g, or t
  misc_feature (804)..(805): n is a, c, g, or t
  misc_feature (810)..(810): n is a, c, g, or t
  misc_feature (821)..(821): n is a, c, g, or t
  misc_feature (829)..(829): n is a, c, g, or t
  misc_feature (831)..(831): n is a, c, g, or t
  misc_feature (836)..(837): n is a, c, g, or t
  misc_feature (840)..(840): n is a, c, g, or t
  misc_feature (842)..(842): n is a, c, g, or t
  misc_feature (856)..(856): n is a, c, g, or t
  misc_feature (889)..(889): n is a, c, g, or t
  misc_feature (892)..(892): n is a, c, g, or t
  misc_feature (894)..(894): n is a, c, g, or t
  misc_feature (896)..(896): n is a, c, g, or t
  misc_feature (898)..(898): n is a, c, g, or t
  misc_feature (900)..(900): n is a, c, g, or t
  misc_feature (905)..(905): n is a, c, g, or t
  misc_feature (908)..(908): n is a, c, g, or t
  misc_feature (917)..(917): n is a, c, g, or t
  misc_feature (924)..(924): n is a, c, g, or t
  misc_feature (935)..(935): n is a, c, g, or t
  misc_feature (950)..(950): n is a, c, g, or t
  misc_feature (968)..(968): n is a, c, g, or t
  misc_feature (981)..(981): n is a, c, g, or t
  misc_feature (994)..(996): n is a, c, g, or t
  misc_feature (1005)..(1005): n is a, c, g, or t
  misc_feature (1011)..(1011): n is a, c, g, or t
  misc_feature (1015)..(1015): n is a, c, g, or t

SEQ ID NO: 385740 - DNA, 2215 bp, Homo Sapiens; identical to SEQ ID NO: 356152
  misc_feature (1680)..(1688): n is a, c, g, or t
  misc_feature (1718)..(1737): n is a, c, g, or t
  misc_feature (1976)..(1976): n is a, c, g, or t
  misc_feature (2193)..(2193): n is a, c, g, or t

SEQ ID NO: 385741 - DNA, 2124 bp, Homo Sapiens; identical to SEQ ID NO: 356158
  misc_feature (18)..(18): n is a, c, g, or t
  misc_feature (199)..(226): n is a, c, g, or t
  misc_feature (1707)..(1707): n is a, c, g, or t
  misc_feature (1714)..(1714): n is a, c, g, or t

SEQ ID NO: 385742 - DNA, 1107 bp, Homo Sapiens; identical to SEQ ID NO: 356159
  misc_feature (101)..(170): n is a, c, g, or t
  misc_feature (569)..(582): n is a, c, g, or t
  misc_feature (616)..(616): n is a, c, g, or t
  misc_feature (620)..(620): n is a, c, g, or t
  misc_feature (628)..(628): n is a, c, g, or t
  misc_feature (917)..(957): n is a, c, g, or t

SEQ ID NO: 385743 - DNA, 1657 bp, Homo Sapiens; identical to SEQ ID NO: 356162
  misc_feature (443)..(443): n is a, c, g, or t

SEQ ID NO: 385744 - DNA, 457 bp, Homo Sapiens; identical to SEQ ID NO: 356163
  misc_feature (21)..(21): n is a, c, g, or t
  misc_feature (80)..(80): n is a, c, g, or t
  misc_feature (98)..(98): n is a, c, g, or t

SEQ ID NO: 385745 - DNA, 1175 bp, Homo Sapiens; identical to SEQ ID NO: 356165
  misc_feature (897)..(897): n is a, c, g, or t
  misc_feature (900)..(900): n is a, c, g, or t
  misc_feature (902)..(902): n is a, c, g, or t
  misc_feature (1007)..(1007): n is a, c, g, or t
  misc_feature (1018)..(1018): n is a, c, g, or t
  misc_feature (1022)..(1022): n is a, c, g, or t
  misc_feature (1055)..(1055): n is a, c, g, or t
  misc_feature (1080)..(1080): n is a, c, g, or t
  misc_feature (1099)..(1099): n is a, c, g, or t

SEQ ID NO: 385746 - DNA, 1065 bp, Homo Sapiens; identical to SEQ ID NO: 356166
  misc_feature (87)..(87): n is a, c, g, or t
  misc_feature (142)..(142): n is a, c, g, or t
  misc_feature (168)..(168): n is a, c, g, or t
  misc_feature (186)..(186): n is a, c, g, or t
  misc_feature (189)..(189): n is a, c, g, or t
  misc_feature (223)..(223): n is a, c, g, or t
  misc_feature (246)..(246): n is a, c, g, or t
  misc_feature (257)..(257): n is a, c, g, or t
  misc_feature (288)..(288): n is a, c, g, or t
  misc_feature (296)..(296): n is a, c, g, or t
  misc_feature (308)..(308): n is a, c, g, or t
  misc_feature (315)..(315): n is a, c, g, or t
  misc_feature (334)..(334): n is a, c, g, or t
  misc_feature (358)..(358): n is a, c, g, or t
  misc_feature (364)..(364): n is a, c, g, or t
  misc_feature (706)..(934): n is a, c, g, or t
  misc_feature (936)..(936): n is a, c, g, or t
  misc_feature (938)..(938): n is a, c, g, or t
  misc_feature (944)..(944): n is a, c, g, or t
  misc_feature (947)..(947): n is a, c, g, or t
  misc_feature (966)..(966): n is a, c, g, or t
  misc_feature (971)..(984): n is a, c, g, or t
  misc_feature (987)..(987): n is a, c, g, or t
  misc_feature (989)..(989): n is a, c, g, or t
  misc_feature (1003)..(1003): n is a, c, g, or t
  misc_feature (1012)..(1013): n is a, c, g, or t
  misc_feature (1016)..(1016): n is a, c, g, or t
  misc_feature (1022)..(1023): n is a, c, g, or t
  misc_feature (1026)..(1026): n is a, c, g, or t
  misc_feature (1030)..(1030): n is a, c, g, or t
  misc_feature (1039)..(1039): n is a, c, g, or t
  misc_feature (1043)..(1043): n is a, c, g, or t
  misc_feature (1050)..(1050): n is a, c, g, or t
  misc_feature (1052)..(1052): n is a, c, g, or t

SEQ ID NO: 385747 - DNA, 700 bp, Homo Sapiens; identical to SEQ ID NO: 356167

SEQ ID NO: 385748 - DNA, 460 bp, Homo Sapiens; identical to SEQ ID NO: 356168

SEQ ID NO: 385749 - DNA, 2075 bp, Homo Sapiens; identical to SEQ ID NO: 356169
  misc_feature (152)..(152): n is a, c, g, or t
  misc_feature (154)..(154): n is a, c, g, or t
  misc_feature (165)..(165): n is a, c, g, or t
  misc_feature (175)..(175): n is a, c, g, or t
  misc_feature (179)..(179): n is a, c, g, or t
  misc_feature (183)..(183): n is a, c, g, or t
  misc_feature (200)..(200): n is a, c, g, or t
  misc_feature (204)..(204): n is a, c, g, or t
  misc_feature (207)..(207): n is a, c, g, or t
  misc_feature (212)..(212): n is a, c, g, or t
  misc_feature (219)..(219): n is a, c, g, or t
  misc_feature (222)..(238): n is a, c, g, or t
  misc_feature (261)..(261): n is a, c, g, or t
  misc_feature (267)..(267): n is a, c, g, or t
  misc_feature (271)..(271): n is a, c, g, or t
  misc_feature (273)..(273): n is a, c, g, or t
  misc_feature (276)..(276): n is a, c, g, or t
  misc_feature (278)..(278): n is a, c, g, or t
  misc_feature (282)..(283): n is a, c, g, or t
  misc_feature (287)..(287): n is a, c, g, or t
  misc_feature (298)..(298): n is a, c, g, or t
  misc_feature (302)..(302): n is a, c, g, or t
  misc_feature (304)..(306): n is a, c, g, or t
  misc_feature (325)..(404): n is a, c, g, or t
  misc_feature (416)..(446): n is a, c, g, or t
  misc_feature (449)..(449): n is a, c, g, or t
  misc_feature (520)..(520): n is a, c, g, or t

SEQ ID NO: 385750 - DNA, 822 bp, Homo Sapiens; identical to SEQ ID NO: 356170

SEQ ID NO: 385751 - DNA, 736 bp, Homo Sapiens; identical to SEQ ID NO: 356181

SEQ ID NO: 385752 - DNA, 1118 bp, Homo Sapiens; identical to SEQ ID NO: 356182

SEQ ID NO: 385753 - DNA, 493 bp, Homo Sapiens; identical to SEQ ID NO: 356183
  misc_feature (25)..(25): n is a, c, g, or t
  misc_feature (37)..(37): n is a, c, g, or t
  misc_feature (51)..(51): n is a, c, g, or t
  misc_feature (61)..(61): n is a, c, g, or t
  misc_feature (97)..(97): n is a, c, g, or t

SEQ ID NO: 385754 - DNA, 1652 bp, Homo Sapiens; identical to SEQ ID NO: 356187
  misc_feature (988)..(988): n is a, c, g, or t
  misc_feature (1014)..(1014): n is a, c, g, or t
  misc_feature (1022)..(1026): n is a, c, g, or t
  misc_feature (1080)..(1080): n is a, c, g, or t
  misc_feature (1082)..(1082): n is a, c, g, or t
  misc_feature (1194)..(1194): n is a, c, g, or t
  misc_feature (1235)..(1235): n is a, c, g, or t
  misc_feature (1259)..(1259): n is a, c, g, or t

SEQ ID NO: 385755 - DNA, 799 bp, Homo Sapiens; identical to SEQ ID NO: 356188

SEQ ID NO: 385756 - DNA, 1023 bp, Homo Sapiens; identical to SEQ ID NO: 356192
  misc_feature (161)..(223): n is a, c, g, or t

SEQ ID NO: 385757 - DNA, 1153 bp, Homo Sapiens; identical to SEQ ID NO: 356193
  misc_feature (67)..(67): n is a, c, g, or t
  misc_feature (105)..(105): n is a, c, g, or t
  misc_feature (201)..(201): n is a, c, g, or t

SEQ ID NO: 385758 - DNA, 2196 bp, Homo Sapiens; identical to SEQ ID NO: 356194

SEQ ID NO: 385759 - DNA, 1888 bp, Homo Sapiens; identical to SEQ ID NO: 356197
  misc_feature (284)..(318): n is a, c, g, or t

SEQ ID NO: 385760 - DNA, 2224 bp, Homo Sapiens; identical to SEQ ID NO: 356198
  misc_feature (40)..(40): n is a, c, g, or t
  misc_feature (1751)..(1768): n is a, c, g, or t

SEQ ID NO: 385761 - DNA, 1095 bp, Homo Sapiens; identical to SEQ ID NO: 356199
  misc_feature (690)..(724): n is a, c, g, or t

SEQ ID NO: 385762 - DNA, 981 bp, Homo Sapiens; identical to SEQ ID NO: 356200
  misc_feature (54)..(90): n is a, c, g, or t

SEQ ID NO: 385763 - DNA, 1355 bp, Homo Sapiens; identical to SEQ ID NO: 356201
  misc_feature (35)..(35): n is a, c, g, or t
  misc_feature (48)..(48): n is a, c, g, or t
  misc_feature (62)..(98): n is a, c, g, or t

SEQ ID NO: 385764 - DNA, 1448 bp, Homo Sapiens; identical to SEQ ID NO: 356203
  misc_feature (15)..(15): n is a, c, g, or t
  misc_feature (22)..(22): n is a, c, g, or t
  misc_feature (29)..(29): n is a, c, g, or t
  misc_feature (50)..(51): n is a, c, g, or t
  misc_feature (55)..(121): n is a, c, g, or t
  misc_feature (128)..(128): n is a, c, g, or t
  misc_feature (142)..(142): n is a, c, g, or t
  misc_feature (165)..(165): n is a, c, g, or t
  misc_feature (169)..(181): n is a, c, g, or t
  misc_feature (185)..(186): n is a, c, g, or t
  misc_feature (195)..(195): n is a, c, g, or t
  misc_feature (219)..(219): n is a, c, g, or t
  misc_feature (224)..(224): n is a, c, g, or t
  misc_feature (229)..(230): n is a, c, g, or t
  misc_feature (236)..(236): n is a, c, g, or t
  misc_feature (243)..(243): n is a, c, g, or t
  misc_feature (259)..(260): n is a, c, g, or t
  misc_feature (269)..(269): n is a, c, g, or t
  misc_feature (287)..(287): n is a, c, g, or t
  misc_feature (293)..(294): n is a, c, g, or t
  misc_feature (302)..(396): n is a, c, g, or t
  misc_feature (404)..(404): n is a, c, g, or t
  misc_feature (423)..(423): n is a, c, g, or t
  misc_feature (425)..(425): n is a, c, g, or t
  misc_feature (427)..(427): n is a, c, g, or t
  misc_feature (431)..(431): n is a, c, g, or t
  misc_feature (445)..(445): n is a, c, g, or t
  misc_feature (459)..(459): n is a, c, g, or t
  misc_feature (493)..(493): n is a, c, g, or t

SEQ ID NO: 385765 - DNA, 982 bp, Homo Sapiens; identical to SEQ ID NO: 356204
  misc_feature (13)..(13): n is a, c, g, or t
  misc_feature (16)..(16): n is a, c, g, or t
  misc_feature (52)..(52): n is a, c, g, or t

SEQ ID NO: 385766 - DNA, 519 bp, Homo Sapiens; identical to SEQ ID NO: 356205

SEQ ID NO: 385767 - DNA, 1078 bp, Homo Sapiens; identical to SEQ ID NO: 356206

SEQ ID NO: 385768 - DNA, 606 bp, Homo Sapiens; identical to SEQ ID NO: 356207

SEQ ID NO: 385769 - DNA, 1113 bp, Homo Sapiens; identical to SEQ ID NO: 356209
  misc_feature (929)..(930): n is a, c, g, or t
  misc_feature (943)..(943): n is a, c, g, or t
  misc_feature (950)..(950): n is a, c, g, or t
  misc_feature (964)..(964): n is a, c, g, or t
  misc_feature (974)..(974): n is a, c, g, or t
  misc_feature (996)..(996): n is a, c, g, or t
  misc_feature (1001)..(1001): n is a, c, g, or t
  misc_feature (1003)..(1004): n is a, c, g, or t
  misc_feature (1020)..(1020): n is a, c, g, or t
  misc_feature (1032)..(1032): n is a, c, g, or t
  misc_feature (1040)..(1040): n is a, c, g, or t
  misc_feature (1048)..(1048): n is a, c, g, or t
  misc_feature (1056)..(1056): n is a, c, g, or t
  misc_feature (1070)..(1070): n is a, c, g, or t
  misc_feature (1074)..(1074): n is a, c, g, or t
  misc_feature (1080)..(1080): n is a, c, g, or t
  misc_feature (1084)..(1084): n is a, c, g, or t
  misc_feature (1090)..(1090): n is a, c, g, or t
  misc_feature (1092)..(1092): n is a, c, g, or t
  misc_feature (1097)..(1097): n is a, c, g, or t
  misc_feature (1107)..(1107): n is a, c, g, or t

SEQ ID NO: 385770 - DNA, 818 bp, Homo Sapiens; identical to SEQ ID NO: 356210

SEQ ID NO: 385771 - DNA, 899 bp, Homo Sapiens; identical to SEQ ID NO: 356211
  misc_feature (668)..(668): n is a, c, g, or t
  misc_feature (719)..(719): n is a, c, g, or t
  misc_feature (741)..(741): n is a, c, g, or t
  misc_feature (747)..(748): n is a, c, g, or t
  misc_feature (751)..(751): n is a, c, g, or t
  misc_feature (845)..(845): n is a, c, g, or t
  misc_feature (851)..(851): n is a, c, g, or t
  misc_feature (854)..(854): n is a, c, g, or t
  misc_feature (857)..(857): n is a, c, g, or t
  misc_feature (861)..(861): n is a, c, g, or t
  misc_feature (870)..(870): n is a, c, g, or t

SEQ ID NO: 385772 - DNA, 1650 bp, Homo Sapiens; identical to SEQ ID NO: 356212

SEQ ID NO: 385773 - DNA, 440 bp, Homo Sapiens; identical to SEQ ID NO: 356213
  misc_feature (37)..(37): n is a, c, g, or t

SEQ ID NO: 385774 - DNA, 2351 bp, Homo Sapiens; identical to SEQ ID NO: 356214
  misc_feature (46)..(73): n is a, c, g, or t
  misc_feature (1514)..(1529): n is a, c, g, or t
  misc_feature (1683)..(1733): n is a, c, g, or t
  misc_feature (2188)..(2218): n is a, c, g, or t

SEQ ID NO: 385775 - DNA, 373 bp, Homo Sapiens; identical to SEQ ID NO: 356215

SEQ ID NO: 385776 - DNA, 267 bp, Homo Sapiens; identical to SEQ ID NO: 356216

SEQ ID NO: 385777 - DNA, 1853 bp, Homo Sapiens; identical to SEQ ID NO: 356222
  misc_feature (70)..(127): n is a, c, g, or t

SEQ ID NO: 385778 - DNA, 1076 bp, Homo Sapiens; identical to SEQ ID NO: 356223

SEQ ID NO: 385779 - DNA, 974 bp, Homo Sapiens; identical to SEQ ID NO: 356225
  misc_feature (5)..(5): n is a, c, g, or t
  misc_feature (12)..(12): n is a, c, g, or t
  misc_feature (29)..(29): n is a, c, g, or t
  misc_feature (33)..(33): n is a, c, g, or t
  misc_feature (48)..(48): n is a, c, g, or t
  misc_feature (68)..(68): n is a, c, g, or t
  misc_feature (84)..(85): n is a, c, g, or t

SEQ ID NO: 385780 - DNA, 1026 bp, Homo Sapiens; identical to SEQ ID NO: 356226
  misc_feature (16)..(16): n is a, c, g, or t
  misc_feature (22)..(22): n is a, c, g, or t

SEQ ID NO: 385781 - DNA, 1885 bp, Homo Sapiens; identical to SEQ ID NO: 356227
  misc_feature (94)..(139): n is a, c, g, or t
  misc_feature (1235)..(1247): n is a, c, g, or t
  misc_feature (1365)..(1376): n is a, c, g, or t

SEQ ID NO: 385782 - DNA, 475 bp, Homo Sapiens; identical to SEQ ID NO: 356228
  misc_feature (117)..(162): n is a, c, g, or t

SEQ ID NO: 385783 - DNA, 955 bp, Homo Sapiens; identical to SEQ ID NO: 356229
  misc_feature (942)..(942): n is a, c, g, or t
  misc_feature (948)..(949): n is a, c, g, or t

SEQ ID NO: 385784 - DNA, 1043 bp, Homo Sapiens; identical to SEQ ID NO: 356230
  misc_feature (23)..(23): n is a, c, g, or t

SEQ ID NO: 385785 - DNA, 1281 bp, Homo Sapiens; identical to SEQ ID NO: 356231

SEQ ID NO: 385786 - DNA, 1210 bp, Homo Sapiens; identical to SEQ ID NO: 356232

SEQ ID NO: 385787 - DNA, 2202 bp, Homo Sapiens; identical to SEQ ID NO: 356233
  misc_feature (294)..(315): n is a, c, g, or t
  misc_feature (324)..(576): n is a, c, g, or t
  misc_feature (1241)..(1241): n is a, c, g, or t
  misc_feature (1326)..(1326): n is a, c, g, or t
  misc_feature (1531)..(1531): n is a, c, g, or t
  misc_feature (1580)..(1617): n is a, c, g, or t

SEQ ID NO: 385788 - DNA, 989 bp, Homo Sapiens; identical to SEQ ID NO: 356234
  misc_feature (250)..(502): n is a, c, g, or t
  misc_feature (511)..(532): n is a, c, g, or t
  misc_feature (876)..(876): n is a, c, g, or t
  misc_feature (882)..(882): n is a, c, g, or t
  misc_feature (909)..(909): n is a, c, g, or t
  misc_feature (953)..(953): n is a, c, g, or t
  misc_feature (963)..(964): n is a, c, g, or t

SEQ ID NO: 385789 - DNA, 1022 bp, Homo Sapiens; identical to SEQ ID NO: 356238
  misc_feature (951)..(951): n is a, c, g, or t
  misc_feature (955)..(955): n is a, c, g, or t
  misc_feature (966)..(967): n is a, c, g, or t
  misc_feature (974)..(974): n is a, c, g, or t
  misc_feature (1001)..(1001): n is a, c, g, or t
  misc_feature (1004)..(1004): n is a, c, g, or t
  misc_feature (1013)..(1013): n is a, c, g, or t

SEQ ID NO: 385790 - DNA, 886 bp, Homo Sapiens; identical to SEQ ID NO: 356239
  misc_feature (266)..(266): n is a, c, g, or t
  misc_feature (367)..(367): n is a, c, g, or t

SEQ ID NO: 385791 - DNA, 1138 bp, Homo Sapiens; identical to SEQ ID NO: 356240

SEQ ID NO: 385792 - DNA, 1209 bp, Homo Sapiens; identical to SEQ ID NO: 356241
  misc_feature (1007)..(1008): n is a, c, g, or t

SEQ ID NO: 385793 - DNA, 1008 bp, Homo Sapiens; identical to SEQ ID NO: 356246
  misc_feature (776)..(794): n is a, c, g, or t
  misc_feature (827)..(827): n is a, c, g, or t
  misc_feature (904)..(904): n is a, c, g, or t
  misc_feature (909)..(909): n is a, c, g, or t
  misc_feature (913)..(913): n is a, c, g, or t
  misc_feature (918)..(918): n is a, c, g, or t
  misc_feature (945)..(945): n is a, c, g, or t
  misc_feature (947)..(947): n is a, c, g, or t
  misc_feature (949)..(949): n is a, c, g, or t
  misc_feature (954)..(954): n is a, c, g, or t
  misc_feature (957)..(957): n is a, c, g, or t
  misc_feature (973)..(973): n is a, c, g, or t
  misc_feature (976)..(977): n is a, c, g, or t
  misc_feature (979)..(979): n is a, c, g, or t
  misc_feature (984)..(984): n is a, c, g, or t
  misc_feature (987)..(987): n is a, c, g, or t
  misc_feature (989)..(989): n is a, c, g, or t
  misc_feature (994)..(994): n is a, c, g, or t
  misc_feature (1002)..(1002): n is a, c, g, or t
  misc_feature (1004)..(1004): n is a, c, g, or t
  misc_feature (1007)..(1007): n is a, c, g, or t

SEQ ID NO: 385794 - DNA, 2397 bp, Homo Sapiens; identical to SEQ ID NO: 356247
  misc_feature (47)..(47): n is a, c, g, or t
  misc_feature (49)..(49): n is a, c, g, or t
  misc_feature (55)..(55): n is a, c, g, or t
  misc_feature (167)..(167): n is a, c, g, or t
  misc_feature (292)..(292): n is a, c, g, or t
  misc_feature (372)..(372): n is a, c, g, or t
  misc_feature (460)..(460): n is a, c, g, or t
  misc_feature (1951)..(1968): n is a, c, g, or t
  misc_feature (2316)..(2324): n is a, c, g, or t

SEQ ID NO: 385795 - DNA, 1071 bp, Homo Sapiens; identical to SEQ ID NO: 356248
  misc_feature (1038)..(1038): n is a, c, g, or t
  misc_feature (1045)..(1045): n is a, c, g, or t
  misc_feature (1047)..(1047): n is a, c, g, or t

SEQ ID NO: 385796 - DNA, 1815 bp, Homo Sapiens; identical to SEQ ID NO: 356249

SEQ ID NO: 385797 - DNA, 862 bp, Homo Sapiens; identical to SEQ ID NO: 356250

SEQ ID NO: 385798 - DNA, 351 bp, Homo Sapiens; identical to SEQ ID NO: 356252

SEQ ID NO: 385799 - DNA, 999 bp, Homo Sapiens; identical to SEQ ID NO: 356253

SEQ ID NO: 385800 - DNA, 790 bp, Homo Sapiens; identical to SEQ ID NO: 356254
  misc_feature (6)..(6): n is a, c, g, or t
  misc_feature (8)..(9): n is a, c, g, or t
  misc_feature (53)..(53): n is a, c, g, or t
  misc_feature (61)..(61): n is a, c, g, or t

SEQ ID NO: 385801 - DNA, 2062 bp, Homo Sapiens; identical to SEQ ID NO: 356255
  misc_feature (1810)..(1811): n is a, c, g, or t

SEQ ID NO: 385802 - DNA, 909 bp, Homo Sapiens; identical to SEQ ID NO: 356256
  misc_feature (54)..(90): n is a, c, g, or t

SEQ ID NO: 385803 - DNA, 1509 bp, Homo Sapiens; identical to SEQ ID NO: 356257

SEQ ID NO: 385804 - DNA, 1173 bp, Homo Sapiens; identical to SEQ ID NO: 356258

SEQ ID NO: 385805 - DNA, 2830 bp, Homo Sapiens; identical to SEQ ID NO: 356259
  misc_feature (3)..(3): n is a, c, g, or t
  misc_feature (21)..(21): n is a, c, g, or t
  misc_feature (37)..(37): n is a, c, g, or t
  misc_feature (80)..(80): n is a, c, g, or t
  misc_feature (82)..(82): n is a, c, g, or t
  misc_feature (93)..(93): n is a, c, g, or t
  misc_feature (100)..(100): n is a, c, g, or t
  misc_feature (135)..(135): n is a, c, g, or t
  misc_feature (137)..(137): n is a, c, g, or t
  misc_feature (151)..(151): n is a, c, g, or t
  misc_feature (159)..(159): n is a, c, g, or t
  misc_feature (185)..(185): n is a, c, g, or t
  misc_feature (187)..(187): n is a, c, g, or t
  misc_feature (203)..(203): n is a, c, g, or t
  misc_feature (206)..(206): n is a, c, g, or t
  misc_feature (211)..(211): n is a, c, g, or t
  misc_feature (220)..(220): n is a, c, g, or t
  misc_feature (227)..(227): n is a, c, g, or t
  misc_feature (239)..(240): n is a, c, g, or t
  misc_feature (242)..(242): n is a, c, g, or t
  misc_feature (245)..(247): n is a, c, g, or t
  misc_feature (251)..(252): n is a, c, g, or t
  misc_feature (256)..(256): n is a, c, g, or t
  misc_feature (261)..(262): n is a, c, g, or t
  misc_feature (271)..(272): n is a, c, g, or t
  misc_feature (288)..(288): n is a, c, g, or t
  misc_feature (296)..(296): n is a, c, g, or t
  misc_feature (300)..(300): n is a, c, g, or t
  misc_feature (313)..(313): n is a, c, g, or t
  misc_feature (322)..(322): n is a, c, g, or t
  misc_feature (349)..(349): n is a, c, g, or t

SEQ ID NO: 385806 - DNA, 621 bp, Homo Sapiens; identical to SEQ ID NO: 356260

SEQ ID NO: 385807 - DNA, 564 bp, Homo Sapiens; identical to SEQ ID NO: 356264

SEQ ID NO: 385808 - DNA, 1092 bp, Homo Sapiens; identical to SEQ ID NO: 356265
  misc_feature (4)..(4): n is a, c, g, or t
  misc_feature (10)..(10): n is a, c, g, or t
  misc_feature (16)..(16): n is a, c, g, or t
  misc_feature (18)..(18): n is a, c, g, or t
  misc_feature (38)..(38): n is a, c, g, or t
  misc_feature (45)..(46): n is a, c, g, or t
  misc_feature (49)..(51): n is a, c, g, or t
  misc_feature (53)..(53): n is a, c, g, or t
  misc_feature (56)..(56): n is a, c, g, or t
  misc_feature (64)..(64): n is a, c, g, or t
  misc_feature (68)..(68): n is a, c, g, or t
  misc_feature (76)..(76): n is a, c, g, or t
  misc_feature (84)..(84): n is a, c, g, or t
  misc_feature (209)..(209): n is a, c, g, or t

SEQ ID NO: 385809 - DNA, 967 bp, Homo Sapiens; identical to SEQ ID NO: 356266

SEQ ID NO: 385810 - DNA, 828 bp, Homo Sapiens; identical to SEQ ID NO: 356268

SEQ ID NO: 385811 - DNA, 3179 bp, Homo Sapiens; identical to SEQ ID NO: 356269
  misc_feature (206)..(246): n is a, c, g, or t
  misc_feature (1310)..(1310): n is a, c, g, or t
  misc_feature (2604)..(2729): n is a, c, g, or t
  misc_feature (2741)..(2751): n is a, c, g, or t
  misc_feature (2776)..(2785): n is a, c, g, or t
  misc_feature (2809)..(2955): n is a, c, g, or t
  misc_feature (2971)..(2979): n is a, c, g, or t
  misc_feature (3095)..(3137): n is a, c, g, or t

SEQ ID NO: 385812 - DNA, 1950 bp, Homo Sapiens; identical to SEQ ID NO: 356270
  misc_feature (1494)..(1494): n is a, c, g, or t

SEQ ID NO: 385813 - DNA, 1102 bp, Homo Sapiens; identical to SEQ ID NO: 356271
  misc_feature (5)..(5): n is a, c, g, or t
  misc_feature (8)..(8): n is a, c, g, or t
  misc_feature (17)..(17): n is a, c, g, or t
  misc_feature (25)..(25): n is a, c, g, or t
  misc_feature (27)..(27): n is a, c, g, or t
  misc_feature (34)..(34): n is a, c, g, or t
  misc_feature (36)..(36): n is a, c, g, or t
  misc_feature (69)..(69): n is a, c, g, or t
  misc_feature (75)..(75): n is a, c, g, or t
  misc_feature (91)..(91): n is a, c, g, or t
  misc_feature (98)..(98): n is a, c, g, or t
  misc_feature (110)..(110): n is a, c, g, or t
  misc_feature (116)..(116): n is a, c, g, or t
  misc_feature (130)..(130): n is a, c, g, or t
  misc_feature (148)..(148): n is a, c, g, or t
  misc_feature (170)..(170): n is a, c, g, or t

SEQ ID NO: 385814 - DNA, 818 bp, Homo Sapiens; identical to SEQ ID NO: 356278

SEQ ID NO: 385815 - DNA, 1169 bp, Homo Sapiens; identical to SEQ ID NO: 356279

SEQ ID NO: 385816 - DNA, 1188 bp, Homo Sapiens; identical to SEQ ID NO: 356280
  misc_feature (1129)..(1129): n is a, c, g, or t
  misc_feature (1139)..(1139): n is a, c, g, or t
  misc_feature (1152)..(1152): n is a, c, g, or t
  misc_feature (1161)..(1161): n is a, c, g, or t
  misc_feature (1166)..(1166): n is a, c, g, or t

SEQ ID NO: 385817 - DNA, 1325 bp, Homo Sapiens; identical to SEQ ID NO: 356281
  misc_feature (1066)..(1066): n is a, c, g, or t
  misc_feature (1072)..(1072): n is a, c, g, or t

SEQ ID NO: 385818 - DNA, 1333 bp, Homo Sapiens; identical to SEQ ID NO: 356282
  misc_feature (1056)..(1059): n is a, c, g, or t
  misc_feature (1061)..(1061): n is a, c, g, or t
  misc_feature (1063)..(1064): n is a, c, g, or t
  misc_feature (1068)..(1068): n is a, c, g, or t
  misc_feature (1080)..(1080): n is a, c, g, or t
  misc_feature (1089)..(1089): n is a, c, g, or t
  misc_feature (1186)..(1203): n is a, c, g, or t

SEQ ID NO: 385819 - DNA, 1121 bp, Homo Sapiens; identical to SEQ ID NO: 356283

SEQ ID NO: 385820 - DNA, 1047 bp, Homo Sapiens; identical to SEQ ID NO: 356286
  misc_feature (944)..(946): n is a, c, g, or t
  misc_feature (965)..(965): n is a, c, g, or t
  misc_feature (972)..(972): n is a, c, g, or t
  misc_feature (974)..(974): n is a, c, g, or t
  misc_feature (999)..(999): n is a, c, g, or t
  misc_feature (1022)..(1023): n is a, c, g, or t

SEQ ID NO: 385821 - DNA, 479 bp, Homo Sapiens; identical to SEQ ID NO: 356287

SEQ ID NO: 385822 - DNA, 1801 bp, Homo Sapiens; identical to SEQ ID NO: 356289

SEQ ID NO: 385823 - DNA, 1404 bp, Homo Sapiens; identical to SEQ ID NO: 356290
  misc_feature (157)..(166): n is a, c, g, or t

SEQ ID NO: 385824 - DNA, 881 bp, Homo Sapiens; identical to SEQ ID NO: 356297
  misc_feature (37)..(37): n is a, c, g, or t
  misc_feature (67)..(67): n is a, c, g, or t
  misc_feature (82)..(83): n is a, c, g, or t
  misc_feature (87)..(87): n is a, c, g, or t
  misc_feature (91)..(91): n is a, c, g, or t
  misc_feature (370)..(433): n is a, c, g, or t
  misc_feature (746)..(764): n is a, c, g, or t

SEQ ID NO: 385825 - DNA, 1525 bp, Homo Sapiens; identical to SEQ ID NO: 356298

SEQ ID NO: 385826 - DNA, 1938 bp, Homo Sapiens; identical to SEQ ID NO: 356299
  misc_feature (48)..(48): n is a, c, g, or t
  misc_feature (336)..(422): n is a, c, g, or t
  misc_feature (1898)..(1898): n is a, c, g, or t

SEQ ID NO: 385827 - DNA, 1112 bp, Homo Sapiens; identical to SEQ ID NO: 356300

SEQ ID NO: 385828 - DNA, 1039 bp, Homo Sapiens; identical to SEQ ID NO: 356301

SEQ ID NO: 385829 - DNA, 1658 bp, Homo Sapiens; identical to SEQ ID NO: 356302
  misc_feature (133)..(133): n is a, c, g, or t
  misc_feature (267)..(267): n is a, c, g, or t
  misc_feature (755)..(756): n is a, c, g, or t
  misc_feature (1579)..(1579): n is a, c, g, or t

SEQ ID NO: 385830 - DNA, 1120 bp, Homo Sapiens; identical to SEQ ID NO: 356303
  misc_feature (9)..(9): n is a, c, g, or t
  misc_feature (16)..(17): n is a, c, g, or t
  misc_feature (22)..(22): n is a, c, g, or t
  misc_feature (33)..(33): n is a, c, g, or t
  misc_feature (43)..(43): n is a, c, g, or t
  misc_feature (62)..(62): n is a, c, g, or t
  misc_feature (68)..(68): n is a, c, g, or t
  misc_feature (73)..(75): n is a, c, g, or t
  misc_feature (88)..(88): n is a, c, g, or t
  misc_feature (100)..(101): n is a, c, g, or t
  misc_feature (109)..(109): n is a, c, g, or t
  misc_feature (155)..(155): n is a, c, g, or t
  misc_feature (177)..(177): n is a, c, g, or t
  misc_feature (179)..(179): n is a, c, g, or t
  misc_feature (785)..(785): n is a, c, g, or t
  misc_feature (790)..(790): n is a, c, g, or t
  misc_feature (803)..(803): n is a, c, g, or t
  misc_feature (809)..(809): n is a, c, g, or t
  misc_feature (821)..(821): n is a, c, g, or t
  misc_feature (825)..(825): n is a, c, g, or t
  misc_feature (831)..(831): n is a, c, g, or t
  misc_feature (839)..(839): n is a, c, g, or t
  misc_feature (842)..(842): n is a, c, g, or t
  misc_feature (858)..(858): n is a, c, g, or t
  misc_feature (860)..(860): n is a, c, g, or t
  misc_feature (864)..(864): n is a, c, g, or t
  misc_feature (920)..(922): n is a, c, g, or t
  misc_feature (942)..(942): n is a, c, g, or t
  misc_feature (952)..(952): n is a, c, g, or t
  misc_feature (973)..(973): n is a, c, g, or t
  misc_feature (978)..(979): n is a, c, g, or t
  misc_feature (986)..(986): n is a, c, g, or t
  misc_feature (1001)..(1001): n is a, c, g, or t
  misc_feature (1018)..(1019): n is a, c, g, or t
  misc_feature (1025)..(1026): n is a, c, g, or t
  misc_feature (1039)..(1039): n is a, c, g, or t
  misc_feature (1041)..(1041): n is a, c, g, or t
  misc_feature (1069)..(1069): n is a, c, g, or t
  misc_feature (1098)..(1098): n is a, c, g, or t
  misc_feature (1103)..(1103): n is a, c, g, or t
  misc_feature (1106)..(1106): n is a, c, g, or t
  misc_feature (1108)..(1108): n is a, c, g, or t

SEQ ID NO: 385831 - DNA, 1788 bp, Homo Sapiens; identical to SEQ ID NO: 356304

SEQ ID NO: 385832 - DNA, 532 bp, Homo Sapiens; identical to SEQ ID NO: 356305

SEQ ID NO: 385833 - DNA, 460 bp, Homo Sapiens; identical to SEQ ID NO: 356306
  misc_feature (15)..(15): n is a, c, g, or t
  misc_feature (27)..(27): n is a, c, g, or t

SEQ ID NO: 385834 - DNA, 1937 bp, Homo Sapiens; identical to SEQ ID NO: 356308
  misc_feature (1672)..(1672): n is a, c, g, or t
  misc_feature (1685)..(1685): n is a, c, g, or t
  misc_feature (1737)..(1737): n is a, c, g, or t
  misc_feature (1744)..(1744): n is a, c, g, or t
  misc_feature (1753)..(1754): n is a, c, g, or t
  misc_feature (1756)..(1756): n is a, c, g, or t
  misc_feature (1805)..(1805): n is a, c, g, or t
  misc_feature (1817)..(1817): n is a, c, g, or t
  misc_feature (1865)..(1865): n is a, c, g, or t
  misc_feature (1891)..(1891): n is a, c, g, or t

SEQ ID NO: 385835 - DNA, 1355 bp, Homo Sapiens; identical to SEQ ID NO: 356309
  misc_feature (1077)..(1077): n is a, c, g, or t
  misc_feature (1108)..(1108): n is a, c, g, or t
  misc_feature (1110)..(1111): n is a, c, g, or t
  misc_feature (1116)..(1116): n is a, c, g, or t
  misc_feature (1132)..(1132): n is a, c, g, or t
  misc_feature (1149)..(1149): n is a, c, g, or t
  misc_feature (1212)..(1212): n is a, c, g, or t
  misc_feature (1214)..(1214): n is a, c, g, or t
  misc_feature (1229)..(1229): n is a, c, g, or t
  misc_feature (1275)..(1275): n is a, c, g, or t
  misc_feature (1286)..(1286): n is a, c, g, or t
  misc_feature (1297)..(1297): n is a, c, g, or t
  misc_feature (1310)..(1310): n is a, c, g, or t
  misc_feature (1316)..(1316): n is a, c, g, or t
  misc_feature (1327)..(1327): n is a, c, g, or t
  misc_feature (1354)..(1354): n is a, c, g, or t

SEQ ID NO: 385836 - DNA, 955 bp, Homo Sapiens; identical to SEQ ID NO: 356310

SEQ ID NO: 385837 - DNA, 373 bp, Homo Sapiens; identical to SEQ ID NO: 356311
  misc_feature (327)..(327): n is a, c, g, or t
  misc_feature (347)..(347): n is a, c, g, or t
  misc_feature (354)..(354): n is a, c, g, or t

SEQ ID NO: 385838 - DNA, 463 bp, Homo Sapiens; identical to SEQ ID NO: 356312
  misc_feature (16)..(16): n is a, c, g, or t
  misc_feature (180)..(180): n is a, c, g, or t

SEQ ID NO: 385839 - DNA, 1957 bp, Homo Sapiens; identical to SEQ ID NO: 356313
  misc_feature (35)..(35): n is a, c, g, or t
  misc_feature (76)..(76): n is a, c, g, or t
  misc_feature (1567)..(1567): n is a, c, g, or t
  misc_feature (1576)..(1576): n is a, c, g, or t
  misc_feature (1582)..(1582): n is a, c, g, or t
  misc_feature (1650)..(1650): n is a, c, g, or t
  misc_feature (1672)..(1672): n is a, c, g, or t
  misc_feature (1676)..(1676): n is a, c, g, or t
  misc_feature (1681)..(1682): n is a, c, g, or t
  misc_feature (1703)..(1703): n is a, c, g, or t
  misc_feature (1765)..(1766): n is a, c, g, or t
  misc_feature (1772)..(1773): n is a, c, g, or t
  misc_feature (1778)..(1779): n is a, c, g, or t
  misc_feature (1792)..(1792): n is a, c, g, or t
  misc_feature (1850)..(1850): n is a, c, g, or t
  misc_feature (1868)..(1868): n is a, c, g, or t
  misc_feature (1872)..(1872): n is a, c, g, or t
  misc_feature (1880)..(1880): n is a, c, g, or t
  misc_feature (1899)..(1899): n is a, c, g, or t
  misc_feature (1903)..(1903): n is a, c, g, or t
  misc_feature (1917)..(1917): n is a, c, g, or t
  misc_feature (1921)..(1922): n is a, c, g, or t
  misc_feature (1929)..(1929): n is a, c, g, or t
  misc_feature (1931)..(1931): n is a, c, g, or t
  misc_feature (1938)..(1938): n is a, c, g, or t

SEQ ID NO: 385840 - DNA, 1257 bp, Homo Sapiens; identical to SEQ ID NO: 356314
  misc_feature (50)..(50): n is a, c, g, or t
  misc_feature (122)..(122): n is a, c, g, or t
  misc_feature (129)..(129): n is a, c, g, or t
  misc_feature (769)..(781): n is a, c, g, or t
  misc_feature (1218)..(1218): n is a, c, g, or t
  misc_feature (1232)..(1232): n is a, c, g, or t

SEQ ID NO: 385841 - DNA, 457 bp, Homo Sapiens; identical to SEQ ID NO: 356315
  misc_feature (47)..(47): n is a, c, g, or t
  misc_feature (66)..(66): n is a, c, g, or t

SEQ ID NO: 385842 - DNA, 453 bp, Homo Sapiens; identical to SEQ ID NO: 356316
  misc_feature (20)..(20): n is a, c, g, or t
  misc_feature (43)..(43): n is a, c, g, or t

SEQ ID NO: 385843 - DNA, 966 bp, Homo Sapiens; identical to SEQ ID NO: 356319
  misc_feature (21)..(21): n is a, c, g, or t
  misc_feature (35)..(35): n is a, c, g, or t
  misc_feature (46)..(47): n is a, c, g, or t
  misc_feature (49)..(50): n is a, c, g, or t
  misc_feature (53)..(53): n is a, c, g, or t
  misc_feature (57)..(59): n is a, c, g, or t
  misc_feature (65)..(65): n is a, c, g, or t
  misc_feature (70)..(70): n is a, c, g, or t
  misc_feature (78)..(78): n is a, c, g, or t
  misc_feature (83)..(83): n is a, c, g, or t
  misc_feature (95)..(95): n is a, c, g, or t
  misc_feature (97)..(97): n is a, c, g, or t
  misc_feature (106)..(106): n is a, c, g, or t
  misc_feature (114)..(114): n is a, c, g, or t
  misc_feature (118)..(121): n is a, c, g, or t
  misc_feature (145)..(145): n is a, c, g, or t
  misc_feature (149)..(155): n is a, c, g, or t
  misc_feature (166)..(166): n is a, c, g, or t
  misc_feature (171)..(171): n is a, c, g, or t
  misc_feature (190)..(191): n is a, c, g, or t
  misc_feature (206)..(206): n is a, c, g, or t
  misc_feature (240)..(240): n is a, c, g, or t
  misc_feature (245)..(245): n is a, c, g, or t
  misc_feature (253)..(280): n is a, c, g, or t
  misc_feature (282)..(282): n is a, c, g, or t
  misc_feature (289)..(289): n is a, c, g, or t
  misc_feature (293)..(293): n is a, c, g, or t
  misc_feature (295)..(295): n is a, c, g, or t
  misc_feature (298)..(298): n is a, c, g, or t
  misc_feature (302)..(302): n is a, c, g, or t
  misc_feature (305)..(306): n is a, c, g, or t
  misc_feature (314)..(314): n is a, c, g, or t
  misc_feature (321)..(321): n is a, c, g, or t
  misc_feature (332)..(332): n is a, c, g, or t
  misc_feature (338)..(340): n is a, c, g, or t
  misc_feature (346)..(346): n is a, c, g, or t
  misc_feature (354)..(354): n is a, c, g, or t
  misc_feature (359)..(359): n is a, c, g, or t
  misc_feature (366)..(367): n is a, c, g, or t
  misc_feature (373)..(373): n is a, c, g, or t
  misc_feature (376)..(376): n is a, c, g, or t
  misc_feature (382)..(382): n is a, c, g, or t
  misc_feature (384)..(386): n is a, c, g, or t
  misc_feature (397)..(398): n is a, c, g, or t
  misc_feature (401)..(401): n is a, c, g, or t
  misc_feature (403)..(403): n is a, c, g, or t
  misc_feature (405)..(405): n is a, c, g, or t
  misc_feature (429)..(429): n is a, c, g, or t
  misc_feature (444)..(446): n is a, c, g, or t
  misc_feature (450)..(450): n is a, c, g, or t
  misc_feature (454)..(454): n is a, c, g, or t
  misc_feature (463)..(463): n is a, c, g, or t
  misc_feature (476)..(478): n is a, c, g, or t
  misc_feature (490)..(491): n is a, c, g, or t
  misc_feature (494)..(494): n is a, c, g, or t
  misc_feature (496)..(496): n is a, c, g, or t
  misc_feature (498)..(498): n is a, c, g, or t
  misc_feature (503)..(503): n is a, c, g, or t
  misc_feature (507)..(507): n is a, c, g, or t
  misc_feature (521)..(521): n is a, c, g, or t
  misc_feature (542)..(542): n is a, c, g, or t
  misc_feature (545)..(545): n is a, c, g, or t
  misc_feature (547)..(548): n is a, c, g, or t
  misc_feature (582)..(582): n is a, c, g, or t
  misc_feature (585)..(585): n is a, c, g, or t
  misc_feature (587)..(587): n is a, c, g, or t
  misc_feature (589)..(589): n is a, c, g, or t
  misc_feature (594)..(594): n is a, c, g, or t
  misc_feature (597)..(598): n is a, c, g, or t
  misc_feature (601)..(601): n is a, c, g, or t
  misc_feature (636)..(637): n is a, c, g, or t
  misc_feature (662)..(663): n is a, c, g, or t
  misc_feature (877)..(877): n is a, c, g, or t
  misc_feature (881)..(881): n is a, c, g, or t
  misc_feature (905)..(905): n is a, c, g, or t
  misc_feature (907)..(907): n is a, c, g, or t
  misc_feature (911)..(912): n is a, c, g, or t
  misc_feature (916)..(917): n is a, c, g, or t
  misc_feature (922)..(922): n is a, c, g, or t
  misc_feature (928)..(928): n is a, c, g, or t
  misc_feature (937)..(937): n is a, c, g, or t
  misc_feature (939)..(939): n is a, c, g, or t
  misc_feature (942)..(942): n is a, c, g, or t
  misc_feature (953)..(953): n is a, c, g, or t
  misc_feature (960)..(960): n is a, c, g, or t
  misc_feature (962)..(962): n is a, c, g, or t

SEQ ID NO: 385844 - DNA, 1304 bp, Homo Sapiens; identical to SEQ ID NO: 356320
  misc_feature (645)..(656): n is a, c, g, or t
  misc_feature (808)..(826): n is a, c, g, or t

SEQ ID NO: 385845 - DNA, 658 bp, Homo Sapiens; identical to SEQ ID NO: 356321
  misc_feature (393)..(422): n is a, c, g, or t
  misc_feature (479)..(479): n is a, c, g, or t
  misc_feature (481)..(482): n is a, c, g, or t
  misc_feature (535)..(597): n is a, c, g, or t
  misc_feature (613)..(613): n is a, c, g, or t
  misc_feature (616)..(616): n is a, c, g, or t

SEQ ID NO: 385846 - DNA, 438 bp, Homo Sapiens; identical to SEQ ID NO: 356322

SEQ ID NO: 385847 - DNA, 1728 bp, Homo Sapiens; identical to SEQ ID NO: 356323

SEQ ID NO: 385848 - DNA, 953 bp, Homo Sapiens; identical to SEQ ID NO: 356324

SEQ ID NO: 385849 - DNA, 1685 bp, Homo Sapiens; identical to SEQ ID NO: 356326
  misc_feature (72)..(82): n is a, c, g, or t
  misc_feature (556)..(556): n is a, c, g, or t
  misc_feature (1014)..(1015): n is a, c, g, or t
  misc_feature (1017)..(1021): n is a, c, g, or t
  misc_feature (1024)..(1045): n is a, c, g, or t

SEQ ID NO: 385850 - DNA, 441 bp, Homo Sapiens; identical to SEQ ID NO: 356327
  misc_feature (27)..(27): n is a, c, g, or t
  misc_feature (47)..(47): n is a, c, g, or t
  misc_feature (58)..(58): n is a, c, g, or t
  misc_feature (96)..(96): n is a, c, g, or t
  misc_feature (103)..(103): n is a, c, g, or t
  misc_feature (110)..(110): n is a, c, g, or t
  misc_feature (155)..(155): n is a, c, g, or t

SEQ ID NO: 385851 - DNA, 535 bp, Homo Sapiens; identical to SEQ ID NO: 356328

SEQ ID NO: 385852 - DNA, 672 bp, Homo Sapiens; identical to SEQ ID NO: 356329

SEQ ID NO: 385853 - DNA, 2723 bp, Homo Sapiens; identical to SEQ ID NO: 356331
  misc_feature (2249)..(2504): n is a, c, g, or t
  misc_feature (2542)..(2542): n is a, c, g, or t

SEQ ID NO: 385854 - DNA, 450 bp, Homo Sapiens; identical to SEQ ID NO: 356332

SEQ ID NO: 385855 - DNA, 888 bp, Homo Sapiens; identical to SEQ ID NO: 356337

SEQ ID NO: 385856 - DNA, 1155 bp, Homo Sapiens; identical to SEQ ID NO: 356338
  misc_feature (47)..(83): n is a, c, g, or t
  misc_feature (1055)..(1055): n is a, c, g, or t
  misc_feature (1073)..(1074): n is a, c, g, or t
  misc_feature (1090)..(1090): n is a, c, g, or t

SEQ ID NO: 385857 - DNA, 1871 bp, Homo Sapiens; identical to SEQ ID NO: 356342
  misc_feature (12)..(12): n is a, c, g, or t
  misc_feature (90)..(90): n is a, c, g, or t
  misc_feature (1819)..(1819): n is a, c, g, or t

SEQ ID NO: 385858 - DNA, 1138 bp, Homo Sapiens; identical to SEQ ID NO: 356343
  misc_feature (15)..(15): n is a, c, g, or t
  misc_feature (20)..(20): n is a, c, g, or t
  misc_feature (22)..(23): n is a, c, g, or t
  misc_feature (31)..(31): n is a, c, g, or t
  misc_feature (40)..(41): n is a, c, g, or t
  misc_feature (57)..(57): n is a, c, g, or t
  misc_feature (59)..(59): n is a, c, g, or t
  misc_feature (65)..(65): n is a, c, g, or t
  misc_feature (77)..(77): n is a, c, g, or t
  misc_feature (143)..(143): n is a, c, g, or t
  misc_feature (154)..(154): n is a, c, g, or t
  misc_feature (287)..(344): n is a, c, g, or t
  misc_feature (450)..(490): n is a, c, g, or t
  misc_feature (1125)..(1125): n is a, c, g, or t
  misc_feature (1128)..(1128): n is a, c, g, or t

SEQ ID NO: 385859 - DNA, 1398 bp, Homo Sapiens; identical to SEQ ID NO: 356346

SEQ ID NO: 385860 - DNA, 752 bp, Homo Sapiens; identical to SEQ ID NO: 356347

SEQ ID NO: 385861 - DNA, 1049 bp, Homo Sapiens; identical to SEQ ID NO: 356351
  misc_feature (5)..(5): n is a, c, g, or t
  misc_feature (26)..(26): n is a, c, g, or t

SEQ ID NO: 385862 - DNA, 1195 bp, Homo Sapiens; identical to SEQ ID NO: 356352

SEQ ID NO: 385863 - DNA, 489 bp, Homo Sapiens; identical to SEQ ID NO: 356353
  misc_feature (21)..(21): n is a, c, g, or t

SEQ ID NO: 385864 - DNA, 849 bp, Homo Sapiens; identical to SEQ ID NO: 356361

SEQ ID NO: 385865 - DNA, 842 bp, Homo Sapiens; identical to SEQ ID NO: 356362
  misc_feature (531)..(548): n is a, c, g, or t

SEQ ID NO: 385866 - DNA, 676 bp, Homo Sapiens; identical to SEQ ID NO: 356363

SEQ ID NO: 385867 - DNA, 1151 bp, Homo Sapiens; identical to SEQ ID NO: 356364

SEQ ID NO: 385868 - DNA, 956 bp, Homo Sapiens; identical to SEQ ID NO: 356365
  misc_feature (51)..(87): n is a, c, g, or t

SEQ ID NO: 385869 - DNA, 1587 bp, Homo Sapiens; identical to SEQ ID NO: 356366
  misc_feature (53)..(90): n is a, c, g, or t

SEQ ID NO: 385870 - DNA, 938 bp, Homo Sapiens; identical to SEQ ID NO: 356367

SEQ ID NO: 385871 - DNA, 966 bp, Homo Sapiens; identical to SEQ ID NO: 356368
  misc_feature (609)..(609): n is a, c, g, or t

SEQ ID NO: 385872 - DNA, 848 bp, Homo Sapiens; identical to SEQ ID NO: 356369
  misc_feature (490)..(490): n is a, c, g, or t
  misc_feature (721)..(722): n is a, c, g, or t
  misc_feature (785)..(785): n is a, c, g, or t
  misc_feature (797)..(797): n is a, c, g, or t
  misc_feature (813)..(813): n is a, c, g, or t

SEQ ID NO: 385873 - DNA, 1076 bp, Homo Sapiens; identical to SEQ ID NO: 356370

SEQ ID NO: 385874 - DNA, 841 bp, Homo Sapiens; identical to SEQ ID NO: 356372
  misc_feature (12)..(12): n is a, c, g, or t
  misc_feature (15)..(15): n is a, c, g, or t
  misc_feature (18)..(18): n is a, c, g, or t
  misc_feature (25)..(27): n is a, c, g, or t
  misc_feature (33)..(33): n is a, c, g, or t
  misc_feature (35)..(35): n is a, c, g, or t
  misc_feature (46)..(46): n is a, c, g, or t
  misc_feature (49)..(49): n is a, c, g, or t
  misc_feature (51)..(51): n is a, c, g, or t
  misc_feature (57)..(57): n is a, c, g, or t
  misc_feature (68)..(68): n is a, c, g, or t
  misc_feature (70)..(70): n is a, c, g, or t
  misc_feature (98)..(98): n is a, c, g, or t
  misc_feature (104)..(104): n is a, c, g, or t
  misc_feature (106)..(106): n is a, c, g, or t
  misc_feature (110)..(110): n is a, c, g, or t
  misc_feature (113)..(113): n is a, c, g, or t
  misc_feature (125)..(125): n is a, c, g, or t
  misc_feature (135)..(135): n is a, c, g, or t
  misc_feature (138)..(138): n is a, c, g, or t
  misc_feature (201)..(201): n is a, c, g, or t
  misc_feature (216)..(216): n is a, c, g, or t
  misc_feature (554)..(616): n is a, c, g, or t

SEQ ID NO: 385875 - DNA, 545 bp, Homo Sapiens; identical to SEQ ID NO: 356373
  misc_feature (54)..(54): n is a, c, g, or t

SEQ ID NO: 385876 - DNA, 1466 bp, Homo Sapiens; identical to SEQ ID NO: 356374
  misc_feature (26)..(26): n is a, c, g, or t
  misc_feature (96)..(96): n is a, c, g, or t
  misc_feature (102)..(102): n is a, c, g, or t
  misc_feature (108)..(108): n is a, c, g, or t
  misc_feature (114)..(114): n is a, c, g, or t
  misc_feature (172)..(172): n is a, c, g, or t
  misc_feature (223)..(223): n is a, c, g, or t

SEQ ID NO: 385877 - DNA, 848 bp, Homo Sapiens; identical to SEQ ID NO: 356375

SEQ ID NO: 385878 - DNA, 1700 bp, Homo Sapiens; identical to SEQ ID NO: 356376

SEQ ID NO: 385879 - DNA, 824 bp, Homo Sapiens; identical to SEQ ID NO: 356377

SEQ ID NO: 385880 - DNA, 1071 bp, Homo Sapiens; identical to SEQ ID NO: 356379
  misc_feature (6)..(6): n is a, c, g, or t
  misc_feature (11)..(11): n is a, c, g, or t
  misc_feature (31)..(31): n is a, c, g, or t
  misc_feature (34)..(34): n is a, c, g, or t
  misc_feature (42)..(42): n is a, c, g, or t
  misc_feature (50)..(51): n is a, c, g, or t
  misc_feature (77)..(77): n is a, c, g, or t
  misc_feature (79)..(80): n is a, c, g, or t
  misc_feature (94)..(94): n is a, c, g, or t
  misc_feature (99)..(99): n is a, c, g, or t
  misc_feature (107)..(107): n is a, c, g, or t
  misc_feature (111)..(111): n is a, c, g, or t
  misc_feature (119)..(119): n is a, c, g, or t
  misc_feature (127)..(127): n is a, c, g, or t

SEQ ID NO: 385881 - DNA, 906 bp, Homo Sapiens; identical to SEQ ID NO: 356380

SEQ ID NO: 385882 - DNA, 920 bp, Homo Sapiens; identical to SEQ ID NO: 356384
  misc_feature (531)..(531): n is a, c, g, or t
  misc_feature (533)..(533): n is a, c, g, or t
  misc_feature (535)..(535): n is a, c, g, or t
  misc_feature (537)..(537): n is a, c, g, or t
  misc_feature (539)..(539): n is a, c, g, or t
  misc_feature (541)..(541): n is a, c, g, or t
  misc_feature (543)..(543): n is a, c, g, or t
  misc_feature (547)..(547): n is a, c, g, or t
  misc_feature (549)..(549): n is a, c, g, or t
  misc_feature (551)..(551): n is a, c, g, or t
  misc_feature (555)..(556): n is a, c, g, or t
  misc_feature (855)..(855): n is a, c, g, or t
  misc_feature (878)..(879): n is a, c, g, or t
  misc_feature (883)..(884): n is a, c, g, or t

SEQ ID NO: 385883 - DNA, 1234 bp, Homo Sapiens; identical to SEQ ID NO: 356385
  misc_feature (364)..(446): n is a, c, g, or t
  misc_feature (1089)..(1111): n is a, c, g, or t

SEQ ID NO: 385884 - DNA, 991 bp, Homo Sapiens; identical to SEQ ID NO: 356386
  misc_feature (905)..(914): n is a, c, g, or t

SEQ ID NO: 385885 - DNA, 777 bp, Homo Sapiens; identical to SEQ ID NO: 356387

SEQ ID NO: 385886 - DNA, 1555 bp, Homo Sapiens; identical to SEQ ID NO: 356392

SEQ ID NO: 385887 - DNA, 488 bp, Homo Sapiens; identical to SEQ ID NO: 356393
  misc_feature (269)..(269): n is a, c, g, or t
  misc_feature (362)..(362): n is a, c, g, or t
  misc_feature (396)..(396): n is a, c, g, or t
  misc_feature (424)..(424): n is a, c, g, or t
  misc_feature (471)..(471): n is a, c, g, or t

SEQ ID NO: 385888 - DNA, 1125 bp, Homo Sapiens; identical to SEQ ID NO: 356399
  misc_feature (1050)..(1050): n is a, c, g, or t
  misc_feature (1058)..(1058): n is a, c, g, or t
  misc_feature (1089)..(1089): n is a, c, g, or t
  misc_feature (1098)..(1098): n is a, c, g, or t
  misc_feature (1113)..(1113): n is a, c, g, or t
  misc_feature (1116)..(1116): n is a, c, g, or t

SEQ ID NO: 385889 - DNA, 1652 bp, Homo Sapiens; identical to SEQ ID NO: 356400
  misc_feature (455)..(455): n is a, c, g, or t
  misc_feature (1549)..(1562): n is a, c, g, or t

SEQ ID NO: 385890 - DNA, 419 bp, Homo Sapiens; identical to SEQ ID NO: 356401
  misc_feature (205)..(205): n is a, c, g, or t
  misc_feature (233)..(233): n is a, c, g, or t
  misc_feature (329)..(342): n is a, c, g, or t

SEQ ID NO: 385891 - DNA, 473 bp, Homo Sapiens; identical to SEQ ID NO: 356402
  misc_feature (20)..(20): n is a, c, g, or t
  misc_feature (40)..(40): n is a, c, g, or t

SEQ ID NO: 385892 - DNA, 1965 bp, Homo Sapiens; identical to SEQ ID NO: 356404
  misc_feature (144)..(152): n is a, c, g, or t
  misc_feature (515)..(515): n is a, c, g, or t
  misc_feature (570)..(578): n is a, c, g, or t
  misc_feature (987)..(987): n is a, c, g, or t
  misc_feature (1751)..(1751): n is a, c, g, or t
  misc_feature (1894)..(1894): n is a, c, g, or t

SEQ ID NO: 385893 - DNA, 969 bp, Homo Sapiens; identical to SEQ ID NO: 356405
  misc_feature (13)..(13): n is a, c, g, or t
  misc_feature (177)..(177): n is a, c, g, or t
  misc_feature (939)..(939): n is a, c, g, or t

SEQ ID NO: 385894 - DNA, 1436 bp, Homo Sapiens; identical to SEQ ID NO: 356407
  misc_feature (186)..(248): n is a, c, g, or t
  misc_feature (1215)..(1293): n is a, c, g, or t

SEQ ID NO: 385895 - DNA, 824 bp, Homo Sapiens; identical to SEQ ID NO: 356408
  misc_feature (143)..(221): n is a, c, g, or t
  misc_feature (374)..(374): n is a, c, g, or t
  misc_feature (686)..(686): n is a, c, g, or t
  misc_feature (688)..(688): n is a, c, g, or t
  misc_feature (692)..(693): n is a, c, g, or t
  misc_feature (732)..(732): n is a, c, g, or t
  misc_feature (735)..(735): n is a, c, g, or t
  misc_feature (743)..(743): n is a, c, g, or t
  misc_feature (749)..(749): n is a, c, g, or t
  misc_feature (761)..(761): n is a, c, g, or t
  misc_feature (763)..(763): n is a, c, g, or t
  misc_feature (765)..(765): n is a, c, g, or t
  misc_feature (769)..(770): n is a, c, g, or t
  misc_feature (789)..(789): n is a, c, g, or t
  misc_feature (796)..(796): n is a, c, g, or t
  misc_feature (804)..(804): n is a, c, g, or t
  misc_feature (806)..(806): n is a, c, g, or t
  misc_feature (812)..(813): n is a, c, g, or t

SEQ ID NO: 385896 - DNA, 1008 bp, Homo Sapiens; identical to SEQ ID NO: 356409
  misc_feature (13)..(13): n is a, c, g, or t
  misc_feature (247)..(256): n is a, c, g, or t

SEQ ID NO: 385897 - DNA, 1449 bp, Homo Sapiens; identical to SEQ ID NO: 356412
  misc_feature (321)..(376): n is a, c, g, or t
  misc_feature (614)..(906): n is a, c, g, or t
  misc_feature (1193)..(1281): n is a, c, g, or t
  misc_feature (1284)..(1309): n is a, c, g, or t
  misc_feature (1323)..(1341): n is a, c, g, or t

SEQ ID NO: 385898 - DNA, 705 bp, Homo Sapiens; identical to SEQ ID NO: 356413
  misc_feature (53)..(158): n is a, c, g, or t
  misc_feature (161)..(173): n is a, c, g, or t
  misc_feature (406)..(476): n is a, c, g, or t
  misc_feature (517)..(572): n is a, c, g, or t

SEQ ID NO: 385899 - DNA, 2089 bp, Homo Sapiens; identical to SEQ ID NO: 356418

SEQ ID NO: 385900 - DNA, 1050 bp, Homo Sapiens; identical to SEQ ID NO: 356419
  misc_feature (771)..(771): n is a, c, g, or t
  misc_feature (910)..(911): n is a, c, g, or t
  misc_feature (916)..(916): n is a, c, g, or t
  misc_feature (954)..(954): n is a, c, g, or t

SEQ ID NO: 385901 - DNA, 1418 bp, Homo Sapiens; identical to SEQ ID NO: 356425
  misc_feature (134)..(134): n is a, c, g, or t
  misc_feature (175)..(175): n is a, c, g, or t
  misc_feature (202)..(202): n is a, c, g, or t
  misc_feature (210)..(210): n is a, c, g, or t
  misc_feature (234)..(234): n is a, c, g, or t
  misc_feature (283)..(283): n is a, c, g, or t

SEQ ID NO: 385902 - DNA, 708 bp, Homo Sapiens; identical to SEQ ID NO: 356426

SEQ ID NO: 385903 - DNA, 1871 bp, Homo Sapiens; identical to SEQ ID NO: 356427
  misc_feature (55)..(55): n is a, c, g, or t

SEQ ID NO: 385904 - DNA, 908 bp, Homo Sapiens; identical to SEQ ID NO: 356428
  misc_feature (879)..(879): n is a, c, g, or t

SEQ ID NO: 385905 - DNA, 728 bp, Homo Sapiens; identical to SEQ ID NO: 356429

SEQ ID NO: 385906 - DNA, 1866 bp, Homo Sapiens; identical to SEQ ID NO: 356431
  misc_feature (1220)..(1220): n is a, c, g, or t

SEQ ID NO: 385907 - DNA, 760 bp, Homo Sapiens; identical to SEQ ID NO: 356432

SEQ ID NO: 385908 - DNA, 1609 bp, Homo Sapiens; identical to SEQ ID NO: 356434
  misc_feature (43)..(44): n is a, c, g, or t
  misc_feature (47)..(47): n is a, c, g, or t
  misc_feature (1034)..(1082): n is a, c, g, or t

SEQ ID NO: 385909 - DNA, 921 bp, Homo Sapiens; identical to SEQ ID NO: 356435

SEQ ID NO: 385910 - DNA, 769 bp, Homo Sapiens; identical to SEQ ID NO: 356436

SEQ ID NO: 385911 - DNA, 1404 bp, Homo Sapiens; identical to SEQ ID NO: 356438
  misc_feature (9)..(9): n is a, c, g, or t
  misc_feature (22)..(22): n is a, c, g, or t
  misc_feature (24)..(24): n is a, c, g, or t
  misc_feature (28)..(30): n is a, c, g, or t
  misc_feature (32)..(33): n is a, c, g, or t
  misc_feature (43)..(43): n is a, c, g, or t
  misc_feature (45)..(45): n is a, c, g, or t
  misc_feature (56)..(56): n is a, c, g, or t
  misc_feature (69)..(69): n is a, c, g, or t
  misc_feature (74)..(74): n is a, c, g, or t
  misc_feature (76)..(76): n is a, c, g, or t
  misc_feature (89)..(89): n is a, c, g, or t
  misc_feature (98)..(98): n is a, c, g, or t
  misc_feature (103)..(103): n is a, c, g, or t
  misc_feature (107)..(107): n is a, c, g, or t
  misc_feature (120)..(120): n is a, c, g, or t
  misc_feature (154)..(154): n is a, c, g, or t

SEQ ID NO: 385912 - DNA, 2071 bp, Homo Sapiens; identical to SEQ ID NO: 356439
  misc_feature (236)..(236): n is a, c, g, or t
  misc_feature (948)..(948): n is a, c, g, or t
  misc_feature (953)..(953): n is a, c, g, or t
  misc_feature (958)..(958): n is a, c, g, or t
  misc_feature (1002)..(1002): n is a, c, g, or t
  misc_feature (1008)..(1008): n is a, c, g, or t
  misc_feature (1163)..(1163): n is a, c, g, or t
  misc_feature (1165)..(1165): n is a, c, g, or t
  misc_feature (1385)..(1389): n is a, c, g, or t
  misc_feature (1391)..(1391): n is a, c, g, or t
  misc_feature (1396)..(1396): n is a, c, g, or t
  misc_feature (1398)..(1402): n is a, c, g, or t
  misc_feature (1404)..(1404): n is a, c, g, or t

SEQ ID NO: 385913 - DNA, 953 bp, Homo Sapiens; identical to SEQ ID NO: 356440
  misc_feature (194)..(210): n is a, c, g, or t
  misc_feature (641)..(682): n is a, c, g, or t

SEQ ID NO: 385914 - DNA, 389 bp, Homo Sapiens; identical to SEQ ID NO: 356441

SEQ ID NO: 385915 - DNA, 758 bp, Homo Sapiens; identical to SEQ ID NO: 356444

SEQ ID NO: 385916 - DNA, 991 bp, Homo Sapiens; identical to SEQ ID NO: 356445

SEQ ID NO: 385917 - DNA, 2412 bp, Homo Sapiens; identical to SEQ ID NO: 356446
  misc_feature (17)..(17): n is a, c, g, or t
  misc_feature (22)..(22): n is a, c, g, or t
  misc_feature (35)..(35): n is a, c, g, or t
  misc_feature (38)..(38): n is a, c, g, or t
  misc_feature (49)..(49): n is a, c, g, or t
  misc_feature (66)..(66): n is a, c, g, or t
  misc_feature (68)..(68): n is a, c, g, or t
  misc_feature (74)..(75): n is a, c, g, or t
  misc_feature (77)..(77): n is a, c, g, or t
  misc_feature (81)..(81): n is a, c, g, or t
  misc_feature (85)..(85): n is a, c, g, or t
  misc_feature (96)..(96): n is a, c, g, or t
  misc_feature (105)..(106): n is a, c, g, or t
  misc_feature (114)..(114): n is a, c, g, or t
  misc_feature (118)..(118): n is a, c, g, or t
  misc_feature (121)..(121): n is a, c, g, or t
  misc_feature (123)..(123): n is a, c, g, or t
  misc_feature (126)..(126): n is a, c, g, or t
  misc_feature (130)..(131): n is a, c, g, or t
  misc_feature (135)..(136): n is a, c, g, or t
  misc_feature (140)..(140): n is a, c, g, or t
  misc_feature (142)..(142): n is a, c, g, or t
  misc_feature (144)..(144): n is a, c, g, or t
  misc_feature (146)..(147): n is a, c, g, or t
  misc_feature (151)..(151): n is a, c, g, or t
  misc_feature (155)..(155): n is a, c, g, or t
  misc_feature (161)..(161): n is a, c, g, or t
  misc_feature (166)..(168): n is a, c, g, or t
  misc_feature (172)..(173): n is a, c, g, or t
  misc_feature (181)..(181): n is a, c, g, or t
  misc_feature (183)..(183): n is a, c, g, or t
  misc_feature (193)..(194): n is a, c, g, or t
  misc_feature (204)..(204): n is a, c, g, or t
  misc_feature (206)..(207): n is a, c, g, or t
  misc_feature (211)..(211): n is a, c, g, or t
  misc_feature (213)..(214): n is a, c, g, or t
  misc_feature (220)..(220): n is a, c, g, or t
  misc_feature (225)..(225): n is a, c, g, or t
  misc_feature (230)..(232): n is a, c, g, or t
  misc_feature (235)..(235): n is a, c, g, or t
  misc_feature (237)..(237): n is a, c, g, or t
  misc_feature (242)..(244): n is a, c, g, or t
  misc_feature (248)..(249): n is a, c, g, or t
  misc_feature (254)..(256): n is a, c, g, or t
  misc_feature (258)..(259): n is a, c, g, or t
  misc_feature (264)..(264): n is a, c, g, or t
  misc_feature (269)..(269): n is a, c, g, or t
  misc_feature (281)..(281): n is a, c, g, or t
  misc_feature (283)..(283): n is a, c, g, or t
  misc_feature (288)..(288): n is a, c, g, or t
  misc_feature (292)..(292): n is a, c, g, or t
  misc_feature (296)..(296): n is a, c, g, or t
  misc_feature (298)..(298): n is a, c, g, or t
  misc_feature (301)..(301): n is a, c, g, or t
  misc_feature (305)..(305): n is a, c, g, or t
  misc_feature (307)..(307): n is a, c, g, or t
  misc_feature (312)..(315): n is a, c, g, or t
  misc_feature (317)..(317): n is a, c, g, or t
  misc_feature (319)..(319): n is a, c, g, or t
  misc_feature (324)..(324): n is a, c, g, or t
  misc_feature (326)..(329): n is a, c, g, or t
  misc_feature (340)..(340): n is a, c, g, or t
  misc_feature (343)..(343): n is a, c, g, or t
  misc_feature (345)..(345): n is a, c, g, or t
  misc_feature (357)..(357): n is a, c, g, or t
  misc_feature (367)..(367): n is a, c, g, or t
  misc_feature (372)..(372): n is a, c, g, or t
  misc_feature (381)..(381): n is a, c, g, or t
  misc_feature (386)..(386): n is a, c, g, or t
  misc_feature (396)..(396): n is a, c, g, or t
  misc_feature (403)..(403): n is a, c, g, or t
  misc_feature (410)..(410): n is a, c, g, or t
  misc_feature (414)..(414): n is a, c, g, or t
  misc_feature (417)..(417): n is a, c, g, or t
  misc_feature (420)..(420): n is a, c, g, or t
  misc_feature (427)..(427): n is a, c, g, or t
  misc_feature (443)..(445): n is a, c, g, or t
  misc_feature (449)..(449): n is a, c, g, or t
  misc_feature (452)..(452): n is a, c, g, or t
  misc_feature (457)..(458): n is a, c, g, or t
  misc_feature (460)..(461): n is a, c, g, or t
  misc_feature (463)..(463): n is a, c, g, or t
  misc_feature (467)..(468): n is a, c, g, or t
  misc_feature (471)..(491): n is a, c, g, or t
  misc_feature (495)..(495): n is a, c, g, or t
  misc_feature (497)..(498): n is a, c, g, or t
  misc_feature (504)..(504): n is a, c, g, or t
  misc_feature (506)..(507): n is a, c, g, or t
  misc_feature (509)..(509): n is a, c, g, or t
  misc_feature (517)..(517): n is a, c, g, or t
  misc_feature (519)..(519): n is a, c, g, or t
  misc_feature (523)..(524): n is a, c, g, or t
  misc_feature (526)..(526): n is a, c, g, or t
  misc_feature (529)..(529): n is a, c, g, or t
  misc_feature (531)..(532): n is a, c, g, or t
  misc_feature (534)..(534): n is a, c, g, or t
  misc_feature (536)..(536): n is a, c, g, or t
  misc_feature (538)..(539): n is a, c, g, or t
  misc_feature (547)..(550): n is a, c, g, or t
  misc_feature (553)..(553): n is a, c, g, or t
  misc_feature (557)..(557): n is a, c, g, or t
  misc_feature (560)..(560): n is a, c, g, or t
  misc_feature (565)..(565): n is a, c, g, or t
  misc_feature (582)..(600): n is a, c, g, or t
  misc_feature (606)..(606): n is a, c, g, or t
  misc_feature (608)..(608): n is a, c, g, or t
  misc_feature (611)..(611): n is a, c, g, or t
  misc_feature (615)..(615): n is a, c, g, or t
  misc_feature (628)..(628): n is a, c, g, or t
  misc_feature (633)..(633): n is a, c, g, or t
  misc_feature (635)..(635): n is a, c, g, or t
  misc_feature (639)..(639): n is a, c, g, or t
  misc_feature (644)..(644): n is a, c, g, or t
  misc_feature (657)..(657): n is a, c, g, or t
  misc_feature (732)..(732): n is a, c, g, or t
  misc_feature (735)..(735): n is a, c, g, or t
  misc_feature (1908)..(1963): n is a, c, g, or t

SEQ ID NO: 385918 - DNA, 958 bp, Homo Sapiens; identical to SEQ ID NO: 356447
  misc_feature (851)..(907): n is a, c, g, or t

SEQ ID NO: 385919 - DNA, 1446 bp, Homo Sapiens; identical to SEQ ID NO: 356448
  misc_feature (90)..(90): n is a, c, g, or t
  misc_feature (938)..(938): n is a, c, g, or t
  misc_feature (1035)..(1035): n is a, c, g, or t
  misc_feature (1055)..(1055): n is a, c, g, or t
  misc_feature (1065)..(1065): n is a, c, g, or t
  misc_feature (1071)..(1071): n is a, c, g, or t

SEQ ID NO: 385920 - DNA, 2063 bp, Homo Sapiens; identical to SEQ ID NO: 356449
  misc_feature (105)..(114): n is a, c, g, or t
  misc_feature (1226)..(1227): n is a, c, g, or t
  misc_feature (1229)..(1230): n is a, c, g, or t
  misc_feature (1465)..(1479): n is a, c, g, or t
  misc_feature (1668)..(1668): n is a, c, g, or t
  misc_feature (1692)..(1692): n is a, c, g, or t
  misc_feature (2031)..(2031): n is a, c, g, or t
  misc_feature (2035)..(2035): n is a, c, g, or t

SEQ ID NO: 385921 - DNA, 780 bp, Homo Sapiens; identical to SEQ ID NO: 356450

SEQ ID NO: 385922 - DNA, 593 bp, Homo Sapiens; identical to SEQ ID NO: 356451
  misc_feature (452)..(452): n is a, c, g, or t
  misc_feature (461)..(461): n is a, c, g, or t
  misc_feature (515)..(515): n is a, c, g, or t

SEQ ID NO: 385923 - DNA, 976 bp, Homo Sapiens; identical to SEQ ID NO: 356458

SEQ ID NO: 385924 - DNA, 957 bp, Homo Sapiens; identical to SEQ ID NO: 356459
  misc_feature (652)..(652): n is a, c, g, or t

SEQ ID NO: 385925 - DNA, 1884 bp, Homo Sapiens; identical to SEQ ID NO: 356464
  misc_feature (1489)..(1518): n is a, c, g, or t
  misc_feature (1750)..(1750): n is a, c, g, or t

SEQ ID NO: 385926 - DNA, 1276 bp, Homo Sapiens; identical to SEQ ID NO: 356465
  misc_feature (107)..(107): n is a, c, g, or t
  misc_feature (918)..(947): n is a, c, g, or t

SEQ ID NO: 385927 - DNA, 1577 bp, Homo Sapiens; identical to SEQ ID NO: 356467
  misc_feature (370)..(370): n is a, c, g, or t
  misc_feature (411)..(456): n is a, c, g, or t

SEQ ID NO: 385928 - DNA, 1072 bp, Homo Sapiens; identical to SEQ ID NO: 356468
  misc_feature (990)..(990): n is a, c, g, or t

SEQ ID NO: 385929 - DNA, 1675 bp, Homo Sapiens; identical to SEQ ID NO: 356480
  misc_feature (201)..(255): n is a, c, g, or t
  misc_feature (343)..(353): n is a, c, g, or t

SEQ ID NO: 385930 - DNA, 784 bp, Homo Sapiens; identical to SEQ ID NO: 356481
  misc_feature (418)..(428): n is a, c, g, or t
  misc_feature (492)..(555): n is a, c, g, or t
  misc_feature (609)..(609): n is a, c, g, or t

SEQ ID NO: 385931 - DNA, 478 bp, Homo Sapiens; identical to SEQ ID NO: 356482
  misc_feature (19)..(19): n is a, c, g, or t
  misc_feature (30)..(30): n is a, c, g, or t

SEQ ID NO: 385932 - DNA, 424 bp, Homo Sapiens; identical to SEQ ID NO: 356483
  misc_feature (145)..(145): n is a, c, g, or t
  misc_feature (170)..(170): n is a, c, g, or t

SEQ ID NO: 385933 - DNA, 1513 bp, Homo Sapiens; identical to SEQ ID NO: 356485
  misc_feature (97)..(97): n is a, c, g, or t
  misc_feature (1057)..(1057): n is a, c, g, or t
  misc_feature (1059)..(1059): n is a, c, g, or t
  misc_feature (1317)..(1317): n is a, c, g, or t
  misc_feature (1494)..(1494): n is a, c, g, or t

SEQ ID NO: 385934 - DNA, 1122 bp, Homo Sapiens; identical to SEQ ID NO: 356486
  misc_feature (1)..(1): n is a, c, g, or t
  misc_feature (7)..(7): n is a, c, g, or t
  misc_feature (13)..(13): n is a, c, g, or t
  misc_feature (19)..(19): n is a, c, g, or t
  misc_feature (21)..(22): n is a, c, g, or t
  misc_feature (29)..(29): n is a, c, g, or t
  misc_feature (35)..(35): n is a, c, g, or t
  misc_feature (39)..(39): n is a, c, g, or t
  misc_feature (45)..(45): n is a, c, g, or t
  misc_feature (56)..(57): n is a, c, g, or t
  misc_feature (64)..(64): n is a, c, g, or t
  misc_feature (70)..(70): n is a, c, g, or t
  misc_feature (82)..(82): n is a, c, g, or t
  misc_feature (95)..(96): n is a, c, g, or t
  misc_feature (137)..(137): n is a, c, g, or t
  misc_feature (143)..(143): n is a, c, g, or t
  misc_feature (147)..(147): n is a, c, g, or t
  misc_feature (161)..(161): n is a, c, g, or t
  misc_feature (167)..(167): n is a, c, g, or t
  misc_feature (191)..(191): n is a, c, g, or t
  misc_feature (193)..(193): n is a, c, g, or t
  misc_feature (231)..(231): n is a, c, g, or t
  misc_feature (271)..(271): n is a, c, g, or t
  misc_feature (291)..(350): n is a, c, g, or t
  misc_feature (377)..(377): n is a, c, g, or t
  misc_feature (391)..(391): n is a, c, g, or t
  misc_feature (399)..(399): n is a, c, g, or t
  misc_feature (401)..(401): n is a, c, g, or t
  misc_feature (411)..(411): n is a, c, g, or t

SEQ ID NO: 385935 - DNA, 2230 bp, Homo Sapiens; identical to SEQ ID NO: 356489
  misc_feature (19)..(19): n is a, c, g, or t
  misc_feature (26)..(26): n is a, c, g, or t
  misc_feature (30)..(31): n is a, c, g, or t
  misc_feature (33)..(33): n is a, c, g, or t
  misc_feature (131)..(177): n is a, c, g, or t
  misc_feature (708)..(709): n is a, c, g, or t
  misc_feature (1988)..(1988): n is a, c, g, or t
  misc_feature (1990)..(2018): n is a, c, g, or t
  misc_feature (2046)..(2046): n is a, c, g, or t
  misc_feature (2052)..(2052): n is a, c, g, or t
  misc_feature (2057)..(2057): n is a, c, g, or t
  misc_feature (2064)..(2064): n is a, c, g, or t
  misc_feature (2066)..(2066): n is a, c, g, or t
  misc_feature (2071)..(2087): n is a, c, g, or t
  misc_feature (2108)..(2108): n is a, c, g, or t
  misc_feature (2110)..(2111): n is a, c, g, or t
  misc_feature (2117)..(2119): n is a, c, g, or t
  misc_feature (2128)..(2128): n is a, c, g, or t
  misc_feature (2130)..(2130): n is a, c, g, or t
  misc_feature (2132)..(2132): n is a, c, g, or t
  misc_feature (2147)..(2147): n is a, c, g, or t
  misc_feature (2149)..(2150): n is a, c, g, or t
  misc_feature (2226)..(2226): n is a, c, g, or t

SEQ ID NO: 385936 - DNA, 790 bp, Homo Sapiens; identical to SEQ ID NO: 356490
  misc_feature (66)..(66): n is a, c, g, or t
  misc_feature (135)..(135): n is a, c, g, or t
  misc_feature (152)..(152): n is a, c, g, or t
  misc_feature (186)..(186): n is a, c, g, or t
  misc_feature (193)..(193): n is a, c, g, or t
  misc_feature (235)..(235): n is a, c, g, or t

SEQ ID NO: 385937 - DNA, 1779 bp, Homo Sapiens; identical to SEQ ID NO: 356492

SEQ ID NO: 385938 - DNA, 761 bp, Homo Sapiens; identical to SEQ ID NO: 356493

SEQ ID NO: 385939 - DNA, 1672 bp, Homo Sapiens; identical to SEQ ID NO: 356496
  misc_feature (840)..(840): n is a, c, g, or t
  misc_feature (842)..(842): n is a, c, g, or t
  misc_feature (850)..(850): n is a, c, g, or t
  misc_feature (1020)..(1020): n is a, c, g, or t
  misc_feature (1024)..(1024): n is a, c, g, or t
  misc_feature (1041)..(1041): n is a, c, g, or t
  misc_feature (1047)..(1047): n is a, c, g, or t
  misc_feature (1053)..(1053): n is a, c, g, or t
  misc_feature (1060)..(1060): n is a, c, g, or t
  misc_feature (1111)..(1111): n is a, c, g, or t
  misc_feature (1114)..(1114): n is a, c, g, or t
  misc_feature (1118)..(1119): n is a, c, g, or t
  misc_feature (1134)..(1134): n is a, c, g, or t
  misc_feature (1138)..(1139): n is a, c, g, or t
  misc_feature (1143)..(1143): n is a, c, g, or t
  misc_feature (1146)..(1146): n is a, c, g, or t
  misc_feature (1149)..(1149): n is a, c, g, or t
  misc_feature (1152)..(1152): n is a, c, g, or t
  misc_feature (1155)..(1156): n is a, c, g, or t
  misc_feature (1170)..(1170): n is a, c, g, or t
  misc_feature (1182)..(1182): n is a, c, g, or t
  misc_feature (1190)..(1190): n is a, c, g, or t
  misc_feature (1196)..(1196): n is a, c, g, or t
  misc_feature (1200)..(1200): n is a, c, g, or t
  misc_feature (1205)..(1205): n is a, c, g, or t
  misc_feature (1210)..(1210): n is a, c, g, or t
  misc_feature (1217)..(1217): n is a, c, g, or t
  misc_feature (1222)..(1222): n is a, c, g, or t
  misc_feature (1226)..(1226): n is a, c, g, or t
  misc_feature (1230)..(1230): n is a, c, g, or t
  misc_feature (1235)..(1235): n is a, c, g, or t
  misc_feature (1250)..(1251): n is a, c, g, or t
  misc_feature (1255)..(1255): n is a, c, g, or t
  misc_feature (1258)..(1258): n is a, c, g, or t
  misc_feature (1260)..(1261): n is a, c, g, or t
  misc_feature (1263)..(1263): n is a, c, g, or t
  misc_feature (1267)..(1267): n is a, c, g, or t
  misc_feature (1272)..(1272): n is a, c, g, or t
  misc_feature (1277)..(1277): n is a, c, g, or t
  misc_feature (1279)..(1279): n is a, c, g, or t
  misc_feature (1305)..(1305): n is a, c, g, or t
  misc_feature (1315)..(1315): n is a, c, g, or t
  misc_feature (1319)..(1319): n is a, c, g, or t
  misc_feature (1330)..(1330): n is a, c, g, or t
  misc_feature (1364)..(1364): n is a, c, g, or t
  misc_feature (1367)..(1367): n is a, c, g, or t
  misc_feature (1373)..(1373): n is a, c, g, or t
  misc_feature (1377)..(1377): n is a, c, g, or t
  misc_feature (1406)..(1406): n is a, c, g, or t
  misc_feature (1417)..(1417): n is a, c, g, or t
  misc_feature (1460)..(1460): n is a, c, g, or t
  misc_feature (1492)..(1492): n is a, c, g, or t
  misc_feature (1494)..(1494): n is a, c, g, or t
  misc_feature (1520)..(1520): n is a, c, g, or t
  misc_feature (1585)..(1585): n is a, c, g, or t
  misc_feature (1625)..(1626): n is a, c, g, or t
  misc_feature (1640)..(1641): n is a, c, g, or t
  misc_feature (1658)..(1658): n is a, c, g, or t
  misc_feature (1664)..(1666): n is a, c, g, or t
  misc_feature (1669)..(1669): n is a, c, g, or t

SEQ ID NO: 385940 - DNA, 1661 bp, Homo Sapiens; identical to SEQ ID NO: 356497
  misc_feature (130)..(130): n is a, c, g, or t
  misc_feature (787)..(795): n is a, c, g, or t
  misc_feature (1018)..(1022): n is a, c, g, or t

SEQ ID NO: 385941 - DNA, 918 bp, Homo Sapiens; identical to SEQ ID NO: 356498

SEQ ID NO: 385942 - DNA, 655 bp, Homo Sapiens; identical to SEQ ID NO: 356499

SEQ ID NO: 385943 - DNA, 1644 bp, Homo Sapiens; identical to SEQ ID NO: 356508
  misc_feature (936)..(936): n is a, c, g, or t
  misc_feature (957)..(1076): n is a, c, g, or t
  misc_feature (1117)..(1137): n is a, c, g, or t
  misc_feature (1382)..(1434): n is a, c, g, or t

SEQ ID NO: 385944 - DNA, 1031 bp, Homo Sapiens; identical to SEQ ID NO: 356509

SEQ ID NO: 385945 - DNA, 1037 bp, Homo Sapiens; identical to SEQ ID NO: 356511
  misc_feature (22)..(22): n is a, c, g, or t
  misc_feature (814)..(877): n is a, c, g, or t

SEQ ID NO: 385946 - DNA, 1519 bp, Homo Sapiens; identical to SEQ ID NO: 356512

SEQ ID NO: 385947 - DNA, 1063 bp, Homo Sapiens; identical to SEQ ID NO: 356513
  misc_feature (853)..(853): n is a, c, g, or t

SEQ ID NO: 385948 - DNA, 798 bp, Homo Sapiens; identical to SEQ ID NO: 356514
  misc_feature (727)..(727): n is a, c, g, or t
  misc_feature (732)..(732): n is a, c, g, or t
  misc_feature (740)..(746): n is a, c, g, or t

SEQ ID NO: 385949 - DNA, 627 bp, Homo Sapiens; identical to SEQ ID NO: 356518
  misc_feature (474)..(531): n is a, c, g, or t
  misc_feature (587)..(587): n is a, c, g, or t

SEQ ID NO: 385950 - DNA, 1307 bp, Homo Sapiens; identical to SEQ ID NO: 356519
  misc_feature (1154)..(1211): n is a, c, g, or t
  misc_feature (1286)..(1286): n is a, c, g, or t

SEQ ID NO: 385951 - DNA, 846 bp, Homo Sapiens; identical to SEQ ID NO: 356520

SEQ ID NO: 385952 - DNA, 1960 bp, Homo Sapiens; identical to SEQ ID NO: 356523
  misc_feature (84)..(107): n is a, c, g, or t
  misc_feature (1245)..(1275): n is a, c, g, or t

SEQ ID NO: 385953 - DNA, 744 bp, Homo Sapiens; identical to SEQ ID NO: 356524

SEQ ID NO: 385954 - DNA, 1713 bp, Homo Sapiens; identical to SEQ ID NO: 356535
  misc_feature (122)..(122): n is a, c, g, or t
  misc_feature (126)..(126): n is a, c, g, or t
  misc_feature (196)..(196): n is a, c, g, or t
  misc_feature (1540)..(1540): n is a, c, g, or t
  misc_feature (1592)..(1592): n is a, c, g, or t
  misc_feature (1610)..(1610): n is a, c, g, or t
  misc_feature (1678)..(1678): n is a, c, g, or t

SEQ ID NO: 385955 - DNA, 1335 bp, Homo Sapiens; identical to SEQ ID NO: 356536
  misc_feature (1270)..(1278): n is a, c, g, or t

SEQ ID NO: 385956 - DNA, 1646 bp, Homo Sapiens; identical to SEQ ID NO: 356537

SEQ ID NO: 385957 - DNA, 1578 bp, Homo Sapiens; identical to SEQ ID NO: 356538

SEQ ID NO: 385958 - DNA, 1028 bp, Homo Sapiens; identical to SEQ ID NO: 356539
  misc_feature (938)..(970): n is a, c, g, or t

SEQ ID NO: 385959 - DNA, 1684 bp, Homo Sapiens; identical to SEQ ID NO: 356540
  misc_feature (1603)..(1603): n is a, c, g, or t

SEQ ID NO: 385960 - DNA, 993 bp, Homo Sapiens; identical to SEQ ID NO: 356541
  misc_feature (161)..(224): n is a, c, g, or t
  misc_feature (493)..(493): n is a, c, g, or t

SEQ ID NO: 385961 - DNA, 894 bp, Homo Sapiens; identical to SEQ ID NO: 356546

SEQ ID NO: 385962 - DNA, 1769 bp, Homo Sapiens; identical to SEQ ID NO: 356547
  misc_feature (1551)..(1559): n is a, c, g, or t

SEQ ID NO: 385963 - DNA, 924 bp, Homo Sapiens; identical to SEQ ID NO: 356548

SEQ ID NO: 385964 - DNA, 1046 bp, Homo Sapiens; identical to SEQ ID NO: 356549

SEQ ID NO: 385965 - DNA, 903 bp, Homo Sapiens; identical to SEQ ID NO: 356550

SEQ ID NO: 385966 - DNA, 864 bp, Homo Sapiens; identical to SEQ ID NO: 356551

SEQ ID NO: 385967 - DNA, 2603 bp, Homo Sapiens; identical to SEQ ID NO: 356552
  misc_feature (48)..(48): n is a, c, g, or t
  misc_feature (71)..(71): n is a, c, g, or t
  misc_feature (136)..(137): n is a, c, g, or t
  misc_feature (2015)..(2047): n is a, c, g, or t

SEQ ID NO: 385968 - DNA, 1137 bp, Homo Sapiens; identical to SEQ ID NO: 356561
  misc_feature (474)..(474): n is a, c, g, or t
  misc_feature (476)..(476): n is a, c, g, or t
  misc_feature (482)..(483): n is a, c, g, or t
  misc_feature (489)..(489): n is a, c, g, or t
  misc_feature (503)..(503): n is a, c, g, or t
  misc_feature (535)..(535): n is a, c, g, or t
  misc_feature (613)..(613): n is a, c, g, or t
  misc_feature (684)..(684): n is a, c, g, or t
  misc_feature (692)..(692): n is a, c, g, or t
  misc_feature (698)..(698): n is a, c, g, or t
  misc_feature (711)..(711): n is a, c, g, or t
  misc_feature (713)..(713): n is a, c, g, or t
  misc_feature (716)..(716): n is a, c, g, or t
  misc_feature (719)..(720): n is a, c, g, or t
  misc_feature (723)..(723): n is a, c, g, or t
  misc_feature (726)..(727): n is a, c, g, or t
  misc_feature (733)..(733): n is a, c, g, or t
  misc_feature (735)..(735): n is a, c, g, or t
  misc_feature (741)..(741): n is a, c, g, or t
  misc_feature (744)..(744): n is a, c, g, or t
  misc_feature (752)..(752): n is a, c, g, or t
  misc_feature (754)..(754): n is a, c, g, or t
  misc_feature (771)..(772): n is a, c, g, or t
  misc_feature (778)..(778): n is a, c, g, or t
  misc_feature (782)..(783): n is a, c, g, or t
  misc_feature (785)..(786): n is a, c, g, or t
  misc_feature (792)..(792): n is a, c, g, or t
  misc_feature (797)..(798): n is a, c, g, or t
  misc_feature (801)..(801): n is a, c, g, or t
  misc_feature (803)..(803): n is a, c, g, or t
  misc_feature (809)..(809): n is a, c, g, or t
  misc_feature (812)..(812): n is a, c, g, or t
  misc_feature (814)..(838): n is a, c, g, or t
  misc_feature (846)..(846): n is a, c, g, or t
  misc_feature (849)..(849): n is a, c, g, or t
  misc_feature (853)..(853): n is a, c, g, or t
  misc_feature (875)..(875): n is a, c, g, or t
  misc_feature (895)..(895): n is a, c, g, or t
  misc_feature (898)..(898): n is a, c, g, or t
  misc_feature (902)..(902): n is a, c, g, or t
  misc_feature (931)..(931): n is a, c, g, or t
  misc_feature (940)..(940): n is a, c, g, or t
  misc_feature (1130)..(1130): n is a, c, g, or t

SEQ ID NO: 385969 - DNA, 884 bp, Homo Sapiens; identical to SEQ ID NO: 356562

SEQ ID NO: 385970 - DNA, 1234 bp, Homo Sapiens; identical to SEQ ID NO: 356563
  misc_feature (686)..(686): n is a, c, g, or t
  misc_feature (836)..(836): n is a, c, g, or t
  misc_feature (985)..(1042): n is a, c, g, or t

SEQ ID NO: 385971 - DNA, 1829 bp, Homo Sapiens; identical to SEQ ID NO: 356564
  misc_feature (292)..(349): n is a, c, g, or t
  misc_feature (537)..(537): n is a, c, g, or t
  misc_feature (539)..(539): n is a, c, g, or t
  misc_feature (645)..(685): n is a, c, g, or t

SEQ ID NO: 385972 - DNA, 426 bp, Homo Sapiens; identical to SEQ ID NO: 356565
  misc_feature (16)..(16): n is a, c, g, or t
  misc_feature (58)..(96): n is a, c, g, or t
  misc_feature (179)..(225): n is a, c, g, or t
  misc_feature (301)..(363): n is a, c, g, or t

SEQ ID NO: 385973 - DNA, 1875 bp, Homo Sapiens; identical to SEQ ID NO: 356577

SEQ ID NO: 385974 - DNA, 1126 bp, Homo Sapiens; identical to SEQ ID NO: 356578

SEQ ID NO: 385975 - DNA, 823 bp, Homo Sapiens; identical to SEQ ID NO: 356579
  misc_feature (54)..(90): n is a, c, g, or t

SEQ ID NO: 385976 - DNA, 505 bp, Homo Sapiens; identical to SEQ ID NO: 356580
  misc_feature (61)..(61): n is a, c, g, or t
  misc_feature (107)..(107): n is a, c, g, or t
  misc_feature (221)..(221): n is a, c, g, or t

SEQ ID NO: 385977 - DNA, 941 bp, Homo Sapiens; identical to SEQ ID NO: 356581
  misc_feature (144)..(144): n is a, c, g, or t

SEQ ID NO: 385978 - DNA, 750 bp, Homo Sapiens; identical to SEQ ID NO: 356582
  misc_feature (17)..(17): n is a, c, g, or t
  misc_feature (25)..(25): n is a, c, g, or t
  misc_feature (136)..(152): n is a, c, g, or t
  misc_feature (581)..(642): n is a, c, g, or t

SEQ ID NO: 385979 - DNA, 1458 bp, Homo Sapiens; identical to SEQ ID NO: 356584
  misc_feature (268)..(268): n is a, c, g, or t

SEQ ID NO: 385980 - DNA, 862 bp, Homo Sapiens; identical to SEQ ID NO: 356585

SEQ ID NO: 385981 - DNA, 1038 bp, Homo Sapiens; identical to SEQ ID NO: 356589
  misc_feature (12)..(12): n is a, c, g, or t
  misc_feature (22)..(22): n is a, c, g, or t
  misc_feature (48)..(48): n is a, c, g, or t
  misc_feature (55)..(55): n is a, c, g, or t
  misc_feature (59)..(60): n is a, c, g, or t
  misc_feature (119)..(119): n is a, c, g, or t
  misc_feature (122)..(122): n is a, c, g, or t

SEQ ID NO: 385982 - DNA, 323 bp, Homo Sapiens; identical to SEQ ID NO: 356590

SEQ ID NO: 385983 - DNA, 1371 bp, Homo Sapiens; identical to SEQ ID NO: 356591
  misc_feature (320)..(363): n is a, c, g, or t
  misc_feature (479)..(522): n is a, c, g, or t
  misc_feature (1016)..(1016): n is a, c, g, or t
  misc_feature (1109)..(1109): n is a, c, g, or t
  misc_feature (1128)..(1128): n is a, c, g, or t
  misc_feature (1135)..(1135): n is a, c, g, or t

SEQ ID NO: 385984 - DNA, 1127 bp, Homo Sapiens; identical to SEQ ID NO: 356592
  misc_feature (750)..(772): n is a, c, g, or t
  misc_feature (918)..(943): n is a, c, g, or t

SEQ ID NO: 385985 - DNA, 2512 bp, Homo Sapiens; identical to SEQ ID NO: 356593
  misc_feature (100)..(136): n is a, c, g, or t
  misc_feature (1491)..(1515): n is a, c, g, or t

SEQ ID NO: 385986 - DNA, 1045 bp, Homo Sapiens; identical to SEQ ID NO: 356594
  misc_feature (530)..(554): n is a, c, g, or t

SEQ ID NO: 385987 - DNA, 405 bp, Homo Sapiens; identical to SEQ ID NO: 356595
  misc_feature (11)..(11): n is a, c, g, or t

SEQ ID NO: 385988 - DNA, 469 bp, Homo Sapiens; identical to SEQ ID NO: 356596

SEQ ID NO: 385989 - DNA, 458 bp, Homo Sapiens; identical to SEQ ID NO: 356597

SEQ ID NO: 385990 - DNA, 1626 bp, Homo Sapiens; identical to SEQ ID NO: 356598
  misc_feature (1104)..(1147): n is a, c, g, or t
  misc_feature (1245)..(1326): n is a, c, g, or t
  misc_feature (1490)..(1526): n is a, c, g, or t

SEQ ID NO: 385991 - DNA, 1569 bp, Homo Sapiens; identical to SEQ ID NO: 356600
  misc_feature (99)..(99): n is a, c, g, or t
  misc_feature (103)..(103): n is a, c, g, or t
  misc_feature (115)..(115): n is a, c, g, or t
  misc_feature (119)..(121): n is a, c, g, or t
  misc_feature (123)..(123): n is a, c, g, or t
  misc_feature (127)..(127): n is a, c, g, or t
  misc_feature (134)..(134): n is a, c, g, or t
  misc_feature (136)..(136): n is a, c, g, or t
  misc_feature (145)..(145): n is a, c, g, or t
  misc_feature (156)..(158): n is a, c, g, or t
  misc_feature (168)..(168): n is a, c, g, or t
  misc_feature (175)..(176): n is a, c, g, or t
  misc_feature (178)..(178): n is a, c, g, or t
  misc_feature (181)..(181): n is a, c, g, or t
  misc_feature (184)..(184): n is a, c, g, or t
  misc_feature (187)..(188): n is a, c, g, or t
  misc_feature (190)..(190): n is a, c, g, or t
  misc_feature (196)..(197): n is a, c, g, or t
  misc_feature (201)..(202): n is a, c, g, or t
  misc_feature (204)..(205): n is a, c, g, or t
  misc_feature (207)..(207): n is a, c, g, or t
  misc_feature (211)..(211): n is a, c, g, or t
  misc_feature (214)..(214): n is a, c, g, or t
  misc_feature (226)..(226): n is a, c, g, or t
  misc_feature (230)..(233): n is a, c, g, or t
  misc_feature (238)..(239): n is a, c, g, or t
  misc_feature (243)..(243): n is a, c, g, or t
  misc_feature (251)..(252): n is a, c, g, or t
  misc_feature (256)..(256): n is a, c, g, or t
  misc_feature (260)..(261): n is a, c, g, or t
  misc_feature (270)..(270): n is a, c, g, or t
  misc_feature (273)..(273): n is a, c, g, or t
  misc_feature (279)..(279): n is a, c, g, or t
  misc_feature (284)..(284): n is a, c, g, or t
  misc_feature (289)..(292): n is a, c, g, or t
  misc_feature (298)..(299): n is a, c, g, or t
  misc_feature (309)..(309): n is a, c, g, or t
  misc_feature (313)..(313): n is a, c, g, or t
  misc_feature (315)..(315): n is a, c, g, or t
  misc_feature (319)..(320): n is a, c, g, or t
  misc_feature (322)..(322): n is a, c, g, or t
  misc_feature (331)..(331): n is a, c, g, or t
  misc_feature (334)..(334): n is a, c, g, or t
  misc_feature (338)..(338): n is a, c, g, or t
  misc_feature (356)..(356): n is a, c, g, or t
  misc_feature (359)..(359): n is a, c, g, or t
  misc_feature (374)..(374): n is a, c, g, or t
  misc_feature (380)..(380): n is a, c, g, or t
  misc_feature (389)..(389): n is a, c, g, or t
  misc_feature (392)..(394): n is a, c, g, or t
  misc_feature (409)..(409): n is a, c, g, or t
  misc_feature (413)..(413): n is a, c, g, or t
  misc_feature (416)..(417): n is a, c, g, or t
  misc_feature (420)..(420): n is a, c, g, or t
  misc_feature (423)..(425): n is a, c, g, or t
  misc_feature (428)..(428): n is a, c, g, or t
  misc_feature (440)..(440): n is a, c, g, or t
  misc_feature (458)..(459): n is a, c, g, or t
  misc_feature (494)..(494): n is a, c, g, or t
  misc_feature (1443)..(1443): n is a, c, g, or t

SEQ ID NO: 385992 - DNA, 900 bp, Homo Sapiens; identical to SEQ ID NO: 356601

SEQ ID NO: 385993 - DNA, 1139 bp, Homo Sapiens; identical to SEQ ID NO: 356602
  misc_feature (6)..(6): n is a, c, g, or t
  misc_feature (20)..(20): n is a, c, g, or t
  misc_feature (25)..(25): n is a, c, g, or t
  misc_feature (30)..(31): n is a, c, g, or t
  misc_feature (33)..(34): n is a, c, g, or t
  misc_feature (43)..(43): n is a, c, g, or t
  misc_feature (50)..(50): n is a, c, g, or t
  misc_feature (59)..(59): n is a, c, g, or t
  misc_feature (65)..(65): n is a, c, g, or t
  misc_feature (67)..(67): n is a, c, g, or t
  misc_feature (77)..(77): n is a, c, g, or t
  misc_feature (85)..(85): n is a, c, g, or t
  misc_feature (105)..(105): n is a, c, g, or t
  misc_feature (112)..(112): n is a, c, g, or t
  misc_feature (118)..(118): n is a, c, g, or t
  misc_feature (628)..(660): n is a, c, g, or t

SEQ ID NO: 385994 - DNA, 1424 bp, Homo Sapiens; identical to SEQ ID NO: 356603

SEQ ID NO: 385995 - DNA, 944 bp, Homo Sapiens; identical to SEQ ID NO: 356604

SEQ ID NO: 385996 - DNA, 3455 bp, Homo Sapiens; identical to SEQ ID NO: 356608
  misc_feature (826)..(826): n is a, c, g, or t
  misc_feature (869)..(869): n is a, c, g, or t

SEQ ID NO: 385997 - DNA, 858 bp, Homo Sapiens; identical to SEQ ID NO: 356609

SEQ ID NO: 385998 - DNA, 1029 bp, Homo Sapiens; identical to SEQ ID NO: 356610

SEQ ID NO: 385999 - DNA, 348 bp, Homo Sapiens; identical to SEQ ID NO: 356611

SEQ ID NO: 386000 - DNA, 582 bp, Homo Sapiens; identical to SEQ ID NO: 356612

SEQ ID NO: 386001 - DNA, 737 bp, Homo Sapiens; identical to SEQ ID NO: 356621
  misc_feature (31)..(31): n is a, c, g, or t
  misc_feature (74)..(74): n is a, c, g, or t
  misc_feature (131)..(131): n is a, c, g, or t
  misc_feature (615)..(655): n is a, c, g, or t

SEQ ID NO: 386002 - DNA, 2386 bp, Homo Sapiens; identical to SEQ ID NO: 356622
  misc_feature (1582)..(1582): n is a, c, g, or t
  misc_feature (2117)..(2178): n is a, c, g, or t
  misc_feature (2181)..(2259): n is a, c, g, or t
  misc_feature (2264)..(2264): n is a, c, g, or t
  misc_feature (2266)..(2269): n is a, c, g, or t
  misc_feature (2271)..(2276): n is a, c, g, or t
  misc_feature (2278)..(2284): n is a, c, g, or t
  misc_feature (2298)..(2313): n is a, c, g, or t

SEQ ID NO: 386003 - DNA, 1808 bp, Homo Sapiens; identical to SEQ ID NO: 356626
  misc_feature (542)..(542): n is a, c, g, or t
  misc_feature (655)..(655): n is a, c, g, or t

SEQ ID NO: 386004 - DNA, 1143 bp, Homo Sapiens; identical to SEQ ID NO: 356627

SEQ ID NO: 386005 - DNA, 1078 bp, Homo Sapiens; identical to SEQ ID NO: 356628
  misc_feature (10)..(10): n is a, c, g, or t
  misc_feature (820)..(820): n is a, c, g, or t
  misc_feature (903)..(905): n is a, c, g, or t
  misc_feature (907)..(908): n is a, c, g, or t
  misc_feature (912)..(912): n is a, c, g, or t
  misc_feature (943)..(943): n is a, c, g, or t
  misc_feature (947)..(947): n is a, c, g, or t
  misc_feature (950)..(950): n is a, c, g, or t
  misc_feature (953)..(953): n is a, c, g, or t
  misc_feature (955)..(955): n is a, c, g, or t
  misc_feature (959)..(961): n is a, c, g, or t
  misc_feature (966)..(966): n is a, c, g, or t
  misc_feature (971)..(971): n is a, c, g, or t
  misc_feature (977)..(977): n is a, c, g, or t
  misc_feature (982)..(982): n is a, c, g, or t
  misc_feature (984)..(984): n is a, c, g, or t
  misc_feature (991)..(991): n is a, c, g, or t
  misc_feature (994)..(994): n is a, c, g, or t
  misc_feature (1018)..(1018): n is a, c, g, or t
  misc_feature (1021)..(1022): n is a, c, g, or t
  misc_feature (1027)..(1027): n is a, c, g, or t
  misc_feature (1035)..(1035): n is a, c, g, or t
  misc_feature (1037)..(1037): n is a, c, g, or t
  misc_feature (1040)..(1042): n is a, c, g, or t
  misc_feature (1046)..(1046): n is a, c, g, or t
  misc_feature (1052)..(1052): n is a, c, g, or t

SEQ ID NO: 386006 - DNA, 956 bp, Homo Sapiens; identical to SEQ ID NO: 356629

SEQ ID NO: 386007 - DNA, 1079 bp, Homo Sapiens; identical to SEQ ID NO: 356630
  misc_feature (837)..(889): n is a, c, g, or t

SEQ ID NO: 386008 - DNA, 1074 bp, Homo Sapiens; identical to SEQ ID NO: 356631
  misc_feature (577)..(577): n is a, c, g, or t
  misc_feature (628)..(628): n is a, c, g, or t
  misc_feature (812)..(812): n is a, c, g, or t
  misc_feature (816)..(816): n is a, c, g, or t
  misc_feature (836)..(836): n is a, c, g, or t
  misc_feature (990)..(990): n is a, c, g, or t

SEQ ID NO: 386009 - DNA, 696 bp, Homo Sapiens; identical to SEQ ID NO: 356632

SEQ ID NO: 386010 - DNA, 710 bp, Homo Sapiens; identical to SEQ ID NO: 356636
  misc_feature (341)..(365): n is a, c, g, or t
  misc_feature (484)..(502): n is a, c, g, or t

SEQ ID NO: 386011 - DNA, 652 bp, Homo Sapiens; identical to SEQ ID NO: 356637

SEQ ID NO: 386012 - DNA, 1013 bp, Homo Sapiens; identical to SEQ ID NO: 356638

SEQ ID NO: 386013 - DNA, 2820 bp, Homo Sapiens; identical to SEQ ID NO: 356640
  misc_feature (2207)..(2207): n is a, c, g, or t
  misc_feature (2236)..(2236): n is a, c, g, or t
  misc_feature (2242)..(2242): n is a, c, g, or t
  misc_feature (2244)..(2245): n is a, c, g, or t
  misc_feature (2254)..(2254): n is a, c, g, or t
  misc_feature (2258)..(2258): n is a, c, g, or t
  misc_feature (2271)..(2271): n is a, c, g, or t
  misc_feature (2279)..(2281): n is a, c, g, or t
  misc_feature (2300)..(2301): n is a, c, g, or t
  misc_feature (2318)..(2318): n is a, c, g, or t
  misc_feature (2324)..(2324): n is a, c, g, or t
  misc_feature (2327)..(2327): n is a, c, g, or t
  misc_feature (2333)..(2333): n is a, c, g, or t
  misc_feature (2339)..(2339): n is a, c, g, or t
  misc_feature (2375)..(2375): n is a, c, g, or t
  misc_feature (2454)..(2454): n is a, c, g, or t
  misc_feature (2462)..(2462): n is a, c, g, or t
  misc_feature (2466)..(2466): n is a, c, g, or t
  misc_feature (2474)..(2474): n is a, c, g, or t
  misc_feature (2488)..(2488): n is a, c, g, or t
  misc_feature (2511)..(2511): n is a, c, g, or t
  misc_feature (2520)..(2520): n is a, c, g, or t
  misc_feature (2522)..(2522): n is a, c, g, or t
  misc_feature (2531)..(2531): n is a, c, g, or t
  misc_feature (2559)..(2559): n is a, c, g, or t
  misc_feature (2598)..(2598): n is a, c, g, or t
  misc_feature (2602)..(2603): n is a, c, g, or t
  misc_feature (2608)..(2608): n is a, c, g, or t
  misc_feature (2626)..(2627): n is a, c, g, or t
  misc_feature (2642)..(2643): n is a, c, g, or t
  misc_feature (2662)..(2662): n is a, c, g, or t
  misc_feature (2666)..(2666): n is a, c, g, or t
  misc_feature (2668)..(2669): n is a, c, g, or t
  misc_feature (2675)..(2677): n is a, c, g, or t
  misc_feature (2682)..(2682): n is a, c, g, or t
  misc_feature (2689)..(2689): n is a, c, g, or t
  misc_feature (2691)..(2715): n is a, c, g, or t
  misc_feature (2727)..(2727): n is a, c, g, or t
  misc_feature (2818)..(2818): n is a, c, g, or t

SEQ ID NO: 386014 - DNA, 463 bp, Homo Sapiens; identical to SEQ ID NO: 356641

SEQ ID NO: 386015 - DNA, 507 bp, Homo Sapiens; identical to SEQ ID NO: 356642

SEQ ID NO: 386016 - DNA, 764 bp, Homo Sapiens; identical to SEQ ID NO: 356644
  misc_feature (72)..(163): n is a, c, g, or t

SEQ ID NO: 386017 - DNA, 662 bp, Homo Sapiens; identical to SEQ ID NO: 356645
  misc_feature (72)..(163): n is a, c, g, or t
  misc_feature (567)..(567): n is a, c, g, or t
  misc_feature (571)..(572): n is a, c, g, or t
  misc_feature (574)..(574): n is a, c, g, or t
  misc_feature (577)..(577): n is a, c, g, or t
  misc_feature (593)..(593): n is a, c, g, or t
  misc_feature (609)..(610): n is a, c, g, or t
  misc_feature (619)..(619): n is a, c, g, or t
  misc_feature (626)..(626): n is a, c, g, or t
  misc_feature (628)..(628): n is a, c, g, or t
  misc_feature (637)..(640): n is a, c, g, or t
  misc_feature (644)..(644): n is a, c, g, or t
  misc_feature (652)..(654): n is a, c, g, or t

SEQ ID NO: 386018 - DNA, 411 bp, Homo Sapiens; identical to SEQ ID NO: 356646

SEQ ID NO: 386019 - DNA, 2742 bp, Homo Sapiens; identical to SEQ ID NO: 356651

SEQ ID NO: 386020 - DNA, 483 bp, Homo Sapiens; identical to SEQ ID NO: 356652

SEQ ID NO: 386021 - DNA, 2632 bp, Homo Sapiens; identical to SEQ ID NO: 356664
  misc_feature (515)..(515): n is a, c, g, or t
  misc_feature (2041)..(2093): n is a, c, g, or t
  misc_feature (2143)..(2143): n is a, c, g, or t
  misc_feature (2151)..(2151): n is a, c, g, or t
  misc_feature (2172)..(2172): n is a, c, g, or t
  misc_feature (2272)..(2272): n is a, c, g, or t
  misc_feature (2288)..(2288): n is a, c, g, or t

SEQ ID NO: 386022 - DNA, 1157 bp, Homo Sapiens; identical to SEQ ID NO: 356665
  misc_feature (852)..(888): n is a, c, g, or t

SEQ ID NO: 386023 - DNA, 2037 bp, Homo Sapiens; identical to SEQ ID NO: 356668

SEQ ID NO: 386024 - DNA, 418 bp, Homo Sapiens; identical to SEQ ID NO: 356669

SEQ ID NO: 386025 - DNA, 2019 bp, Homo Sapiens; identical to SEQ ID NO: 356670
  misc_feature (231)..(232): n is a, c, g, or t

SEQ ID NO: 386026 - DNA, 2030 bp, Homo Sapiens; identical to SEQ ID NO: 356671
  misc_feature (198)..(198): n is a, c, g, or t
  misc_feature (1417)..(1481): n is a, c, g, or t
  misc_feature (1889)..(1900): n is a, c, g, or t

SEQ ID NO: 386027 - DNA, 928 bp, Homo Sapiens; identical to SEQ ID NO: 356672
  misc_feature (25)..(25): n is a, c, g, or t

SEQ ID NO: 386028 - DNA, 608 bp, Homo Sapiens; identical to SEQ ID NO: 356673

SEQ ID NO: 386029 - DNA, 542 bp, Homo Sapiens; identical to SEQ ID NO: 356674
  misc_feature (56)..(56): n is a, c, g, or t
  misc_feature (98)..(98): n is a, c, g, or t
  misc_feature (131)..(131): n is a, c, g, or t

SEQ ID NO: 386030 - DNA, 856 bp, Homo Sapiens; identical to SEQ ID NO: 356677
  misc_feature (3)..(3): n is a, c, g, or t
  misc_feature (9)..(9): n is a, c, g, or t
  misc_feature (14)..(14): n is a, c, g, or t
  misc_feature (16)..(16): n is a, c, g, or t
  misc_feature (20)..(20): n is a, c, g, or t
  misc_feature (22)..(22): n is a, c, g, or t
  misc_feature (26)..(26): n is a, c, g, or t
  misc_feature (39)..(39): n is a, c, g, or t
  misc_feature (41)..(41): n is a, c, g, or t
  misc_feature (43)..(43): n is a, c, g, or t
  misc_feature (50)..(50): n is a, c, g, or t
  misc_feature (52)..(52): n is a, c, g, or t
  misc_feature (54)..(54): n is a, c, g, or t
  misc_feature (57)..(57): n is a, c, g, or t
  misc_feature (61)..(61): n is a, c, g, or t
  misc_feature (66)..(66): n is a, c, g, or t
  misc_feature (72)..(72): n is a, c, g, or t
  misc_feature (75)..(75): n is a, c, g, or t
  misc_feature (79)..(79): n is a, c, g, or t
  misc_feature (81)..(81): n is a, c, g, or t
  misc_feature (83)..(83): n is a, c, g, or t
  misc_feature (85)..(87): n is a, c, g, or t
  misc_feature (90)..(93): n is a, c, g, or t
  misc_feature (98)..(98): n is a, c, g, or t
  misc_feature (106)..(106): n is a, c, g, or t
  misc_feature (109)..(109): n is a, c, g, or t
  misc_feature (115)..(115): n is a, c, g, or t
  misc_feature (120)..(121): n is a, c, g, or t
  misc_feature (123)..(123): n is a, c, g, or t
  misc_feature (128)..(131): n is a, c, g, or t
  misc_feature (137)..(138): n is a, c, g, or t
  misc_feature (142)..(142): n is a, c, g, or t
  misc_feature (145)..(146): n is a, c, g, or t
  misc_feature (150)..(153): n is a, c, g, or t
  misc_feature (158)..(158): n is a, c, g, or t
  misc_feature (162)..(162): n is a, c, g, or t
  misc_feature (169)..(169): n is a, c, g, or t
  misc_feature (172)..(173): n is a, c, g, or t
  misc_feature (176)..(178): n is a, c, g, or t
  misc_feature (181)..(197): n is a, c, g, or t
  misc_feature (200)..(200): n is a, c, g, or t
  misc_feature (206)..(208): n is a, c, g, or t
  misc_feature (216)..(216): n is a, c, g, or t
  misc_feature (221)..(221): n is a, c, g, or t
  misc_feature (230)..(230): n is a, c, g, or t
  misc_feature (241)..(241): n is a, c, g, or t
  misc_feature (246)..(246): n is a, c, g, or t
  misc_feature (249)..(249): n is a, c, g, or t
  misc_feature (254)..(255): n is a, c, g, or t
  misc_feature (260)..(260): n is a, c, g, or t
  misc_feature (290)..(291): n is a, c, g, or t
  misc_feature (301)..(301): n is a, c, g, or t
  misc_feature (313)..(313): n is a, c, g, or t
  misc_feature (326)..(326): n is a, c, g, or t
  misc_feature (341)..(342): n is a, c, g, or t
  misc_feature (383)..(384): n is a, c, g, or t
  misc_feature (406)..(407): n is a, c, g, or t
  misc_feature (410)..(410): n is a, c, g, or t
  misc_feature (429)..(429): n is a, c, g, or t
  misc_feature (444)..(445): n is a, c, g, or t
  misc_feature (448)..(448): n is a, c, g, or t
  misc_feature (456)..(456): n is a, c, g, or t
  misc_feature (482)..(483): n is a, c, g, or t
  misc_feature (494)..(494): n is a, c, g, or t
  misc_feature (496)..(496): n is a, c, g, or t

SEQ ID NO: 386031 - DNA, 500 bp, Homo Sapiens; identical to SEQ ID NO: 356678
  misc_feature (301)..(340): n is a, c, g, or t

SEQ ID NO: 386032 - DNA, 1332 bp, Homo Sapiens; identical to SEQ ID NO: 356687
  misc_feature (421)..(540): n is a, c, g, or t
  misc_feature (638)..(638): n is a, c, g, or t
  misc_feature (712)..(726): n is a, c, g, or t
  misc_feature (868)..(919): n is a, c, g, or t
  misc_feature (1158)..(1158): n is a, c, g, or t
  misc_feature (1208)..(1208): n is a, c, g, or t
  misc_feature (1237)..(1237): n is a, c, g, or t

SEQ ID NO: 386033 - DNA, 671 bp, Homo Sapiens; identical to SEQ ID NO: 356688

SEQ ID NO: 386034 - DNA, 1791 bp, Homo Sapiens; identical to SEQ ID NO: 356693

SEQ ID NO: 386035 - DNA, 932 bp, Homo Sapiens; identical to SEQ ID NO: 356694

SEQ ID NO: 386036 - DNA, 2342 bp, Homo Sapiens; identical to SEQ ID NO: 356695

SEQ ID NO: 386037 - DNA, 449 bp, Homo Sapiens; identical to SEQ ID NO: 356696

SEQ ID NO: 386038 - DNA, 897 bp, Homo Sapiens; identical to SEQ ID NO: 356700

SEQ ID NO: 386039 - DNA, 886 bp, Homo Sapiens; identical to SEQ ID NO: 356701

SEQ ID NO: 386040 - DNA, 904 bp, Homo Sapiens; identical to SEQ ID NO: 356702

SEQ ID NO: 386041 - DNA, 940 bp, Homo Sapiens; identical to SEQ ID NO: 356703
  misc_feature (86)..(94): n is a, c, g, or t

SEQ ID NO: 386042 - DNA, 1369 bp, Homo Sapiens; identical to SEQ ID NO: 356704

SEQ ID NO: 386043 - DNA, 724 bp, Homo Sapiens; identical to SEQ ID NO: 356705

SEQ ID NO: 386044 - DNA, 1525 bp, Homo Sapiens; identical to SEQ ID NO: 356707
  misc_feature (1045)..(1047): n is a, c, g, or t
  misc_feature (1049)..(1050): n is a, c, g, or t
  misc_feature (1113)..(1113): n is a, c, g, or t
  misc_feature (1129)..(1129): n is a, c, g, or t
  misc_feature (1131)..(1131): n is a, c, g, or t
  misc_feature (1137)..(1137): n is a, c, g, or t
  misc_feature (1142)..(1142): n is a, c, g, or t
  misc_feature (1144)..(1144): n is a, c, g, or t
  misc_feature (1146)..(1146): n is a, c, g, or t
  misc_feature (1148)..(1148): n is a, c, g, or t
  misc_feature (1155)..(1155): n is a, c, g, or t
  misc_feature (1166)..(1166): n is a, c, g, or t
  misc_feature (1168)..(1168): n is a, c, g, or t
  misc_feature (1172)..(1172): n is a, c, g, or t
  misc_feature (1174)..(1176): n is a, c, g, or t
  misc_feature (1193)..(1193): n is a, c, g, or t
  misc_feature (1237)..(1237): n is a, c, g, or t
  misc_feature (1323)..(1323): n is a, c, g, or t
  misc_feature (1344)..(1344): n is a, c, g, or t
  misc_feature (1356)..(1356): n is a, c, g, or t
  misc_feature (1374)..(1374): n is a, c, g, or t
  misc_feature (1386)..(1386): n is a, c, g, or t
  misc_feature (1388)..(1388): n is a, c, g, or t
  misc_feature (1397)..(1397): n is a, c, g, or t
  misc_feature (1403)..(1405): n is a, c, g, or t
  misc_feature (1413)..(1413): n is a, c, g, or t
  misc_feature (1429)..(1429): n is a, c, g, or t
  misc_feature (1431)..(1431): n is a, c, g, or t
  misc_feature (1444)..(1444): n is a, c, g, or t
  misc_feature (1452)..(1452): n is a, c, g, or t
  misc_feature (1487)..(1487): n is a, c, g, or t
  misc_feature (1502)..(1502): n is a, c, g, or t

SEQ ID NO: 386045 - DNA, 1359 bp, Homo Sapiens; identical to SEQ ID NO: 356708

SEQ ID NO: 386046 - DNA, 1738 bp, Homo Sapiens; identical to SEQ ID NO: 356709

SEQ ID NO: 386047 - DNA, 872 bp, Homo Sapiens; identical to SEQ ID NO: 356710

SEQ ID NO: 386048 - DNA, 861 bp, Homo Sapiens; identical to SEQ ID NO: 356712

SEQ ID NO: 386049 - DNA, 872 bp, Homo Sapiens; identical to SEQ ID NO: 356713

SEQ ID NO: 386050 - DNA, 1956 bp, Homo Sapiens; identical to SEQ ID NO: 356718
  misc_feature (1051)..(1051): n is a, c, g, or t
  misc_feature (1718)..(1727): n is a, c, g, or t

SEQ ID NO: 386051 - DNA, 645 bp, Homo Sapiens; identical to SEQ ID NO: 356719

SEQ ID NO: 386052 - DNA, 788 bp, Homo Sapiens; identical to SEQ ID NO: 356722

SEQ ID NO: 386053 - DNA, 489 bp, Homo Sapiens; identical to SEQ ID NO: 356723

SEQ ID NO: 386054 - DNA, 1438 bp, Homo Sapiens; identical to SEQ ID NO: 356724
  misc_feature (55)..(69): n is a, c, g, or t
  misc_feature (75)..(308): n is a, c, g, or t
  misc_feature (311)..(313): n is a, c, g, or t
  misc_feature (319)..(319): n is a, c, g, or t
  misc_feature (322)..(325): n is a, c, g, or t
  misc_feature (330)..(335): n is a, c, g, or t
  misc_feature (337)..(337): n is a, c, g, or t
  misc_feature (339)..(346): n is a, c, g, or t
  misc_feature (348)..(358): n is a, c, g, or t
  misc_feature (360)..(427): n is a, c, g, or t
  misc_feature (429)..(669): n is a, c, g, or t
  misc_feature (1141)..(1141): n is a, c, g, or t

SEQ ID NO: 386055 - DNA, 1539 bp, Homo Sapiens; identical to SEQ ID NO: 356725
  misc_feature (974)..(974): n is a, c, g, or t
  misc_feature (1005)..(1005): n is a, c, g, or t
  misc_feature (1263)..(1263): n is a, c, g, or t
  misc_feature (1308)..(1308): n is a, c, g, or t
  misc_feature (1325)..(1325): n is a, c, g, or t
  misc_feature (1381)..(1381): n is a, c, g, or t
  misc_feature (1414)..(1414): n is a, c, g, or t

SEQ ID NO: 386056 - DNA, 1605 bp, Homo Sapiens; identical to SEQ ID NO: 356729
  misc_feature (31)..(31): n is a, c, g, or t
  misc_feature (119)..(119): n is a, c, g, or t
  misc_feature (142)..(234): n is a, c, g, or t

SEQ ID NO: 386057 - DNA, 825 bp, Homo Sapiens; identical to SEQ ID NO: 356730
  misc_feature (5)..(5): n is a, c, g, or t
  misc_feature (23)..(23): n is a, c, g, or t
  misc_feature (36)..(36): n is a, c, g, or t
  misc_feature (46)..(225): n is a, c, g, or t
  misc_feature (367)..(459): n is a, c, g, or t
  misc_feature (487)..(487): n is a, c, g, or t
  misc_feature (492)..(492): n is a, c, g, or t
  misc_feature (608)..(608): n is a, c, g, or t
  misc_feature (620)..(620): n is a, c, g, or t
  misc_feature (771)..(771): n is a, c, g, or t
  misc_feature (789)..(789): n is a, c, g, or t
  misc_feature (804)..(804): n is a, c, g, or t

SEQ ID NO: 386058 - DNA, 505 bp, Homo Sapiens; identical to SEQ ID NO: 356731
  misc_feature (139)..(139): n is a, c, g, or t

SEQ ID NO: 386059 - DNA, 508 bp, Homo Sapiens; identical to SEQ ID NO: 356736

SEQ ID NO: 386060 - DNA, 1243 bp, Homo Sapiens; identical to SEQ ID NO: 356737
  misc_feature (28)..(28): n is a, c, g, or t
  misc_feature (855)..(930): n is a, c, g, or t

SEQ ID NO: 386061 - DNA, 1127 bp, Homo Sapiens; identical to SEQ ID NO: 356738
  misc_feature (3)..(3): n is a, c, g, or t
  misc_feature (12)..(12): n is a, c, g, or t
  misc_feature (19)..(19): n is a, c, g, or t
  misc_feature (22)..(22): n is a, c, g, or t
  misc_feature (31)..(31): n is a, c, g, or t
  misc_feature (33)..(33): n is a, c, g, or t
  misc_feature (41)..(43): n is a, c, g, or t
  misc_feature (53)..(53): n is a, c, g, or t
  misc_feature (56)..(56): n is a, c, g, or t
  misc_feature (66)..(66): n is a, c, g, or t
  misc_feature (72)..(72): n is a, c, g, or t
  misc_feature (75)..(75): n is a, c, g, or t
  misc_feature (84)..(84): n is a, c, g, or t
  misc_feature (88)..(88): n is a, c, g, or t
  misc_feature (98)..(99): n is a, c, g, or t
  misc_feature (102)..(103): n is a, c, g, or t
  misc_feature (108)..(108): n is a, c, g, or t
  misc_feature (117)..(117): n is a, c, g, or t
  misc_feature (125)..(126): n is a, c, g, or t
  misc_feature (128)..(128): n is a, c, g, or t
  misc_feature (148)..(148): n is a, c, g, or t
  misc_feature (151)..(152): n is a, c, g, or t
  misc_feature (210)..(210): n is a, c, g, or t
  misc_feature (230)..(230): n is a, c, g, or t
  misc_feature (255)..(255): n is a, c, g, or t
  misc_feature (638)..(646): n is a, c, g, or t
  misc_feature (650)..(650): n is a, c, g, or t
  misc_feature (666)..(666): n is a, c, g, or t
  misc_feature (669)..(669): n is a, c, g, or t
  misc_feature (676)..(676): n is a, c, g, or t
  misc_feature (682)..(682): n is a, c, g, or t
  misc_feature (689)..(689): n is a, c, g, or t
  misc_feature (696)..(696): n is a, c, g, or t
  misc_feature (705)..(705): n is a, c, g, or t
  misc_feature (711)..(711): n is a, c, g, or t
  misc_feature (713)..(713): n is a, c, g, or t
  misc_feature (715)..(715): n is a, c, g, or t
  misc_feature (719)..(743): n is a, c, g, or t
  misc_feature (752)..(752): n is a, c, g, or t
  misc_feature (760)..(760): n is a, c, g, or t
  misc_feature (768)..(768): n is a, c, g, or t
  misc_feature (771)..(771): n is a, c, g, or t
  misc_feature (786)..(786): n is a, c, g, or t
  misc_feature (790)..(790): n is a, c, g, or t
  misc_feature (802)..(802): n is a, c, g, or t
  misc_feature (815)..(815): n is a, c, g, or t
  misc_feature (835)..(835): n is a, c, g, or t
  misc_feature (858)..(860): n is a, c, g, or t
  misc_feature (864)..(865): n is a, c, g, or t
  misc_feature (876)..(876): n is a, c, g, or t
  misc_feature (881)..(881): n is a, c, g, or t
  misc_feature (883)..(884): n is a, c, g, or t
  misc_feature (903)..(903): n is a, c, g, or t
  misc_feature (916)..(916): n is a, c, g, or t
  misc_feature (950)..(950): n is a, c, g, or t
  misc_feature (952)..(953): n is a, c, g, or t
  misc_feature (961)..(961): n is a, c, g, or t
  misc_feature (1027)..(1027): n is a, c, g, or t
  misc_feature (1069)..(1069): n is a, c, g, or t
  misc_feature (1113)..(1113): n is a, c, g, or t
  misc_feature (1119)..(1119): n is a, c, g, or t
  misc_feature (1124)..(1124): n is a, c, g, or t

SEQ ID NO: 386062 - DNA, 548 bp, Homo Sapiens; identical to SEQ ID NO: 356739
  misc_feature (32)..(32): n is a, c, g, or t
  misc_feature (39)..(39): n is a, c, g, or t
  misc_feature (70)..(70): n is a, c, g, or t
  misc_feature (105)..(105): n is a, c, g, or t
  misc_feature (142)..(142): n is a, c, g, or t

SEQ ID NO: 386063 - DNA, 1557 bp, Homo Sapiens; identical to SEQ ID NO: 356741
  misc_feature (126)..(126): n is a, c, g, or t
  misc_feature (139)..(139): n is a, c, g, or t
  misc_feature (141)..(141): n is a, c, g, or t
  misc_feature (143)..(143): n is a, c, g, or t
  misc_feature (273)..(273): n is a, c, g, or t
  misc_feature (346)..(346): n is a, c, g, or t
  misc_feature (1523)..(1523): n is a, c, g, or t

SEQ ID NO: 386064 - DNA, 1115 bp, Homo Sapiens; identical to SEQ ID NO: 356742
  misc_feature (516)..(556): n is a, c, g, or t
  misc_feature (758)..(758): n is a, c, g, or t

SEQ ID NO: 386065 - DNA, 1036 bp, Homo Sapiens; identical to SEQ ID NO: 356744
  misc_feature (33)..(33): n is a, c, g, or t
  misc_feature (390)..(390): n is a, c, g, or t
  misc_feature (546)..(546): n is a, c, g, or t
  misc_feature (929)..(929): n is a, c, g, or t
  misc_feature (942)..(942): n is a, c, g, or t
  misc_feature (949)..(949): n is a, c, g, or t
  misc_feature (960)..(960): n is a, c, g, or t
  misc_feature (962)..(962): n is a, c, g, or t
  misc_feature (969)..(969): n is a, c, g, or t
  misc_feature (973)..(973): n is a, c, g, or t
  misc_feature (984)..(984): n is a, c, g, or t
  misc_feature (994)..(994): n is a, c, g, or t
  misc_feature (998)..(998): n is a, c, g, or t
  misc_feature (1001)..(1002): n is a, c, g, or t
  misc_feature (1009)..(1009): n is a, c, g, or t
  misc_feature (1011)..(1011): n is a, c, g, or t
  misc_feature (1018)..(1018): n is a, c, g, or t
  misc_feature (1024)..(1024): n is a, c, g, or t
  misc_feature (1030)..(1030): n is a, c, g, or t

SEQ ID NO: 386066 - DNA, 1154 bp, Homo Sapiens; identical to SEQ ID NO: 356745
  misc_feature (1053)..(1062): n is a, c, g, or t

SEQ ID NO: 386067 - DNA, 1133 bp, Homo Sapiens; identical to SEQ ID NO: 356747
  misc_feature (9)..(9): n is a, c, g, or t

SEQ ID NO: 386068 - DNA, 776 bp, Homo Sapiens; identical to SEQ ID NO: 356748
  misc_feature (555)..(593): n is a, c, g, or t

SEQ ID NO: 386069 - DNA, 766 bp, Homo Sapiens; identical to SEQ ID NO: 356754
  misc_feature (46)..(83): n is a, c, g, or t
  misc_feature (380)..(382): n is a, c, g, or t
  misc_feature (385)..(387): n is a, c, g, or t
  misc_feature (392)..(396): n is a, c, g, or t
  misc_feature (402)..(403): n is a, c, g, or t
  misc_feature (413)..(413): n is a, c, g, or t
  misc_feature (425)..(425): n is a, c, g, or t
  misc_feature (427)..(427): n is a, c, g, or t
  misc_feature (434)..(454): n is a, c, g, or t
  misc_feature (471)..(471): n is a, c, g, or t
  misc_feature (477)..(477): n is a, c, g, or t
  misc_feature (501)..(501): n is a, c, g, or t
  misc_feature (507)..(507): n is a, c, g, or t
  misc_feature (515)..(515): n is a, c, g, or t
  misc_feature (590)..(590): n is a, c, g, or t
  misc_feature (627)..(627): n is a, c, g, or t
  misc_feature (638)..(638): n is a, c, g, or t
  misc_feature (681)..(681): n is a, c, g, or t

SEQ ID NO: 386070 - DNA, 1299 bp, Homo Sapiens; identical to SEQ ID NO: 356755

SEQ ID NO: 386071 - DNA, 393 bp, Homo Sapiens; identical to SEQ ID NO: 356756

SEQ ID NO: 386072 - DNA, 1119 bp, Homo Sapiens; identical to SEQ ID NO: 356759
  misc_feature (987)..(987): n is a, c, g, or t
  misc_feature (991)..(991): n is a, c, g, or t
  misc_feature (1059)..(1059): n is a, c, g, or t
  misc_feature (1088)..(1088): n is a, c, g, or t
  misc_feature (1092)..(1093): n is a, c, g, or t
  misc_feature (1103)..(1103): n is a, c, g, or t
  misc_feature (1109)..(1109): n is a, c, g, or t

SEQ ID NO: 386073 - DNA, 1143 bp, Homo Sapiens; identical to SEQ ID NO: 356760

SEQ ID NO: 386074 - DNA, 1436 bp, Homo Sapiens; identical to SEQ ID NO: 356766
  misc_feature (1096)..(1299): n is a, c, g, or t

SEQ ID NO: 386075 - DNA, 845 bp, Homo Sapiens; identical to SEQ ID NO: 356767

SEQ ID NO: 386076 - DNA, 778 bp, Homo Sapiens; identical to SEQ ID NO: 356769

SEQ ID NO: 386077 - DNA, 973 bp, Homo Sapiens; identical to SEQ ID NO: 356770

SEQ ID NO: 386078 - DNA, 996 bp, Homo Sapiens; identical to SEQ ID NO: 356772
  misc_feature (10)..(10): n is a, c, g, or t
  misc_feature (20)..(20): n is a, c, g, or t
  misc_feature (48)..(48): n is a, c, g, or t
  misc_feature (63)..(63): n is a, c, g, or t
  misc_feature (82)..(82): n is a, c, g, or t
  misc_feature (113)..(113): n is a, c, g, or t
  misc_feature (130)..(130): n is a, c, g, or t
  misc_feature (153)..(154): n is a, c, g, or t
  misc_feature (169)..(169): n is a, c, g, or t
  misc_feature (238)..(238): n is a, c, g, or t

SEQ ID NO: 386079 - DNA, 1604 bp, Homo Sapiens; identical to SEQ ID NO: 356773
  misc_feature (26)..(26): n is a, c, g, or t
  misc_feature (709)..(709): n is a, c, g, or t
  misc_feature (717)..(718): n is a, c, g, or t
  misc_feature (722)..(722): n is a, c, g, or t
  misc_feature (725)..(725): n is a, c, g, or t
  misc_feature (739)..(739): n is a, c, g, or t
  misc_feature (1088)..(1175): n is a, c, g, or t
  misc_feature (1355)..(1401): n is a, c, g, or t
  misc_feature (1553)..(1553): n is a, c, g, or t
  misc_feature (1570)..(1570): n is a, c, g, or t
  misc_feature (1582)..(1582): n is a, c, g, or t
  misc_feature (1584)..(1584): n is a, c, g, or t
  misc_feature (1586)..(1586): n is a, c, g, or t
  misc_feature (1588)..(1588): n is a, c, g, or t
  misc_feature (1590)..(1590): n is a, c, g, or t

SEQ ID NO: 386080 - DNA, 1663 bp, Homo Sapiens; identical to SEQ ID NO: 356789
  misc_feature (1282)..(1282): n is a, c, g, or t
  misc_feature (1285)..(1324): n is a, c, g, or t
  misc_feature (1344)..(1344): n is a, c, g, or t
  misc_feature (1364)..(1364): n is a, c, g, or t
  misc_feature (1400)..(1400): n is a, c, g, or t
  misc_feature (1418)..(1418): n is a, c, g, or t
  misc_feature (1433)..(1433): n is a, c, g, or t
  misc_feature (1443)..(1443): n is a, c, g, or t
  misc_feature (1464)..(1464): n is a, c, g, or t
  misc_feature (1472)..(1472): n is a, c, g, or t
  misc_feature (1549)..(1549): n is a, c, g, or t
  misc_feature (1555)..(1555): n is a, c, g, or t
  misc_feature (1561)..(1561): n is a, c, g, or t
  misc_feature (1567)..(1567): n is a, c, g, or t
  misc_feature (1574)..(1574): n is a, c, g, or t
  misc_feature (1622)..(1622): n is a, c, g, or t
  misc_feature (1643)..(1643): n is a, c, g, or t
  misc_feature (1645)..(1645): n is a, c, g, or t

SEQ ID NO: 386081 - DNA, 424 bp, Homo Sapiens; identical to SEQ ID NO: 356790
  misc_feature (204)..(204): n is a, c, g, or t

SEQ ID NO: 386082 - DNA, 948 bp, Homo Sapiens; identical to SEQ ID NO: 356792
  misc_feature (169)..(196): n is a, c, g, or t
  misc_feature (206)..(206): n is a, c, g, or t
  misc_feature (719)..(719): n is a, c, g, or t
  misc_feature (722)..(722): n is a, c, g, or t
  misc_feature (896)..(908): n is a, c, g, or t

SEQ ID NO: 386083 - DNA, 1361 bp, Homo Sapiens; identical to SEQ ID NO: 356793
  misc_feature (77)..(77): n is a, c, g, or t
  misc_feature (89)..(418): n is a, c, g, or t
  misc_feature (706)..(725): n is a, c, g, or t

SEQ ID NO: 386084 - DNA, 1987 bp, Homo Sapiens; identical to SEQ ID NO: 356795
  misc_feature (1232)..(1232): n is a, c, g, or t
  misc_feature (1240)..(1240): n is a, c, g, or t
  misc_feature (1263)..(1263): n is a, c, g, or t
  misc_feature (1762)..(1762): n is a, c, g, or t
  misc_feature (1764)..(1881): n is a, c, g, or t
  misc_feature (1883)..(1913): n is a, c, g, or t
  misc_feature (1922)..(1922): n is a, c, g, or t
  misc_feature (1926)..(1926): n is a, c, g, or t
  misc_feature (1936)..(1936): n is a, c, g, or t

SEQ ID NO: 386085 - DNA, 888 bp, Homo Sapiens; identical to SEQ ID NO: 356796
  misc_feature (571)..(629): n is a, c, g, or t

SEQ ID NO: 386086 - DNA, 514 bp, Homo Sapiens; identical to SEQ ID NO: 356797
  misc_feature (400)..(400): n is a, c, g, or t
  misc_feature (454)..(454): n is a, c, g, or t
  misc_feature (466)..(466): n is a, c, g, or t

SEQ ID NO: 386087 - DNA, 1703 bp, Homo Sapiens; identical to SEQ ID NO: 356801
  misc_feature (209)..(217): n is a, c, g, or t
  misc_feature (249)..(258): n is a, c, g, or t
  misc_feature (1105)..(1131): n is a, c, g, or t
  misc_feature (1198)..(1253): n is a, c, g, or t
  misc_feature (1515)..(1515): n is a, c, g, or t
  misc_feature (1546)..(1546): n is a, c, g, or t
  misc_feature (1553)..(1553): n is a, c, g, or t
  misc_feature (1646)..(1647): n is a, c, g, or t
  misc_feature (1674)..(1674): n is a, c, g, or t
  misc_feature (1682)..(1682): n is a, c, g, or t

SEQ ID NO: 386088 - DNA, 998 bp, Homo Sapiens; identical to SEQ ID NO: 356802
  misc_feature (5)..(5): n is a, c, g, or t
  misc_feature (10)..(10): n is a, c, g, or t
  misc_feature (16)..(16): n is a, c, g, or t
  misc_feature (18)..(18): n is a, c, g, or t
  misc_feature (25)..(25): n is a, c, g, or t
  misc_feature (31)..(31): n is a, c, g, or t
  misc_feature (41)..(42): n is a, c, g, or t
  misc_feature (44)..(45): n is a, c, g, or t
  misc_feature (47)..(47): n is a, c, g, or t
  misc_feature (58)..(58): n is a, c, g, or t
  misc_feature (63)..(63): n is a, c, g, or t
  misc_feature (68)..(68): n is a, c, g, or t
  misc_feature (74)..(74): n is a, c, g, or t
  misc_feature (77)..(77): n is a, c, g, or t
  misc_feature (79)..(79): n is a, c, g, or t
  misc_feature (84)..(84): n is a, c, g, or t
  misc_feature (86)..(88): n is a, c, g, or t
  misc_feature (97)..(99): n is a, c, g, or t
  misc_feature (110)..(111): n is a, c, g, or t
  misc_feature (125)..(125): n is a, c, g, or t
  misc_feature (142)..(142): n is a, c, g, or t
  misc_feature (150)..(150): n is a, c, g, or t
  misc_feature (153)..(153): n is a, c, g, or t
  misc_feature (155)..(155): n is a, c, g, or t
  misc_feature (160)..(160): n is a, c, g, or t
  misc_feature (163)..(163): n is a, c, g, or t
  misc_feature (173)..(174): n is a, c, g, or t
  misc_feature (178)..(178): n is a, c, g, or t
  misc_feature (180)..(183): n is a, c, g, or t
  misc_feature (187)..(187): n is a, c, g, or t
  misc_feature (189)..(191): n is a, c, g, or t
  misc_feature (195)..(195): n is a, c, g, or t
  misc_feature (206)..(206): n is a, c, g, or t

SEQ ID NO: 386089 - DNA, 631 bp, Homo Sapiens; identical to SEQ ID NO: 356803
  misc_feature (500)..(500): n is a, c, g, or t
  misc_feature (591)..(591): n is a, c, g, or t
  misc_feature (596)..(596): n is a, c, g, or t

SEQ ID NO: 386090 - DNA, 440 bp, Homo Sapiens; identical to SEQ ID NO: 356804
  misc_feature (23)..(23): n is a, c, g, or t

SEQ ID NO: 386091 - DNA, 1080 bp, Homo Sapiens; identical to SEQ ID NO: 356807
  misc_feature (917)..(918): n is a, c, g, or t
  misc_feature (939)..(939): n is a, c, g, or t
  misc_feature (977)..(977): n is a, c, g, or t
  misc_feature (997)..(997): n is a, c, g, or t
  misc_feature (1003)..(1005): n is a, c, g, or t
  misc_feature (1010)..(1011): n is a, c, g, or t
  misc_feature (1014)..(1014): n is a, c, g, or t
  misc_feature (1017)..(1017): n is a, c, g, or t
  misc_feature (1022)..(1022): n is a, c, g, or t
  misc_feature (1050)..(1050): n is a, c, g, or t
  misc_feature (1052)..(1052): n is a, c, g, or t
  misc_feature (1063)..(1063): n is a, c, g, or t
  misc_feature (1067)..(1068): n is a, c, g, or t
  misc_feature (1073)..(1073): n is a, c, g, or t
  misc_feature (1077)..(1077): n is a, c, g, or t

SEQ ID NO: 386092 - DNA, 586 bp, Homo Sapiens; identical to SEQ ID NO: 356808

SEQ ID NO: 386093 - DNA, 1202 bp, Homo Sapiens; identical to SEQ ID NO: 356811
  misc_feature (35)..(35): n is a, c, g, or t
  misc_feature (51)..(51): n is a, c, g, or t
  misc_feature (232)..(509): n is a, c, g, or t
  misc_feature (511)..(540): n is a, c, g, or t
  misc_feature (896)..(931): n is a, c, g, or t
  misc_feature (948)..(1004): n is a, c, g, or t
  misc_feature (1034)..(1034): n is a, c, g, or t
  misc_feature (1078)..(1090): n is a, c, g, or t

SEQ ID NO: 386094 - DNA, 897 bp, Homo Sapiens; identical to SEQ ID NO: 356812
  misc_feature (82)..(147): n is a, c, g, or t
  misc_feature (489)..(592): n is a, c, g, or t
  misc_feature (613)..(674): n is a, c, g, or t
  misc_feature (689)..(746): n is a, c, g, or t
  misc_feature (769)..(780): n is a, c, g, or t

SEQ ID NO: 386095 - DNA, 849 bp, Homo Sapiens; identical to SEQ ID NO: 356815

SEQ ID NO: 386096 - DNA, 1531 bp, Homo Sapiens; identical to SEQ ID NO: 356816
  misc_feature (27)..(27): n is a, c, g, or t
  misc_feature (1309)..(1309): n is a, c, g, or t
  misc_feature (1368)..(1378): n is a, c, g, or t
  misc_feature (1390)..(1390): n is a, c, g, or t
  misc_feature (1398)..(1398): n is a, c, g, or t
  misc_feature (1400)..(1400): n is a, c, g, or t
  misc_feature (1408)..(1408): n is a, c, g, or t
  misc_feature (1410)..(1410): n is a, c, g, or t
  misc_feature (1418)..(1418): n is a, c, g, or t
  misc_feature (1440)..(1440): n is a, c, g, or t
  misc_feature (1491)..(1491): n is a, c, g, or t
  misc_feature (1529)..(1529): n is a, c, g, or t

SEQ ID NO: 386097 - DNA, 501 bp, Homo Sapiens; identical to SEQ ID NO: 356817

SEQ ID NO: 386098 - DNA, 1985 bp, Homo Sapiens; identical to SEQ ID NO: 356818

SEQ ID NO: 386099 - DNA, 434 bp, Homo Sapiens; identical to SEQ ID NO: 356819

SEQ ID NO: 386100 - DNA, 1414 bp, Homo Sapiens; identical to SEQ ID NO: 356821
  misc_feature (181)..(181): n is a, c, g, or t
  misc_feature (310)..(310): n is a, c, g, or t
  misc_feature (340)..(340): n is a, c, g, or t

SEQ ID NO: 386101 - DNA, 1097 bp, Homo Sapiens; identical to SEQ ID NO: 356822
  misc_feature (1007)..(1015): n is a, c, g, or t

SEQ ID NO: 386102 - DNA, 738 bp, Homo Sapiens; identical to SEQ ID NO: 356824

SEQ ID NO: 386103 - DNA, 453 bp, Homo Sapiens; identical to SEQ ID NO: 356825

SEQ ID NO: 386104 - DNA, 1528 bp, Homo Sapiens; identical to SEQ ID NO: 356826
  misc_feature (181)..(181): n is a, c, g, or t
  misc_feature (215)..(215): n is a, c, g, or t
  misc_feature (422)..(422): n is a, c, g, or t
  misc_feature (1160)..(1160): n is a, c, g, or t

SEQ ID NO: 386105 - DNA, 436 bp, Homo Sapiens; identical to SEQ ID NO: 356827

SEQ ID NO: 386106 - DNA, 1499 bp, Homo Sapiens; identical to SEQ ID NO: 356830
  misc_feature (34)..(34): n is a, c, g, or t
  misc_feature (38)..(39): n is a, c, g, or t
  misc_feature (44)..(44): n is a, c, g, or t
  misc_feature (46)..(46): n is a, c, g, or t
  misc_feature (58)..(59): n is a, c, g, or t
  misc_feature (73)..(73): n is a, c, g, or t
  misc_feature (124)..(124): n is a, c, g, or t
  misc_feature (131)..(204): n is a, c, g, or t
  misc_feature (264)..(276): n is a, c, g, or t
  misc_feature (280)..(280): n is a, c, g, or t
  misc_feature (286)..(286): n is a, c, g, or t
  misc_feature (292)..(293): n is a, c, g, or t
  misc_feature (295)..(295): n is a, c, g, or t
  misc_feature (299)..(299): n is a, c, g, or t
  misc_feature (316)..(330): n is a, c, g, or t
  misc_feature (1048)..(1048): n is a, c, g, or t

SEQ ID NO: 386107 - DNA, 406 bp, Homo Sapiens; identical to SEQ ID NO: 356831
  misc_feature (48)..(48): n is a, c, g, or t

SEQ ID NO: 386108 - DNA, 1130 bp, Homo Sapiens; identical to SEQ ID NO: 356841
  misc_feature (136)..(176): n is a, c, g, or t

SEQ ID NO: 386109 - DNA, 1091 bp, Homo Sapiens; identical to SEQ ID NO: 356842
  misc_feature (35)..(35): n is a, c, g, or t
  misc_feature (84)..(84): n is a, c, g, or t
  misc_feature (202)..(240): n is a, c, g, or t
  misc_feature (378)..(387): n is a, c, g, or t
  misc_feature (695)..(695): n is a, c, g, or t
  misc_feature (913)..(913): n is a, c, g, or t

SEQ ID NO: 386110 - DNA, 1088 bp, Homo Sapiens; identical to SEQ ID NO: 356850
  misc_feature (1021)..(1021): n is a, c, g, or t
  misc_feature (1027)..(1027): n is a, c, g, or t
  misc_feature (1031)..(1031): n is a, c, g, or t
  misc_feature (1034)..(1034): n is a, c, g, or t
  misc_feature (1046)..(1046): n is a, c, g, or t

SEQ ID NO: 386111 - DNA, 1574 bp, Homo Sapiens; identical to SEQ ID NO: 356851
  misc_feature (200)..(522): n is a, c, g, or t
  misc_feature (527)..(592): n is a, c, g, or t
  misc_feature (1216)..(1332): n is a, c, g, or t

SEQ ID NO: 386112 - DNA, 723 bp, Homo Sapiens; identical to SEQ ID NO: 356855

SEQ ID NO: 386113 - DNA, 2012 bp, Homo Sapiens; identical to SEQ ID NO: 356856

SEQ ID NO: 386114 - DNA, 1940 bp, Homo Sapiens; identical to SEQ ID NO: 356857
  misc_feature (19)..(20): n is a, c, g, or t
  misc_feature (28)..(28): n is a, c, g, or t
  misc_feature (62)..(62): n is a, c, g, or t
  misc_feature (64)..(65): n is a, c, g, or t
  misc_feature (78)..(78): n is a, c, g, or t
  misc_feature (83)..(84): n is a, c, g, or t
  misc_feature (88)..(90): n is a, c, g, or t
  misc_feature (95)..(95): n is a, c, g, or t
  misc_feature (107)..(107): n is a, c, g, or t
  misc_feature (121)..(121): n is a, c, g, or t
  misc_feature (125)..(126): n is a, c, g, or t
  misc_feature (132)..(132): n is a, c, g, or t
  misc_feature (135)..(135): n is a, c, g, or t
  misc_feature (142)..(142): n is a, c, g, or t
  misc_feature (146)..(146): n is a, c, g, or t
  misc_feature (153)..(153): n is a, c, g, or t
  misc_feature (156)..(179): n is a, c, g, or t
  misc_feature (192)..(192): n is a, c, g, or t
  misc_feature (201)..(201): n is a, c, g, or t
  misc_feature (224)..(224): n is a, c, g, or t
  misc_feature (228)..(228): n is a, c, g, or t
  misc_feature (235)..(235): n is a, c, g, or t
  misc_feature (247)..(247): n is a, c, g, or t
  misc_feature (264)..(264): n is a, c, g, or t
  misc_feature (266)..(266): n is a, c, g, or t
  misc_feature (268)..(268): n is a, c, g, or t
  misc_feature (421)..(421): n is a, c, g, or t
  misc_feature (658)..(658): n is a, c, g, or t

SEQ ID NO: 386115 - DNA, 422 bp, Homo Sapiens; identical to SEQ ID NO: 356858

SEQ ID NO: 386116 - DNA, 933 bp, Homo Sapiens; identical to SEQ ID NO: 356864

SEQ ID NO: 386117 - DNA, 1006 bp, Homo Sapiens; identical to SEQ ID NO: 356865
  misc_feature (41)..(41): n is a, c, g, or t
  misc_feature (171)..(171): n is a, c, g, or t

SEQ ID NO: 386118 - DNA, 902 bp, Homo Sapiens; identical to SEQ ID NO: 356866

SEQ ID NO: 386119 - DNA, 420 bp, Homo Sapiens; identical to SEQ ID NO: 356867
  misc_feature (214)..(214): n is a, c, g, or t

SEQ ID NO: 386120 - DNA, 1170 bp, Homo Sapiens; identical to SEQ ID NO: 356872
  misc_feature (172)..(181): n is a, c, g, or t
  misc_feature (559)..(559): n is a, c, g, or t
  misc_feature (599)..(609): n is a, c, g, or t
  misc_feature (616)..(616): n is a, c, g, or t
  misc_feature (653)..(653): n is a, c, g, or t
  misc_feature (669)..(670): n is a, c, g, or t
  misc_feature (681)..(681): n is a, c, g, or t
  misc_feature (739)..(740): n is a, c, g, or t
  misc_feature (765)..(765): n is a, c, g, or t
  misc_feature (788)..(788): n is a, c, g, or t
  misc_feature (830)..(832): n is a, c, g, or t
  misc_feature (849)..(850): n is a, c, g, or t
  misc_feature (868)..(868): n is a, c, g, or t
  misc_feature (874)..(874): n is a, c, g, or t

SEQ ID NO: 386121 - DNA, 1221 bp, Homo Sapiens; identical to SEQ ID NO: 356873
  misc_feature (130)..(138): n is a, c, g, or t
  misc_feature (183)..(476): n is a, c, g, or t
  misc_feature (1095)..(1103): n is a, c, g, or t

SEQ ID NO: 386122 - DNA, 1081 bp, Homo Sapiens; identical to SEQ ID NO: 356875
  misc_feature (1017)..(1017): n is a, c, g, or t
  misc_feature (1020)..(1020): n is a, c, g, or t
  misc_feature (1037)..(1037): n is a, c, g, or t
  misc_feature (1039)..(1040): n is a, c, g, or t
  misc_feature (1042)..(1042): n is a, c, g, or t
  misc_feature (1050)..(1050): n is a, c, g, or t
  misc_feature (1055)..(1055): n is a, c, g, or t
  misc_feature (1057)..(1058): n is a, c, g, or t
  misc_feature (1061)..(1061): n is a, c, g, or t
  misc_feature (1064)..(1064): n is a, c, g, or t

SEQ ID NO: 386123 - DNA, 1076 bp, Homo Sapiens; identical to SEQ ID NO: 356876

SEQ ID NO: 386124 - DNA, 1096 bp, Homo Sapiens; identical to SEQ ID NO: 356877
  misc_feature (773)..(773): n is a, c, g, or t
  misc_feature (954)..(962): n is a, c, g, or t

SEQ ID NO: 386125 - DNA, 1453 bp, Homo Sapiens; identical to SEQ ID NO: 356878

SEQ ID NO: 386126 - DNA, 1845 bp, Homo Sapiens; identical to SEQ ID NO: 356882

SEQ ID NO: 386127 - DNA, 1200 bp, Homo Sapiens; identical to SEQ ID NO: 356883
  misc_feature (630)..(630): n is a, c, g, or t

SEQ ID NO: 386128 - DNA, 1490 bp, Homo Sapiens; identical to SEQ ID NO: 356887

SEQ ID NO: 386129 - DNA, 1536 bp, Homo Sapiens; identical to SEQ ID NO: 356888

SEQ ID NO: 386130 - DNA, 614 bp, Homo Sapiens; identical to SEQ ID NO: 356889

SEQ ID NO: 386131 - DNA, 378 bp, Homo Sapiens; identical to SEQ ID NO: 356891
  misc_feature (18)..(18): n is a, c, g, or t

SEQ ID NO: 386132 - DNA, 1598 bp, Homo Sapiens; identical to SEQ ID NO: 356892

SEQ ID NO: 386133 - DNA, 847 bp, Homo Sapiens; identical to SEQ ID NO: 356893

SEQ ID NO: 386134 - DNA, 1890 bp, Homo Sapiens; identical to SEQ ID NO: 356899
  misc_feature (37)..(37): n is a, c, g, or t
  misc_feature (60)..(60): n is a, c, g, or t
  misc_feature (78)..(78): n is a, c, g, or t
  misc_feature (87)..(87): n is a, c, g, or t

SEQ ID NO: 386135 - DNA, 582 bp, Homo Sapiens; identical to SEQ ID NO: 356900
  misc_feature (109)..(109): n is a, c, g, or t
  misc_feature (525)..(525): n is a, c, g, or t

SEQ ID NO: 386136 - DNA, 999 bp, Homo Sapiens; identical to SEQ ID NO: 356901
  misc_feature (9)..(9): n is a, c, g, or t
  misc_feature (13)..(13): n is a, c, g, or t
  misc_feature (25)..(25): n is a, c, g, or t
  misc_feature (31)..(31): n is a, c, g, or t
  misc_feature (58)..(58): n is a, c, g, or t
  misc_feature (71)..(71): n is a, c, g, or t
  misc_feature (87)..(87): n is a, c, g, or t
  misc_feature (101)..(101): n is a, c, g, or t
  misc_feature (338)..(338): n is a, c, g, or t
  misc_feature (559)..(559): n is a, c, g, or t

SEQ ID NO: 386137 - DNA, 549 bp, Homo Sapiens; identical to SEQ ID NO: 356902
  misc_feature (21)..(21): n is a, c, g, or t

SEQ ID NO: 386138 - DNA, 985 bp, Homo Sapiens; identical to SEQ ID NO: 356904
  misc_feature (7)..(7): n is a, c, g, or t
  misc_feature (16)..(16): n is a, c, g, or t
  misc_feature (25)..(25): n is a, c, g, or t
  misc_feature (37)..(37): n is a, c, g, or t
  misc_feature (61)..(61): n is a, c, g, or t
  misc_feature (91)..(91): n is a, c, g, or t
  misc_feature (537)..(537): n is a, c, g, or t

SEQ ID NO: 386139 - DNA, 814 bp, Homo Sapiens; identical to SEQ ID NO: 356905

SEQ ID NO: 386140 - DNA, 833 bp, Homo Sapiens; identical to SEQ ID NO: 356915

SEQ ID NO: 386141 - DNA, 1916 bp, Homo Sapiens; identical to SEQ ID NO: 356916

SEQ ID NO: 386142 - DNA, 1440 bp, Homo Sapiens; identical to SEQ ID NO: 356917
  misc_feature (631)..(654): n is a, c, g, or t
  misc_feature (1165)..(1166): n is a, c, g, or t
  misc_feature (1171)..(1171): n is a, c, g, or t
  misc_feature (1240)..(1240): n is a, c, g, or t

SEQ ID NO: 386143 - DNA, 1746 bp, Homo Sapiens; identical to SEQ ID NO: 356918
  misc_feature (93)..(116): n is a, c, g, or t
  misc_feature (957)..(1016): n is a, c, g, or t

SEQ ID NO: 386144 - DNA, 1090 bp, Homo Sapiens; identical to SEQ ID NO: 356919
  misc_feature (874)..(874): n is a, c, g, or t
  misc_feature (878)..(880): n is a, c, g, or t
  misc_feature (886)..(887): n is a, c, g, or t

SEQ ID NO: 386145 - DNA, 671 bp, Homo Sapiens; identical to SEQ ID NO: 356923
  misc_feature (86)..(146): n is a, c, g, or t

SEQ ID NO: 386146 - DNA, 1016 bp, Homo Sapiens; identical to SEQ ID NO: 356924
  misc_feature (503)..(503): n is a, c, g, or t
  misc_feature (803)..(803): n is a, c, g, or t
  misc_feature (832)..(832): n is a, c, g, or t
  misc_feature (842)..(842): n is a, c, g, or t
  misc_feature (845)..(845): n is a, c, g, or t
  misc_feature (849)..(849): n is a, c, g, or t
  misc_feature (853)..(853): n is a, c, g, or t
  misc_feature (865)..(865): n is a, c, g, or t
  misc_feature (869)..(869): n is a, c, g, or t
  misc_feature (875)..(876): n is a, c, g, or t
  misc_feature (879)..(879): n is a, c, g, or t
  misc_feature (883)..(884): n is a, c, g, or t
  misc_feature (897)..(897): n is a, c, g, or t
  misc_feature (900)..(900): n is a, c, g, or t
  misc_feature (902)..(902): n is a, c, g, or t
  misc_feature (914)..(914): n is a, c, g, or t
  misc_feature (930)..(930): n is a, c, g, or t
  misc_feature (934)..(934): n is a, c, g, or t
  misc_feature (937)..(938): n is a, c, g, or t
  misc_feature (942)..(942): n is a, c, g, or t
  misc_feature (945)..(946): n is a, c, g, or t
  misc_feature (954)..(955): n is a, c, g, or t
  misc_feature (961)..(961): n is a, c, g, or t
  misc_feature (973)..(974): n is a, c, g, or t
  misc_feature (976)..(976): n is a, c, g, or t
  misc_feature (986)..(986): n is a, c, g, or t
  misc_feature (989)..(989): n is a, c, g, or t
  misc_feature (991)..(991): n is a, c, g, or t
  misc_feature (996)..(996): n is a, c, g, or t
  misc_feature (999)..(999): n is a, c, g, or t
  misc_feature (1005)..(1005): n is a, c, g, or t
  misc_feature (1012)..(1013): n is a, c, g, or t

SEQ ID NO: 386147 - DNA, 898 bp, Homo Sapiens; identical to SEQ ID NO: 356926

SEQ ID NO: 386148 - DNA, 1588 bp, Homo Sapiens; identical to SEQ ID NO: 356927
  misc_feature (8)..(9): n is a, c, g, or t
  misc_feature (20)..(21): n is a, c, g, or t
  misc_feature (40)..(40): n is a, c, g, or t
  misc_feature (54)..(54): n is a, c, g, or t
  misc_feature (336)..(356): n is a, c, g, or t
  misc_feature (491)..(491): n is a, c, g, or t
  misc_feature (584)..(584): n is a, c, g, or t

SEQ ID NO: 386149 - DNA, 950 bp, Homo Sapiens; identical to SEQ ID NO: 356931
  misc_feature (38)..(38): n is a, c, g, or t

SEQ ID NO: 386150 - DNA, 1615 bp, Homo Sapiens; identical to SEQ ID NO: 356932
  misc_feature (109)..(109): n is a, c, g, or t
  misc_feature (197)..(197): n is a, c, g, or t
  misc_feature (777)..(786): n is a, c, g, or t
  misc_feature (1074)..(1074): n is a, c, g, or t
  misc_feature (1128)..(1128): n is a, c, g, or t
  misc_feature (1132)..(1132): n is a, c, g, or t
  misc_feature (1197)..(1197): n is a, c, g, or t
  misc_feature (1207)..(1207): n is a, c, g, or t
  misc_feature (1234)..(1234): n is a, c, g, or t
  misc_feature (1240)..(1291): n is a, c, g, or t
  misc_feature (1309)..(1309): n is a, c, g, or t
  misc_feature (1395)..(1395): n is a, c, g, or t
  misc_feature (1416)..(1468): n is a, c, g, or t
  misc_feature (1498)..(1542): n is a, c, g, or t
  misc_feature (1559)..(1567): n is a, c, g, or t
  misc_feature (1583)..(1583): n is a, c, g, or t

SEQ ID NO: 386151 - DNA, 692 bp, Homo Sapiens; identical to SEQ ID NO: 356933
  misc_feature (508)..(509): n is a, c, g, or t
  misc_feature (623)..(623): n is a, c, g, or t

SEQ ID NO: 386152 - DNA, 1037 bp, Homo Sapiens; identical to SEQ ID NO: 356934
  misc_feature (944)..(944): n is a, c, g, or t
  misc_feature (951)..(951): n is a, c, g, or t
  misc_feature (965)..(966): n is a, c, g, or t
  misc_feature (969)..(970): n is a, c, g, or t
  misc_feature (990)..(990): n is a, c, g, or t
  misc_feature (994)..(995): n is a, c, g, or t
  misc_feature (998)..(998): n is a, c, g, or t
  misc_feature (1020)..(1020): n is a, c, g, or t

SEQ ID NO: 386153 - DNA, 2720 bp, Homo Sapiens; identical to SEQ ID NO: 356935

SEQ ID NO: 386154 - DNA, 685 bp, Homo Sapiens; identical to SEQ ID NO: 356937

SEQ ID NO: 386155 - DNA, 904 bp, Homo Sapiens; identical to SEQ ID NO: 356938

SEQ ID NO: 386156 - DNA, 575 bp, Homo Sapiens; identical to SEQ ID NO: 356939
  misc_feature (416)..(416): n is a, c, g, or t
  misc_feature (450)..(450): n is a, c, g, or t
  misc_feature (471)..(471): n is a, c, g, or t
  misc_feature (479)..(479): n is a, c, g, or t
  misc_feature (491)..(491): n is a, c, g, or t
  misc_feature (509)..(509): n is a, c, g, or t
  misc_feature (535)..(535): n is a, c, g, or t

SEQ ID NO: 386157 - DNA, 2069 bp, Homo Sapiens; identical to SEQ ID NO: 356941
  misc_feature (1724)..(1724): n is a, c, g, or t
  misc_feature (1922)..(1922): n is a, c, g, or t
  misc_feature (1951)..(1951): n is a, c, g, or t
  misc_feature (1953)..(1953): n is a, c, g, or t
  misc_feature (1975)..(1976): n is a, c, g, or t

SEQ ID NO: 386158 - DNA, 1071 bp, Homo Sapiens; identical to SEQ ID NO: 356942
  misc_feature (507)..(515): n is a, c, g, or t

SEQ ID NO: 386159 - DNA, 1106 bp, Homo Sapiens; identical to SEQ ID NO: 356946
  misc_feature (42)..(42): n is a, c, g, or t
  misc_feature (260)..(260): n is a, c, g, or t
  misc_feature (280)..(280): n is a, c, g, or t

SEQ ID NO: 386160 - DNA, 1206 bp, Homo Sapiens; identical to SEQ ID NO: 356947
  misc_feature (58)..(66): n is a, c, g, or t
  misc_feature (1126)..(1162): n is a, c, g, or t

SEQ ID NO: 386161 - DNA, 3064 bp, Homo Sapiens; identical to SEQ ID NO: 356950
  misc_feature (1796)..(1914): n is a, c, g, or t
  misc_feature (1946)..(1955): n is a, c, g, or t
  misc_feature (2400)..(2400): n is a, c, g, or t
  misc_feature (2958)..(2958): n is a, c, g, or t
  misc_feature (3040)..(3040): n is a, c, g, or t

SEQ ID NO: 386162 - DNA, 512 bp, Homo Sapiens; identical to SEQ ID NO: 356951
  misc_feature (237)..(284): n is a, c, g, or t

SEQ ID NO: 386163 - DNA, 226 bp, Homo Sapiens; identical to SEQ ID NO: 356952

SEQ ID NO: 386164 - DNA, 492 bp, Homo Sapiens; identical to SEQ ID NO: 356953
  misc_feature (217)..(217): n is a, c, g, or t

SEQ ID NO: 386165 - DNA, 317 bp, Homo Sapiens; identical to SEQ ID NO: 356954
  misc_feature (15)..(15): n is a, c, g, or t
  misc_feature (40)..(40): n is a, c, g, or t
  misc_feature (56)..(56): n is a, c, g, or t

SEQ ID NO: 386166 - DNA, 1660 bp, Homo Sapiens; identical to SEQ ID NO: 356956
  misc_feature (1455)..(1455): n is a, c, g, or t
  misc_feature (1481)..(1482): n is a, c, g, or t
  misc_feature (1487)..(1487): n is a, c, g, or t
  misc_feature (1571)..(1571): n is a, c, g, or t
  misc_feature (1592)..(1592): n is a, c, g, or t
  misc_feature (1629)..(1629): n is a, c, g, or t
  misc_feature (1640)..(1640): n is a, c, g, or t

SEQ ID NO: 386167 - DNA, 1469 bp, Homo Sapiens; identical to SEQ ID NO: 356957
  misc_feature (1094)..(1094): n is a, c, g, or t
  misc_feature (1178)..(1178): n is a, c, g, or t

SEQ ID NO: 386168 - DNA, 492 bp, Homo Sapiens; identical to SEQ ID NO: 356958
  misc_feature (26)..(26): n is a, c, g, or t
  misc_feature (386)..(388): n is a, c, g, or t

SEQ ID NO: 386169 - DNA, 1035 bp, Homo Sapiens; identical to SEQ ID NO: 356961
  misc_feature (393)..(441): n is a, c, g, or t
  misc_feature (914)..(914): n is a, c, g, or t
  misc_feature (957)..(957): n is a, c, g, or t
  misc_feature (972)..(972): n is a, c, g, or t
  misc_feature (985)..(985): n is a, c, g, or t
  misc_feature (996)..(996): n is a, c, g, or t
  misc_feature (1007)..(1007): n is a, c, g, or t
  misc_feature (1011)..(1011): n is a, c, g, or t
  misc_feature (1013)..(1013): n is a, c, g, or t
  misc_feature (1017)..(1017): n is a, c, g, or t
  misc_feature (1020)..(1020): n is a, c, g, or t
  misc_feature (1023)..(1024): n is a, c, g, or t

SEQ ID NO: 386170 - DNA, 899 bp, Homo Sapiens; identical to SEQ ID NO: 356962
  misc_feature (248)..(257): n is a, c, g, or t

SEQ ID NO: 386171 - DNA, 1195 bp, Homo Sapiens; identical to SEQ ID NO: 356975
  misc_feature (51)..(51): n is a, c, g, or t
  misc_feature (60)..(60): n is a, c, g, or t
  misc_feature (73)..(74): n is a, c, g, or t
  misc_feature (76)..(76): n is a, c, g, or t
  misc_feature (79)..(79): n is a, c, g, or t
  misc_feature (83)..(83): n is a, c, g, or t
  misc_feature (86)..(87): n is a, c, g, or t
  misc_feature (89)..(90): n is a, c, g, or t
  misc_feature (92)..(92): n is a, c, g, or t
  misc_feature (94)..(94): n is a, c, g, or t
  misc_feature (97)..(97): n is a, c, g, or t
  misc_feature (122)..(156): n is a, c, g, or t
  misc_feature (688)..(688): n is a, c, g, or t
  misc_feature (742)..(742): n is a, c, g, or t
  misc_feature (750)..(750): n is a, c, g, or t
  misc_feature (780)..(780): n is a, c, g, or t
  misc_feature (787)..(787): n is a, c, g, or t
  misc_feature (789)..(789): n is a, c, g, or t
  misc_feature (791)..(792): n is a, c, g, or t
  misc_feature (796)..(797): n is a, c, g, or t
  misc_feature (1048)..(1048): n is a, c, g, or t
  misc_feature (1052)..(1052): n is a, c, g, or t

SEQ ID NO: 386172 - DNA, 555 bp, Homo Sapiens; identical to SEQ ID NO: 356976
  misc_feature (35)..(35): n is a, c, g, or t
  misc_feature (41)..(41): n is a, c, g, or t
  misc_feature (50)..(50): n is a, c, g, or t
  misc_feature (74)..(74): n is a, c, g, or t
  misc_feature (102)..(102): n is a, c, g, or t
  misc_feature (107)..(107): n is a, c, g, or t
  misc_feature (121)..(121): n is a, c, g, or t
  misc_feature (195)..(195): n is a, c, g, or t

SEQ ID NO: 386173 - DNA, 2946 bp, Homo Sapiens; identical to SEQ ID NO: 356977
  misc_feature (1886)..(1896): n is a, c, g, or t
  misc_feature (2818)..(2826): n is a, c, g, or t
  misc_feature (2901)..(2901): n is a, c, g, or t

SEQ ID NO: 386174 - DNA, 140 bp, Homo Sapiens; identical to SEQ ID NO: 356978

SEQ ID NO: 386175 - DNA, 484 bp, Homo Sapiens; identical to SEQ ID NO: 356980

SEQ ID NO: 386176 - DNA, 765 bp, Homo Sapiens; identical to SEQ ID NO: 356981

SEQ ID NO: 386177 - DNA, 892 bp, Homo Sapiens; identical to SEQ ID NO: 356982
  misc_feature (118)..(118): n is a, c, g, or t

SEQ ID NO: 386178 - DNA, 1541 bp, Homo Sapiens; identical to SEQ ID NO: 356985
  misc_feature (281)..(513): n is a, c, g, or t
  misc_feature (1304)..(1344): n is a, c, g, or t

SEQ ID NO: 386179 - DNA, 1464 bp, Homo Sapiens; identical to SEQ ID NO: 356986
  misc_feature (164)..(197): n is a, c, g, or t

SEQ ID NO: 386180 - DNA, 1002 bp, Homo Sapiens; identical to SEQ ID NO: 356990
  misc_feature (3)..(3): n is a, c, g, or t
  misc_feature (12)..(12): n is a, c, g, or t
  misc_feature (15)..(15): n is a, c, g, or t
  misc_feature (29)..(29): n is a, c, g, or t
  misc_feature (32)..(32): n is a, c, g, or t
  misc_feature (38)..(38): n is a, c, g, or t
  misc_feature (42)..(42): n is a, c, g, or t
  misc_feature (50)..(50): n is a, c, g, or t
  misc_feature (53)..(54): n is a, c, g, or t
  misc_feature (64)..(64): n is a, c, g, or t
  misc_feature (74)..(74): n is a, c, g, or t
  misc_feature (76)..(76): n is a, c, g, or t
  misc_feature (86)..(86): n is a, c, g, or t
  misc_feature (88)..(88): n is a, c, g, or t

SEQ ID NO: 386181 - DNA, 1927 bp, Homo Sapiens; identical to SEQ ID NO: 356991

SEQ ID NO: 386182 - DNA, 551 bp, Homo Sapiens; identical to SEQ ID NO: 356992

SEQ ID NO: 386183 - DNA, 1374 bp, Homo Sapiens; identical to SEQ ID NO: 356993
  misc_feature (1161)..(1220): n is a, c, g, or t

SEQ ID NO: 386184 - DNA, 1156 bp, Homo Sapiens; identical to SEQ ID NO: 356994
  misc_feature (933)..(933): n is a, c, g, or t

SEQ ID NO: 386185 - DNA, 911 bp, Homo Sapiens; identical to SEQ ID NO: 356995

SEQ ID NO: 386186 - DNA, 1458 bp, Homo Sapiens; identical to SEQ ID NO: 356996

SEQ ID NO: 386187 - DNA, 1048 bp, Homo Sapiens; identical to SEQ ID NO: 356997

SEQ ID NO: 386188 - DNA, 1207 bp, Homo Sapiens; identical to SEQ ID NO: 357000
  misc_feature (50)..(50): n is a, c, g, or t
  misc_feature (977)..(985): n is a, c, g, or t

SEQ ID NO: 386189 - DNA, 1232 bp, Homo Sapiens; identical to SEQ ID NO: 357001
  misc_feature (742)..(742): n is a, c, g, or t
  misc_feature (880)..(890): n is a, c, g, or t
  misc_feature (970)..(979): n is a, c, g, or t

SEQ ID NO: 386190 - DNA, 2233 bp, Homo Sapiens; identical to SEQ ID NO: 357005

SEQ ID NO: 386191 - DNA, 859 bp, Homo Sapiens; identical to SEQ ID NO: 357006
  misc_feature (57)..(93): n is a, c, g, or t

SEQ ID NO: 386192 - DNA, 1222 bp, Homo Sapiens; identical to SEQ ID NO: 357007
  misc_feature (56)..(88): n is a, c, g, or t
  misc_feature (1184)..(1184): n is a, c, g, or t

SEQ ID NO: 386193 - DNA, 395 bp, Homo Sapiens; identical to SEQ ID NO: 357008
  misc_feature (31)..(31): n is a, c, g, or t
  misc_feature (47)..(47): n is a, c, g, or t
  misc_feature (79)..(79): n is a, c, g, or t

SEQ ID NO: 386194 - DNA, 617 bp, Homo Sapiens; identical to SEQ ID NO: 357011
  misc_feature (41)..(41): n is a, c, g, or t
  misc_feature (47)..(47): n is a, c, g, or t
  misc_feature (75)..(75): n is a, c, g, or t
  misc_feature (156)..(156): n is a, c, g, or t

SEQ ID NO: 386195 - DNA, 178 bp, Homo Sapiens; identical to SEQ ID NO: 357012

SEQ ID NO: 386196 - DNA, 859 bp, Homo Sapiens; identical to SEQ ID NO: 357013

SEQ ID NO: 386197 - DNA, 411 bp, Homo Sapiens; identical to SEQ ID NO: 357014
  misc_feature (41)..(41): n is a, c, g, or t
  misc_feature (232)..(233): n is a, c, g, or t

SEQ ID NO: 386198 - DNA, 1046 bp, Homo Sapiens; identical to SEQ ID NO: 357015
  misc_feature (8)..(9): n is a, c, g, or t
  misc_feature (18)..(18): n is a, c, g, or t
  misc_feature (22)..(22): n is a, c, g, or t
  misc_feature (24)..(24): n is a, c, g, or t
  misc_feature (48)..(49): n is a, c, g, or t
  misc_feature (60)..(60): n is a, c, g, or t
  misc_feature (62)..(62): n is a, c, g, or t
  misc_feature (100)..(100): n is a, c, g, or t
  misc_feature (104)..(104): n is a, c, g, or t
  misc_feature (149)..(149): n is a, c, g, or t
  misc_feature (898)..(898): n is a, c, g, or t

SEQ ID NO: 386199 - DNA, 1739 bp, Homo Sapiens; identical to SEQ ID NO: 357016
  misc_feature (7)..(7): n is a, c, g, or t
  misc_feature (14)..(14): n is a, c, g, or t
  misc_feature (19)..(20): n is a, c, g, or t
  misc_feature (26)..(28): n is a, c, g, or t
  misc_feature (37)..(37): n is a, c, g, or t
  misc_feature (45)..(45): n is a, c, g, or t
  misc_feature (54)..(54): n is a, c, g, or t
  misc_feature (57)..(57): n is a, c, g, or t
  misc_feature (59)..(59): n is a, c, g, or t
  misc_feature (62)..(62): n is a, c, g, or t
  misc_feature (93)..(93): n is a, c, g, or t
  misc_feature (108)..(108): n is a, c, g, or t
  misc_feature (118)..(118): n is a, c, g, or t
  misc_feature (120)..(120): n is a, c, g, or t
  misc_feature (124)..(125): n is a, c, g, or t
  misc_feature (200)..(200): n is a, c, g, or t
  misc_feature (206)..(207): n is a, c, g, or t
  misc_feature (237)..(247): n is a, c, g, or t
  misc_feature (286)..(286): n is a, c, g, or t
  misc_feature (319)..(319): n is a, c, g, or t
  misc_feature (328)..(328): n is a, c, g, or t
  misc_feature (349)..(349): n is a, c, g, or t
  misc_feature (353)..(354): n is a, c, g, or t
  misc_feature (361)..(378): n is a, c, g, or t
  misc_feature (381)..(381): n is a, c, g, or t
  misc_feature (387)..(388): n is a, c, g, or t
  misc_feature (392)..(392): n is a, c, g, or t
  misc_feature (400)..(400): n is a, c, g, or t
  misc_feature (414)..(414): n is a, c, g, or t
  misc_feature (425)..(425): n is a, c, g, or t
  misc_feature (454)..(454): n is a, c, g, or t
  misc_feature (474)..(474): n is a, c, g, or t
  misc_feature (511)..(511): n is a, c, g, or t
  misc_feature (563)..(563): n is a, c, g, or t

SEQ ID NO: 386200 - DNA, 1481 bp, Homo Sapiens; identical to SEQ ID NO: 357017

SEQ ID NO: 386201 - DNA, 897 bp, Homo Sapiens; identical to SEQ ID NO: 357029
  misc_feature (46)..(82): n is a, c, g, or t

SEQ ID NO: 386202 - DNA, 2020 bp, Homo Sapiens; identical to SEQ ID NO: 357030

SEQ ID NO: 386203 - DNA, 834 bp, Homo Sapiens; identical to SEQ ID NO: 357037
  misc_feature (159)..(211): n is a, c, g, or t
  misc_feature (787)..(787): n is a, c, g, or t

SEQ ID NO: 386204 - DNA, 1005 bp, Homo Sapiens; identical to SEQ ID NO: 357038
  misc_feature (3)..(3): n is a, c, g, or t
  misc_feature (18)..(18): n is a, c, g, or t
  misc_feature (22)..(22): n is a, c, g, or t
  misc_feature (28)..(28): n is a, c, g, or t
  misc_feature (31)..(31): n is a, c, g, or t
  misc_feature (35)..(35): n is a, c, g, or t
  misc_feature (42)..(42): n is a, c, g, or t
  misc_feature (53)..(53): n is a, c, g, or t
  misc_feature (61)..(62): n is a, c, g, or t
  misc_feature (65)..(65): n is a, c, g, or t
  misc_feature (69)..(70): n is a, c, g, or t
  misc_feature (76)..(76): n is a, c, g, or t
  misc_feature (83)..(84): n is a, c, g, or t
  misc_feature (88)..(88): n is a, c, g, or t
  misc_feature (90)..(90): n is a, c, g, or t
  misc_feature (99)..(101): n is a, c, g, or t
  misc_feature (109)..(109): n is a, c, g, or t
  misc_feature (115)..(115): n is a, c, g, or t
  misc_feature (118)..(118): n is a, c, g, or t
  misc_feature (130)..(130): n is a, c, g, or t
  misc_feature (138)..(138): n is a, c, g, or t
  misc_feature (140)..(140): n is a, c, g, or t
  misc_feature (157)..(157): n is a, c, g, or t
  misc_feature (179)..(179): n is a, c, g, or t
  misc_feature (189)..(189): n is a, c, g, or t
  misc_feature (200)..(200): n is a, c, g, or t

SEQ ID NO: 386205 - DNA, 497 bp, Homo Sapiens; identical to SEQ ID NO: 357039
  misc_feature (158)..(362): n is a, c, g, or t

SEQ ID NO: 386206 - DNA, 1994 bp, Homo Sapiens; identical to SEQ ID NO: 357040
  misc_feature (1518)..(1615): n is a, c, g, or t

SEQ ID NO: 386207 - DNA, 541 bp, Homo Sapiens; identical to SEQ ID NO: 357041
  misc_feature (319)..(319): n is a, c, g, or t
  misc_feature (449)..(449): n is a, c, g, or t

SEQ ID NO: 386208 - DNA, 1025 bp, Homo Sapiens; identical to SEQ ID NO: 357045
  misc_feature (854)..(854): n is a, c, g, or t
  misc_feature (866)..(866): n is a, c, g, or t
  misc_feature (868)..(868): n is a, c, g, or t
  misc_feature (873)..(873): n is a, c, g, or t
  misc_feature (882)..(882): n is a, c, g, or t
  misc_feature (913)..(913): n is a, c, g, or t
  misc_feature (917)..(917): n is a, c, g, or t
  misc_feature (926)..(926): n is a, c, g, or t
  misc_feature (931)..(931): n is a, c, g, or t
  misc_feature (934)..(934): n is a, c, g, or t
  misc_feature (948)..(948): n is a, c, g, or t
  misc_feature (956)..(956): n is a, c, g, or t
  misc_feature (966)..(966): n is a, c, g, or t
  misc_feature (973)..(973): n is a, c, g, or t
  misc_feature (981)..(981): n is a, c, g, or t
  misc_feature (984)..(984): n is a, c, g, or t
  misc_feature (1010)..(1010): n is a, c, g, or t

SEQ ID NO: 386209 - DNA, 1492 bp, Homo Sapiens; identical to SEQ ID NO: 357046

SEQ ID NO: 386210 - DNA, 1901 bp, Homo Sapiens; identical to SEQ ID NO: 357054
  misc_feature (1266)..(1310): n is a, c, g, or t
  misc_feature (1553)..(1565): n is a, c, g, or t
  misc_feature (1649)..(1711): n is a, c, g, or t
  misc_feature (1790)..(1790): n is a, c, g, or t
  misc_feature (1886)..(1886): n is a, c, g, or t

SEQ ID NO: 386211 - DNA, 1577 bp, Homo Sapiens; identical to SEQ ID NO: 357055

SEQ ID NO: 386212 - DNA, 1573 bp, Homo Sapiens; identical to SEQ ID NO: 357058
  misc_feature (706)..(724): n is a, c, g, or t

SEQ ID NO: 386213 - DNA, 451 bp, Homo Sapiens; identical to SEQ ID NO: 357059
  misc_feature (11)..(11): n is a, c, g, or t
  misc_feature (32)..(32): n is a, c, g, or t
  misc_feature (43)..(43): n is a, c, g, or t
  misc_feature (52)..(52): n is a, c, g, or t

SEQ ID NO: 386214 - DNA, 1144 bp, Homo Sapiens; identical to SEQ ID NO: 357062
  misc_feature (25)..(25): n is a, c, g, or t
  misc_feature (968)..(968): n is a, c, g, or t
  misc_feature (978)..(978): n is a, c, g, or t
  misc_feature (981)..(982): n is a, c, g, or t
  misc_feature (984)..(984): n is a, c, g, or t

SEQ ID NO: 386215 - DNA, 2934 bp, Homo Sapiens; identical to SEQ ID NO: 357063

SEQ ID NO: 386216 - DNA, 2062 bp, Homo Sapiens; identical to SEQ ID NO: 357066
  misc_feature (1883)..(1916): n is a, c, g, or t
  misc_feature (1958)..(1958): n is a, c, g, or t

SEQ ID NO: 386217 - DNA, 362 bp, Homo Sapiens; identical to SEQ ID NO: 357067
  misc_feature (183)..(231): n is a, c, g, or t

SEQ ID NO: 386218 - DNA, 1702 bp, Homo Sapiens; identical to SEQ ID NO: 357068

SEQ ID NO: 386219 - DNA, 557 bp, Homo Sapiens; identical to SEQ ID NO: 357076
  misc_feature (147)..(180): n is a, c, g, or t

SEQ ID NO: 386220 - DNA, 400 bp, Homo Sapiens; identical to SEQ ID NO: 357077

SEQ ID NO: 386221 - DNA, 921 bp, Homo Sapiens; identical to SEQ ID NO: 357083

SEQ ID NO: 386222 - DNA, 1121 bp, Homo Sapiens; identical to SEQ ID NO: 357084
  misc_feature (886)..(905): n is a, c, g, or t

SEQ ID NO: 386223 - DNA, 1137 bp, Homo Sapiens; identical to SEQ ID NO: 357093
  misc_feature (16)..(16): n is a, c, g, or t
  misc_feature (904)..(952): n is a, c, g, or t
  misc_feature (1027)..(1082): n is a, c, g, or t

SEQ ID NO: 386224 - DNA, 768 bp, Homo Sapiens; identical to SEQ ID NO: 357094
  misc_feature (94)..(94): n is a, c, g, or t
  misc_feature (664)..(684): n is a, c, g, or t

SEQ ID NO: 386225 - DNA, 467 bp, Homo Sapiens; identical to SEQ ID NO: 357095

SEQ ID NO: 386226 - DNA, 1813 bp, Homo Sapiens; identical to SEQ ID NO: 357099
  misc_feature (5)..(5): n is a, c, g, or t
  misc_feature (37)..(38): n is a, c, g, or t
  misc_feature (42)..(42): n is a, c, g, or t
  misc_feature (48)..(48): n is a, c, g, or t
  misc_feature (51)..(51): n is a, c, g, or t
  misc_feature (70)..(70): n is a, c, g, or t
  misc_feature (74)..(74): n is a, c, g, or t
  misc_feature (82)..(82): n is a, c, g, or t
  misc_feature (85)..(111): n is a, c, g, or t
  misc_feature (113)..(187): n is a, c, g, or t
  misc_feature (550)..(550): n is a, c, g, or t

SEQ ID NO: 386227 - DNA, 889 bp, Homo Sapiens; identical to SEQ ID NO: 357100

SEQ ID NO: 386228 - DNA, 1697 bp, Homo Sapiens; identical to SEQ ID NO: 357103
  misc_feature (564)..(564): n is a, c, g, or t
  misc_feature (577)..(639): n is a, c, g, or t
  misc_feature (732)..(732): n is a, c, g, or t
  misc_feature (1424)..(1424): n is a, c, g, or t
  misc_feature (1521)..(1521): n is a, c, g, or t
  misc_feature (1564)..(1564): n is a, c, g, or t
  misc_feature (1657)..(1657): n is a, c, g, or t
  misc_feature (1677)..(1677): n is a, c, g, or t

SEQ ID NO: 386229 - DNA, 1396 bp, Homo Sapiens; identical to SEQ ID NO: 357104
  misc_feature (40)..(40): n is a, c, g, or t
  misc_feature (1347)..(1348): n is a, c, g, or t
  misc_feature (1351)..(1351): n is a, c, g, or t

SEQ ID NO: 386230 - DNA, 902 bp, Homo Sapiens; identical to SEQ ID NO: 357105

SEQ ID NO: 386231 - DNA, 953 bp, Homo Sapiens; identical to SEQ ID NO: 357106

SEQ ID NO: 386232 - DNA, 1060 bp, Homo Sapiens; identical to SEQ ID NO: 357107

SEQ ID NO: 386233 - DNA, 1076 bp, Homo Sapiens; identical to SEQ ID NO: 357108
  misc_feature (750)..(750): n is a, c, g, or t
  misc_feature (969)..(969): n is a, c, g, or t

SEQ ID NO: 386234 - DNA, 1876 bp, Homo Sapiens; identical to SEQ ID NO: 357109
  misc_feature (3)..(3): n is a, c, g, or t
  misc_feature (21)..(21): n is a, c, g, or t
  misc_feature (24)..(24): n is a, c, g, or t
  misc_feature (37)..(37): n is a, c, g, or t
  misc_feature (47)..(47): n is a, c, g, or t
  misc_feature (74)..(74): n is a, c, g, or t
  misc_feature (97)..(97): n is a, c, g, or t
  misc_feature (133)..(150): n is a, c, g, or t
  misc_feature (154)..(154): n is a, c, g, or t
  misc_feature (159)..(159): n is a, c, g, or t
  misc_feature (203)..(203): n is a, c, g, or t
  misc_feature (217)..(217): n is a, c, g, or t
  misc_feature (250)..(250): n is a, c, g, or t
  misc_feature (312)..(312): n is a, c, g, or t
  misc_feature (443)..(443): n is a, c, g, or t
  misc_feature (692)..(692): n is a, c, g, or t

SEQ ID NO: 386235 - DNA, 1095 bp, Homo Sapiens; identical to SEQ ID NO: 357110

SEQ ID NO: 386236 - DNA, 1753 bp, Homo Sapiens; identical to SEQ ID NO: 357111
  misc_feature (42)..(67): n is a, c, g, or t

SEQ ID NO: 386237 - DNA, 1073 bp, Homo Sapiens; identical to SEQ ID NO: 357112

SEQ ID NO: 386238 - DNA, 1085 bp, Homo Sapiens; identical to SEQ ID NO: 357114
  misc_feature (967)..(967): n is a, c, g, or t
  misc_feature (992)..(993): n is a, c, g, or t
  misc_feature (1006)..(1006): n is a, c, g, or t
  misc_feature (1024)..(1024): n is a, c, g, or t
  misc_feature (1026)..(1026): n is a, c, g, or t
  misc_feature (1030)..(1030): n is a, c, g, or t
  misc_feature (1037)..(1037): n is a, c, g, or t
  misc_feature (1043)..(1043): n is a, c, g, or t
  misc_feature (1050)..(1051): n is a, c, g, or t
  misc_feature (1054)..(1054): n is a, c, g, or t
  misc_feature (1060)..(1060): n is a, c, g, or t
  misc_feature (1066)..(1066): n is a, c, g, or t
  misc_feature (1069)..(1069): n is a, c, g, or t

SEQ ID NO: 386239 - DNA, 1003 bp, Homo Sapiens; identical to SEQ ID NO: 357115
  misc_feature (801)..(801): n is a, c, g, or t
  misc_feature (847)..(847): n is a, c, g, or t

SEQ ID NO: 386240 - DNA, 1088 bp, Homo Sapiens; identical to SEQ ID NO: 357118
  misc_feature (760)..(821): n is a, c, g, or t
  misc_feature (847)..(847): n is a, c, g, or t
  misc_feature (851)..(851): n is a, c, g, or t
  misc_feature (858)..(858): n is a, c, g, or t
  misc_feature (885)..(885): n is a, c, g, or t
  misc_feature (914)..(914): n is a, c, g, or t
  misc_feature (944)..(944): n is a, c, g, or t
  misc_feature (965)..(965): n is a, c, g, or t
  misc_feature (968)..(968): n is a, c, g, or t
  misc_feature (972)..(972): n is a, c, g, or t
  misc_feature (981)..(981): n is a, c, g, or t
  misc_feature (987)..(987): n is a, c, g, or t
  misc_feature (993)..(993): n is a, c, g, or t
  misc_feature (996)..(996): n is a, c, g, or t
  misc_feature (1000)..(1000): n is a, c, g, or t
  misc_feature (1014)..(1014): n is a, c, g, or t
  misc_feature (1016)..(1016): n is a, c, g, or t
  misc_feature (1018)..(1018): n is a, c, g, or t
  misc_feature (1029)..(1029): n is a, c, g, or t
  misc_feature (1037)..(1037): n is a, c, g, or t
  misc_feature (1040)..(1040): n is a, c, g, or t
  misc_feature (1052)..(1056): n is a, c, g, or t
  misc_feature (1070)..(1070): n is a, c, g, or t
  misc_feature (1074)..(1074): n is a, c, g, or t
  misc_feature (1076)..(1076): n is a, c, g, or t
  misc_feature (1080)..(1080): n is a, c, g, or t
  misc_feature (1086)..(1086): n is a, c, g, or t

SEQ ID NO: 386241 - DNA, 1192 bp, Homo Sapiens; identical to SEQ ID NO: 357119
  misc_feature (139)..(187): n is a, c, g, or t
  misc_feature (677)..(677): n is a, c, g, or t
  misc_feature (688)..(726): n is a, c, g, or t
  misc_feature (747)..(747): n is a, c, g, or t
  misc_feature (809)..(809): n is a, c, g, or t
  misc_feature (822)..(822): n is a, c, g, or t
  misc_feature (826)..(826): n is a, c, g, or t
  misc_feature (831)..(831): n is a, c, g, or t

SEQ ID NO: 386242 - DNA, 871 bp, Homo Sapiens; identical to SEQ ID NO: 357120

SEQ ID NO: 386243 - DNA, 1736 bp, Homo Sapiens; identical to SEQ ID NO: 357124

SEQ ID NO: 386244 - DNA, 582 bp, Homo Sapiens; identical to SEQ ID NO: 357125
  misc_feature (30)..(30): n is a, c, g, or t
  misc_feature (492)..(492): n is a, c, g, or t
  misc_feature (547)..(547): n is a, c, g, or t

SEQ ID NO: 386245 - DNA, 1151 bp, Homo Sapiens; identical to SEQ ID NO: 357130
  misc_feature (6)..(7): n is a, c, g, or t
  misc_feature (18)..(18): n is a, c, g, or t
  misc_feature (23)..(24): n is a, c, g, or t
  misc_feature (31)..(31): n is a, c, g, or t
  misc_feature (44)..(44): n is a, c, g, or t
  misc_feature (46)..(46): n is a, c, g, or t
  misc_feature (50)..(50): n is a, c, g, or t
  misc_feature (53)..(53): n is a, c, g, or t
  misc_feature (65)..(65): n is a, c, g, or t
  misc_feature (67)..(67): n is a, c, g, or t
  misc_feature (75)..(75): n is a, c, g, or t
  misc_feature (79)..(79): n is a, c, g, or t
  misc_feature (97)..(98): n is a, c, g, or t
  misc_feature (101)..(101): n is a, c, g, or t
  misc_feature (104)..(104): n is a, c, g, or t
  misc_feature (115)..(116): n is a, c, g, or t
  misc_feature (125)..(125): n is a, c, g, or t
  misc_feature (129)..(129): n is a, c, g, or t
  misc_feature (132)..(132): n is a, c, g, or t
  misc_feature (137)..(138): n is a, c, g, or t
  misc_feature (152)..(152): n is a, c, g, or t
  misc_feature (183)..(183): n is a, c, g, or t
  misc_feature (208)..(234): n is a, c, g, or t

SEQ ID NO: 386246 - DNA, 1705 bp, Homo Sapiens; identical to SEQ ID NO: 357131
  misc_feature (984)..(1042): n is a, c, g, or t
  misc_feature (1254)..(1280): n is a, c, g, or t
  misc_feature (1524)..(1524): n is a, c, g, or t
  misc_feature (1614)..(1614): n is a, c, g, or t

SEQ ID NO: 386247 - DNA, 1405 bp, Homo Sapiens; identical to SEQ ID NO: 357134
  misc_feature (1376)..(1376): n is a, c, g, or t

SEQ ID NO: 386248 - DNA, 1094 bp, Homo Sapiens; identical to SEQ ID NO: 357135
  misc_feature (878)..(878): n is a, c, g, or t
  misc_feature (1023)..(1023): n is a, c, g, or t

SEQ ID NO: 386249 - DNA, 744 bp, Homo Sapiens; identical to SEQ ID NO: 357139

SEQ ID NO: 386250 - DNA, 465 bp, Homo Sapiens; identical to SEQ ID NO: 357140

SEQ ID NO: 386251 - DNA, 1739 bp, Homo Sapiens; identical to SEQ ID NO: 357144
  misc_feature (113)..(113): n is a, c, g, or t

SEQ ID NO: 386252 - DNA, 1237 bp, Homo Sapiens; identical to SEQ ID NO: 357145
  misc_feature (9)..(9): n is a, c, g, or t
  misc_feature (59)..(59): n is a, c, g, or t
  misc_feature (85)..(86): n is a, c, g, or t
  misc_feature (113)..(113): n is a, c, g, or t
  misc_feature (140)..(140): n is a, c, g, or t
  misc_feature (156)..(156): n is a, c, g, or t
  misc_feature (158)..(158): n is a, c, g, or t
  misc_feature (185)..(185): n is a, c, g, or t
  misc_feature (212)..(212): n is a, c, g, or t
  misc_feature (216)..(218): n is a, c, g, or t
  misc_feature (222)..(222): n is a, c, g, or t
  misc_feature (248)..(248): n is a, c, g, or t
  misc_feature (252)..(252): n is a, c, g, or t
  misc_feature (333)..(334): n is a, c, g, or t
  misc_feature (345)..(345): n is a, c, g, or t
  misc_feature (351)..(351): n is a, c, g, or t
  misc_feature (362)..(362): n is a, c, g, or t
  misc_feature (383)..(383): n is a, c, g, or t
  misc_feature (391)..(392): n is a, c, g, or t
  misc_feature (398)..(398): n is a, c, g, or t
  misc_feature (411)..(412): n is a, c, g, or t
  misc_feature (414)..(414): n is a, c, g, or t
  misc_feature (480)..(480): n is a, c, g, or t
  misc_feature (547)..(547): n is a, c, g, or t

SEQ ID NO: 386253 - DNA, 248 bp, Homo Sapiens; identical to SEQ ID NO: 357146

SEQ ID NO: 386254 - DNA, 1275 bp, Homo Sapiens; identical to SEQ ID NO: 357155
  misc_feature (30)..(30): n is a, c, g, or t
  misc_feature (61)..(61): n is a, c, g, or t
  misc_feature (91)..(91): n is a, c, g, or t
  misc_feature (162)..(162): n is a, c, g, or t
  misc_feature (166)..(166): n is a, c, g, or t
  misc_feature (196)..(196): n is a, c, g, or t
  misc_feature (243)..(243): n is a, c, g, or t
  misc_feature (272)..(272): n is a, c, g, or t
  misc_feature (282)..(282): n is a, c, g, or t
  misc_feature (339)..(379): n is a, c, g, or t
  misc_feature (1252)..(1252): n is a, c, g, or t

SEQ ID NO: 386255 - DNA, 951 bp, Homo Sapiens; identical to SEQ ID NO: 357156
  misc_feature (601)..(601): n is a, c, g, or t

SEQ ID NO: 386256 - DNA, 1012 bp, Homo Sapiens; identical to SEQ ID NO: 357163
  misc_feature (916)..(916): n is a, c, g, or t
  misc_feature (923)..(923): n is a, c, g, or t
  misc_feature (934)..(934): n is a, c, g, or t
  misc_feature (945)..(945): n is a, c, g, or t
  misc_feature (965)..(965): n is a, c, g, or t
  misc_feature (970)..(970): n is a, c, g, or t
  misc_feature (977)..(977): n is a, c, g, or t
  misc_feature (984)..(984): n is a, c, g, or t
  misc_feature (990)..(990): n is a, c, g, or t
  misc_feature (999)..(999): n is a, c, g, or t
  misc_feature (1010)..(1010): n is a, c, g, or t

SEQ ID NO: 386257 - DNA, 797 bp, Homo Sapiens; identical to SEQ ID NO: 357164

SEQ ID NO: 386258 - DNA, 1336 bp, Homo Sapiens; identical to SEQ ID NO: 357170
  misc_feature (47)..(55): n is a, c, g, or t
  misc_feature (132)..(132): n is a, c, g, or t
  misc_feature (934)..(986): n is a, c, g, or t
  misc_feature (1091)..(1121): n is a, c, g, or t
  misc_feature (1127)..(1229): n is a, c, g, or t
  misc_feature (1250)..(1264): n is a, c, g, or t

SEQ ID NO: 386259 - DNA, 927 bp, Homo Sapiens; identical to SEQ ID NO: 357171

SEQ ID NO: 386260 - DNA, 888 bp, Homo Sapiens; identical to SEQ ID NO: 357176
  misc_feature (12)..(12): n is a, c, g, or t

SEQ ID NO: 386261 - DNA, 1001 bp, Homo Sapiens; identical to SEQ ID NO: 357177
  misc_feature (6)..(6): n is a, c, g, or t
  misc_feature (35)..(35): n is a, c, g, or t
  misc_feature (53)..(53): n is a, c, g, or t
  misc_feature (70)..(70): n is a, c, g, or t

SEQ ID NO: 386262 - DNA, 665 bp, Homo Sapiens; identical to SEQ ID NO: 357178
  misc_feature (221)..(247): n is a, c, g, or t
  misc_feature (533)..(533): n is a, c, g, or t

SEQ ID NO: 386263 - DNA, 1361 bp, Homo Sapiens; identical to SEQ ID NO: 357182

SEQ ID NO: 386264 - DNA, 1136 bp, Homo Sapiens; identical to SEQ ID NO: 357183
  misc_feature (788)..(800): n is a, c, g, or t
  misc_feature (858)..(858): n is a, c, g, or t
  misc_feature (862)..(862): n is a, c, g, or t
  misc_feature (864)..(867): n is a, c, g, or t
  misc_feature (869)..(869): n is a, c, g, or t
  misc_feature (873)..(874): n is a, c, g, or t
  misc_feature (876)..(877): n is a, c, g, or t
  misc_feature (879)..(889): n is a, c, g, or t
  misc_feature (993)..(1046): n is a, c, g, or t

SEQ ID NO: 386265 - DNA, 1573 bp, Homo Sapiens; identical to SEQ ID NO: 357189
  misc_feature (752)..(752): n is a, c, g, or t
  misc_feature (797)..(797): n is a, c, g, or t
  misc_feature (958)..(958): n is a, c, g, or t
  misc_feature (979)..(979): n is a, c, g, or t
  misc_feature (991)..(991): n is a, c, g, or t
  misc_feature (1115)..(1115): n is a, c, g, or t
  misc_feature (1186)..(1186): n is a, c, g, or t
  misc_feature (1215)..(1215): n is a, c, g, or t

SEQ ID NO: 386266 - DNA, 1693 bp, Homo Sapiens; identical to SEQ ID NO: 357190

SEQ ID NO: 386267 - DNA, 1559 bp, Homo Sapiens; identical to SEQ ID NO: 357192
  misc_feature (800)..(823): n is a, c, g, or t
  misc_feature (1382)..(1399): n is a, c, g, or t

SEQ ID NO: 386268 - DNA, 294 bp, Homo Sapiens; identical to SEQ ID NO: 357193

SEQ ID NO: 386269 - DNA, 1129 bp, Homo Sapiens; identical to SEQ ID NO: 357196

SEQ ID NO: 386270 - DNA, 862 bp, Homo Sapiens; identical to SEQ ID NO: 357197

SEQ ID NO: 386271 - DNA, 753 bp, Homo Sapiens; identical to SEQ ID NO: 357199
  misc_feature (627)..(655): n is a, c, g, or t

SEQ ID NO: 386272 - DNA, 410 bp, Homo Sapiens; identical to SEQ ID NO: 357200
  misc_feature (267)..(295): n is a, c, g, or t

SEQ ID NO: 386273 - DNA, 1132 bp, Homo Sapiens; identical to SEQ ID NO: 357201
  misc_feature (459)..(512): n is a, c, g, or t
  misc_feature (1049)..(1061): n is a, c, g, or t

SEQ ID NO: 386274 - DNA, 2343 bp, Homo Sapiens; identical to SEQ ID NO: 357202

SEQ ID NO: 386275 - DNA, 626 bp, Homo Sapiens; identical to SEQ ID NO: 357203

SEQ ID NO: 386276 - DNA, 1675 bp, Homo Sapiens; identical to SEQ ID NO: 357204
  misc_feature (1303)..(1353): n is a, c, g, or t

SEQ ID NO: 386277 - DNA, 584 bp, Homo Sapiens; identical to SEQ ID NO: 357205

SEQ ID NO: 386278 - DNA, 1696 bp, Homo Sapiens; identical to SEQ ID NO: 357207
  misc_feature (189)..(278): n is a, c, g, or t
  misc_feature (533)..(550): n is a, c, g, or t
  misc_feature (1083)..(1083): n is a, c, g, or t
  misc_feature (1577)..(1577): n is a, c, g, or t
  misc_feature (1684)..(1684): n is a, c, g, or t

SEQ ID NO: 386279 - DNA, 769 bp, Homo Sapiens; identical to SEQ ID NO: 357208

SEQ ID NO: 386280 - DNA, 1647 bp, Homo Sapiens; identical to SEQ ID NO: 357209
  misc_feature (1214)..(1267): n is a, c, g, or t
  misc_feature (1433)..(1487): n is a, c, g, or t

SEQ ID NO: 386281 - DNA, 467 bp, Homo Sapiens; identical to SEQ ID NO: 357222

SEQ ID NO: 386282 - DNA, 2116 bp, Homo Sapiens; identical to SEQ ID NO: 357223
  misc_feature (18)..(18): n is a, c, g, or t
  misc_feature (23)..(23): n is a, c, g, or t
  misc_feature (1591)..(1591): n is a, c, g, or t

SEQ ID NO: 386283 - DNA, 1226 bp, Homo Sapiens; identical to SEQ ID NO: 357224

SEQ ID NO: 386284 - DNA, 521 bp, Homo Sapiens; identical to SEQ ID NO: 357228

SEQ ID NO: 386285 - DNA, 964 bp, Homo Sapiens; identical to SEQ ID NO: 357229

SEQ ID NO: 386286 - DNA, 1091 bp, Homo Sapiens; identical to SEQ ID NO: 357230
  misc_feature (679)..(716): n is a, c, g, or t

SEQ ID NO: 386287 - DNA, 2684 bp, Homo Sapiens; identical to SEQ ID NO: 357233
  misc_feature (57)..(87): n is a, c, g, or t
  misc_feature (161)..(263): n is a, c, g, or t
  misc_feature (2661)..(2661): n is a, c, g, or t
  misc_feature (2666)..(2666): n is a, c, g, or t

SEQ ID NO: 386288 - DNA, 1113 bp, Homo Sapiens; identical to SEQ ID NO: 357234
  misc_feature (675)..(778): n is a, c, g, or t

SEQ ID NO: 386289 - DNA, 1191 bp, Homo Sapiens; identical to SEQ ID NO: 357238
  misc_feature (5)..(6): n is a, c, g, or t
  misc_feature (22)..(22): n is a, c, g, or t
  misc_feature (25)..(25): n is a, c, g, or t
  misc_feature (27)..(27): n is a, c, g, or t
  misc_feature (29)..(29): n is a, c, g, or t
  misc_feature (33)..(34): n is a, c, g, or t
  misc_feature (40)..(40): n is a, c, g, or t
  misc_feature (44)..(44): n is a, c, g, or t
  misc_feature (47)..(47): n is a, c, g, or t
  misc_feature (50)..(50): n is a, c, g, or t
  misc_feature (76)..(76): n is a, c, g, or t
  misc_feature (82)..(83): n is a, c, g, or t
  misc_feature (96)..(96): n is a, c, g, or t
  misc_feature (109)..(109): n is a, c, g, or t
  misc_feature (145)..(145): n is a, c, g, or t
  misc_feature (150)..(151): n is a, c, g, or t
  misc_feature (191)..(191): n is a, c, g, or t
  misc_feature (199)..(200): n is a, c, g, or t
  misc_feature (202)..(202): n is a, c, g, or t
  misc_feature (205)..(206): n is a, c, g, or t
  misc_feature (236)..(236): n is a, c, g, or t
  misc_feature (242)..(242): n is a, c, g, or t
  misc_feature (258)..(258): n is a, c, g, or t
  misc_feature (264)..(264): n is a, c, g, or t
  misc_feature (273)..(273): n is a, c, g, or t
  misc_feature (280)..(280): n is a, c, g, or t
  misc_feature (284)..(284): n is a, c, g, or t
  misc_feature (288)..(289): n is a, c, g, or t
  misc_feature (295)..(297): n is a, c, g, or t
  misc_feature (301)..(301): n is a, c, g, or t
  misc_feature (307)..(307): n is a, c, g, or t
  misc_feature (314)..(314): n is a, c, g, or t
  misc_feature (321)..(321): n is a, c, g, or t
  misc_feature (323)..(323): n is a, c, g, or t
  misc_feature (333)..(333): n is a, c, g, or t
  misc_feature (360)..(360): n is a, c, g, or t
  misc_feature (363)..(363): n is a, c, g, or t
  misc_feature (381)..(381): n is a, c, g, or t
  misc_feature (389)..(389): n is a, c, g, or t
  misc_feature (409)..(409): n is a, c, g, or t
  misc_feature (411)..(411): n is a, c, g, or t
  misc_feature (421)..(421): n is a, c, g, or t
  misc_feature (431)..(431): n is a, c, g, or t
  misc_feature (443)..(443): n is a, c, g, or t
  misc_feature (509)..(509): n is a, c, g, or t
  misc_feature (518)..(518): n is a, c, g, or t
  misc_feature (535)..(535): n is a, c, g, or t
  misc_feature (546)..(546): n is a, c, g, or t
  misc_feature (554)..(554): n is a, c, g, or t
  misc_feature (575)..(575): n is a, c, g, or t
  misc_feature (578)..(578): n is a, c, g, or t
  misc_feature (581)..(581): n is a, c, g, or t
  misc_feature (593)..(593): n is a, c, g, or t

SEQ ID NO: 386290 - DNA, 1547 bp, Homo Sapiens; identical to SEQ ID NO: 357239

SEQ ID NO: 386291 - DNA, 1695 bp, Homo Sapiens; identical to SEQ ID NO: 357245
  misc_feature (1646)..(1646): n is a, c, g, or t
  misc_feature (1655)..(1655): n is a, c, g, or t
  misc_feature (1676)..(1676): n is a, c, g, or t

SEQ ID NO: 386292 - DNA, 497 bp, Homo Sapiens; identical to SEQ ID NO: 357246
  misc_feature (341)..(341): n is a, c, g, or t
  misc_feature (426)..(426): n is a, c, g, or t
  misc_feature (455)..(455): n is a, c, g, or t
  misc_feature (461)..(461): n is a, c, g, or t
  misc_feature (472)..(472): n is a, c, g, or t
  misc_feature (481)..(481): n is a, c, g, or t

SEQ ID NO: 386293 - DNA, 877 bp, Homo Sapiens; identical to SEQ ID NO: 357247
  misc_feature (66)..(66): n is a, c, g, or t

SEQ ID NO: 386294 - DNA, 443 bp, Homo Sapiens; identical to SEQ ID NO: 357248
  misc_feature (116)..(116): n is a, c, g, or t

SEQ ID NO: 386295 - DNA, 2374 bp, Homo Sapiens; identical to SEQ ID NO: 357253
  misc_feature (1939)..(1959): n is a, c, g, or t

SEQ ID NO: 386296 - DNA, 514 bp, Homo Sapiens; identical to SEQ ID NO: 357254

SEQ ID NO: 386297 - DNA, 609 bp, Homo Sapiens; identical to SEQ ID NO: 357256
  misc_feature (252)..(252): n is a, c, g, or t

SEQ ID NO: 386298 - DNA, 1190 bp, Homo Sapiens; identical to SEQ ID NO: 357257
  misc_feature (1121)..(1130): n is a, c, g, or t

SEQ ID NO: 386299 - DNA, 763 bp, Homo Sapiens; identical to SEQ ID NO: 357267

SEQ ID NO: 386300 - DNA, 1494 bp, Homo Sapiens; identical to SEQ ID NO: 357268
  misc_feature (1323)..(1323): n is a, c, g, or t
  misc_feature (1482)..(1482): n is a, c, g, or t

SEQ ID NO: 386301 - DNA, 1297 bp, Homo Sapiens; identical to SEQ ID NO: 357273
  misc_feature (61)..(61): n is a, c, g, or t
  misc_feature (1211)..(1241): n is a, c, g, or t

SEQ ID NO: 386302 - DNA, 1182 bp, Homo Sapiens; identical to SEQ ID NO: 357274

SEQ ID NO: 386303 - DNA, 1128 bp, Homo Sapiens; identical to SEQ ID NO: 357279

SEQ ID NO: 386304 - DNA, 1329 bp, Homo Sapiens; identical to SEQ ID NO: 357280

SEQ ID NO: 386305 - DNA, 582 bp, Homo Sapiens; identical to SEQ ID NO: 357281

SEQ ID NO: 386306 - DNA, 680 bp, Homo Sapiens; identical to SEQ ID NO: 357287

SEQ ID NO: 386307 - DNA, 470 bp, Homo Sapiens; identical to SEQ ID NO: 357288
  misc_feature (436)..(436): n is a, c, g, or t
  misc_feature (443)..(443): n is a, c, g, or t

SEQ ID NO: 386308 - DNA, 2064 bp, Homo Sapiens; identical to SEQ ID NO: 357293
  misc_feature (1584)..(1662): n is a, c, g, or t

SEQ ID NO: 386309 - DNA, 830 bp, Homo Sapiens; identical to SEQ ID NO: 357294

SEQ ID NO: 386310 - DNA, 924 bp, Homo Sapiens; identical to SEQ ID NO: 357295
  misc_feature (839)..(875): n is a, c, g, or t

SEQ ID NO: 386311 - DNA, 1111 bp, Homo Sapiens; identical to SEQ ID NO: 357297
  misc_feature (959)..(959): n is a, c, g, or t
  misc_feature (984)..(984): n is a, c, g, or t
  misc_feature (998)..(998): n is a, c, g, or t
  misc_feature (1000)..(1000): n is a, c, g, or t
  misc_feature (1019)..(1019): n is a, c, g, or t
  misc_feature (1030)..(1030): n is a, c, g, or t
  misc_feature (1032)..(1032): n is a, c, g, or t
  misc_feature (1037)..(1037): n is a, c, g, or t
  misc_feature (1046)..(1046): n is a, c, g, or t
  misc_feature (1051)..(1051): n is a, c, g, or t
  misc_feature (1061)..(1061): n is a, c, g, or t
  misc_feature (1063)..(1063): n is a, c, g, or t
  misc_feature (1067)..(1068): n is a, c, g, or t
  misc_feature (1077)..(1078): n is a, c, g, or t
  misc_feature (1086)..(1086): n is a, c, g, or t
  misc_feature (1089)..(1089): n is a, c, g, or t
  misc_feature (1103)..(1103): n is a, c, g, or t
  misc_feature (1109)..(1109): n is a, c, g, or t

SEQ ID NO: 386312 - DNA, 515 bp, Homo Sapiens; identical to SEQ ID NO: 357298

SEQ ID NO: 386313 - DNA, 1885 bp, Homo Sapiens; identical to SEQ ID NO: 357300
  misc_feature (365)..(609): n is a, c, g, or t
  misc_feature (630)..(683): n is a, c, g, or t
  misc_feature (1802)..(1834): n is a, c, g, or t

SEQ ID NO: 386314 - DNA, 943 bp, Homo Sapiens; identical to SEQ ID NO: 357301

SEQ ID NO: 386315 - DNA, 2732 bp, Homo Sapiens; identical to SEQ ID NO: 357306
  misc_feature (611)..(659): n is a, c, g, or t
  misc_feature (2145)..(2145): n is a, c, g, or t
  misc_feature (2199)..(2199): n is a, c, g, or t
  misc_feature (2202)..(2202): n is a, c, g, or t
  misc_feature (2204)..(2204): n is a, c, g, or t
  misc_feature (2258)..(2258): n is a, c, g, or t
  misc_feature (2262)..(2262): n is a, c, g, or t
  misc_feature (2276)..(2277): n is a, c, g, or t
  misc_feature (2285)..(2285): n is a, c, g, or t
  misc_feature (2302)..(2329): n is a, c, g, or t
  misc_feature (2334)..(2334): n is a, c, g, or t
  misc_feature (2364)..(2364): n is a, c, g, or t
  misc_feature (2367)..(2367): n is a, c, g, or t
  misc_feature (2372)..(2372): n is a, c, g, or t
  misc_feature (2417)..(2417): n is a, c, g, or t

SEQ ID NO: 386316 - DNA, 716 bp, Homo Sapiens; identical to SEQ ID NO: 357307

SEQ ID NO: 386317 - DNA, 1293 bp, Homo Sapiens; identical to SEQ ID NO: 357313

SEQ ID NO: 386318 - DNA, 1217 bp, Homo Sapiens; identical to SEQ ID NO: 357314
  misc_feature (994)..(1080): n is a, c, g, or t
  misc_feature (1083)..(1092): n is a, c, g, or t

SEQ ID NO: 386319 - DNA, 465 bp, Homo Sapiens; identical to SEQ ID NO: 357316
  misc_feature (29)..(29): n is a, c, g, or t
  misc_feature (59)..(59): n is a, c, g, or t

SEQ ID NO: 386320 - DNA, 406 bp, Homo Sapiens; identical to SEQ ID NO: 357317
  misc_feature (162)..(180): n is a, c, g, or t

SEQ ID NO: 386321 - DNA, 1190 bp, Homo Sapiens; identical to SEQ ID NO: 357318
  misc_feature (1134)..(1150): n is a, c, g, or t

SEQ ID NO: 386322 - DNA, 770 bp, Homo Sapiens; identical to SEQ ID NO: 357319
  misc_feature (518)..(518): n is a, c, g, or t

SEQ ID NO: 386323 - DNA, 1552 bp, Homo Sapiens; identical to SEQ ID NO: 357325

SEQ ID NO: 386324 - DNA, 1136 bp, Homo Sapiens; identical to SEQ ID NO: 357326

SEQ ID NO: 386325 - DNA, 1271 bp, Homo Sapiens; identical to SEQ ID NO: 357329

SEQ ID NO: 386326 - DNA, 458 bp, Homo Sapiens; identical to SEQ ID NO: 357330
  misc_feature (436)..(436): n is a, c, g, or t

SEQ ID NO: 386327 - DNA, 2845 bp, Homo Sapiens; identical to SEQ ID NO: 357334
  misc_feature (2193)..(2193): n is a, c, g, or t
  misc_feature (2780)..(2780): n is a, c, g, or t
  misc_feature (2808)..(2808): n is a, c, g, or t
  misc_feature (2822)..(2822): n is a, c, g, or t

SEQ ID NO: 386328 - DNA, 458 bp, Homo Sapiens; identical to SEQ ID NO: 357335
  misc_feature (360)..(360): n is a, c, g, or t
  misc_feature (370)..(370): n is a, c, g, or t
  misc_feature (413)..(413): n is a, c, g, or t

SEQ ID NO: 386329 - DNA, 1382 bp, Homo Sapiens; identical to SEQ ID NO: 357336
  misc_feature (134)..(176): n is a, c, g, or t
  misc_feature (198)..(249): n is a, c, g, or t

SEQ ID NO: 386330 - DNA, 1324 bp, Homo Sapiens; identical to SEQ ID NO: 357337
  misc_feature (68)..(68): n is a, c, g, or t
  misc_feature (143)..(143): n is a, c, g, or t
  misc_feature (149)..(149): n is a, c, g, or t
  misc_feature (170)..(170): n is a, c, g, or t
  misc_feature (215)..(215): n is a, c, g, or t
  misc_feature (252)..(252): n is a, c, g, or t
  misc_feature (267)..(267): n is a, c, g, or t
  misc_feature (342)..(342): n is a, c, g, or t
  misc_feature (347)..(347): n is a, c, g, or t
  misc_feature (451)..(451): n is a, c, g, or t
  misc_feature (472)..(472): n is a, c, g, or t
  misc_feature (607)..(607): n is a, c, g, or t
  misc_feature (653)..(653): n is a, c, g, or t
  misc_feature (680)..(680): n is a, c, g, or t
  misc_feature (732)..(732): n is a, c, g, or t
  misc_feature (739)..(740): n is a, c, g, or t
  misc_feature (742)..(746): n is a, c, g, or t
  misc_feature (755)..(755): n is a, c, g, or t
  misc_feature (994)..(994): n is a, c, g, or t
  misc_feature (1073)..(1073): n is a, c, g, or t
  misc_feature (1103)..(1103): n is a, c, g, or t
  misc_feature (1150)..(1150): n is a, c, g, or t
  misc_feature (1172)..(1172): n is a, c, g, or t
  misc_feature (1193)..(1193): n is a, c, g, or t
  misc_feature (1219)..(1220): n is a, c, g, or t
  misc_feature (1230)..(1230): n is a, c, g, or t

SEQ ID NO: 386331 - DNA, 1050 bp, Homo Sapiens; identical to SEQ ID NO: 357339
  misc_feature (975)..(975): n is a, c, g, or t
  misc_feature (997)..(997): n is a, c, g, or t
  misc_feature (1007)..(1007): n is a, c, g, or t
  misc_feature (1009)..(1009): n is a, c, g, or t
  misc_feature (1015)..(1015): n is a, c, g, or t
  misc_feature (1025)..(1025): n is a, c, g, or t
  misc_feature (1032)..(1032): n is a, c, g, or t
  misc_feature (1044)..(1044): n is a, c, g, or t

SEQ ID NO: 386332 - DNA, 1084 bp, Homo Sapiens; identical to SEQ ID NO: 357340
  misc_feature (4)..(4): n is a, c, g, or t
  misc_feature (7)..(7): n is a, c, g, or t
  misc_feature (11)..(11): n is a, c, g, or t
  misc_feature (18)..(20): n is a, c, g, or t
  misc_feature (24)..(24): n is a, c, g, or t
  misc_feature (28)..(28): n is a, c, g, or t
  misc_feature (38)..(38): n is a, c, g, or t
  misc_feature (40)..(40): n is a, c, g, or t
  misc_feature (48)..(48): n is a, c, g, or t
  misc_feature (51)..(51): n is a, c, g, or t
  misc_feature (60)..(61): n is a, c, g, or t
  misc_feature (72)..(72): n is a, c, g, or t
  misc_feature (83)..(83): n is a, c, g, or t
  misc_feature (153)..(155): n is a, c, g, or t
  misc_feature (297)..(297): n is a, c, g, or t

SEQ ID NO: 386333 - DNA, 2447 bp, Homo Sapiens; identical to SEQ ID NO: 357341
  misc_feature (14)..(15): n is a, c, g, or t
  misc_feature (21)..(21): n is a, c, g, or t
  misc_feature (25)..(25): n is a, c, g, or t
  misc_feature (33)..(34): n is a, c, g, or t
  misc_feature (36)..(36): n is a, c, g, or t
  misc_feature (41)..(41): n is a, c, g, or t
  misc_feature (44)..(44): n is a, c, g, or t
  misc_feature (51)..(51): n is a, c, g, or t
  misc_feature (58)..(58): n is a, c, g, or t
  misc_feature (87)..(87): n is a, c, g, or t
  misc_feature (130)..(130): n is a, c, g, or t
  misc_feature (132)..(132): n is a, c, g, or t
  misc_feature (167)..(167): n is a, c, g, or t
  misc_feature (228)..(228): n is a, c, g, or t
  misc_feature (253)..(254): n is a, c, g, or t
  misc_feature (294)..(295): n is a, c, g, or t
  misc_feature (315)..(315): n is a, c, g, or t
  misc_feature (340)..(340): n is a, c, g, or t
  misc_feature (486)..(486): n is a, c, g, or t
  misc_feature (499)..(499): n is a, c, g, or t
  misc_feature (524)..(524): n is a, c, g, or t
  misc_feature (528)..(528): n is a, c, g, or t

SEQ ID NO: 386334 - DNA, 1267 bp, Homo Sapiens; identical to SEQ ID NO: 357342

SEQ ID NO: 386335 - DNA, 900 bp, Homo Sapiens; identical to SEQ ID NO: 357344

SEQ ID NO: 386336 - DNA, 921 bp, Homo Sapiens; identical to SEQ ID NO: 357345

SEQ ID NO: 386337 - DNA, 975 bp, Homo Sapiens; identical to SEQ ID NO: 357347
  misc_feature (277)..(278): n is a, c, g, or t

SEQ ID NO: 386338 - DNA, 1130 bp, Homo Sapiens; identical to SEQ ID NO: 357348
  misc_feature (950)..(950): n is a, c, g, or t

SEQ ID NO: 386339 - DNA, 953 bp, Homo Sapiens; identical to SEQ ID NO: 357351

SEQ ID NO: 386340 - DNA, 267 bp, Homo Sapiens; identical to SEQ ID NO: 357352

SEQ ID NO: 386341 - DNA, 972 bp, Homo Sapiens; identical to SEQ ID NO: 357358
  misc_feature (1)..(1): n is a, c, g, or t
  misc_feature (8)..(8): n is a, c, g, or t
  misc_feature (14)..(14): n is a, c, g, or t
  misc_feature (22)..(22): n is a, c, g, or t
  misc_feature (26)..(26): n is a, c, g, or t
  misc_feature (31)..(31): n is a, c, g, or t
  misc_feature (47)..(47): n is a, c, g, or t
  misc_feature (69)..(69): n is a, c, g, or t
  misc_feature (71)..(71): n is a, c, g, or t
  misc_feature (76)..(76): n is a, c, g, or t
  misc_feature (83)..(83): n is a, c, g, or t
  misc_feature (87)..(100): n is a, c, g, or t
  misc_feature (106)..(106): n is a, c, g, or t
  misc_feature (110)..(110): n is a, c, g, or t

SEQ ID NO: 386342 - DNA, 1225 bp, Homo Sapiens; identical to SEQ ID NO: 357359

SEQ ID NO: 386343 - DNA, 1595 bp, Homo Sapiens; identical to SEQ ID NO: 357363
  misc_feature (76)..(76): n is a, c, g, or t
  misc_feature (103)..(103): n is a, c, g, or t
  misc_feature (117)..(117): n is a, c, g, or t
  misc_feature (125)..(125): n is a, c, g, or t
  misc_feature (130)..(190): n is a, c, g, or t
  misc_feature (192)..(192): n is a, c, g, or t
  misc_feature (196)..(198): n is a, c, g, or t
  misc_feature (202)..(203): n is a, c, g, or t
  misc_feature (205)..(207): n is a, c, g, or t
  misc_feature (212)..(212): n is a, c, g, or t
  misc_feature (215)..(215): n is a, c, g, or t
  misc_feature (230)..(230): n is a, c, g, or t
  misc_feature (247)..(247): n is a, c, g, or t
  misc_feature (253)..(253): n is a, c, g, or t
  misc_feature (263)..(263): n is a, c, g, or t
  misc_feature (285)..(299): n is a, c, g, or t
  misc_feature (301)..(301): n is a, c, g, or t
  misc_feature (321)..(321): n is a, c, g, or t
  misc_feature (339)..(339): n is a, c, g, or t
  misc_feature (348)..(348): n is a, c, g, or t
  misc_feature (362)..(362): n is a, c, g, or t
  misc_feature (400)..(400): n is a, c, g, or t
  misc_feature (406)..(406): n is a, c, g, or t
  misc_feature (426)..(426): n is a, c, g, or t
  misc_feature (463)..(463): n is a, c, g, or t
  misc_feature (479)..(479): n is a, c, g, or t
  misc_feature (486)..(486): n is a, c, g, or t
  misc_feature (488)..(488): n is a, c, g, or t
  misc_feature (501)..(501): n is a, c, g, or t
  misc_feature (526)..(534): n is a, c, g, or t
  misc_feature (546)..(546): n is a, c, g, or t
  misc_feature (548)..(548): n is a, c, g, or t
  misc_feature (553)..(554): n is a, c, g, or t
  misc_feature (637)..(637): n is a, c, g, or t
  misc_feature (1216)..(1267): n is a, c, g, or t
  misc_feature (1340)..(1369): n is a, c, g, or t

SEQ ID NO: 386344 - DNA, 618 bp, Homo Sapiens; identical to SEQ ID NO: 357364

SEQ ID NO: 386345 - DNA, 798 bp, Homo Sapiens; identical to SEQ ID NO: 357365

SEQ ID NO: 386346 - DNA, 1005 bp, Homo Sapiens; identical to SEQ ID NO: 357366

SEQ ID NO: 386347 - DNA, 967 bp, Homo Sapiens; identical to SEQ ID NO: 357375
  misc_feature (767)..(787): n is a, c, g, or t

SEQ ID NO: 386348 - DNA, 481 bp, Homo Sapiens; identical to SEQ ID NO: 357376
  misc_feature (22)..(22): n is a, c, g, or t
  misc_feature (56)..(56): n is a, c, g, or t
  misc_feature (65)..(65): n is a, c, g, or t
  misc_feature (123)..(123): n is a, c, g, or t

SEQ ID NO: 386349 - DNA, 1016 bp, Homo Sapiens; identical to SEQ ID NO: 357378
  misc_feature (44)..(44): n is a, c, g, or t
  misc_feature (474)..(483): n is a, c, g, or t
  misc_feature (679)..(717): n is a, c, g, or t

SEQ ID NO: 386350 - DNA, 1018 bp, Homo Sapiens; identical to SEQ ID NO: 357379
  misc_feature (124)..(124): n is a, c, g, or t
  misc_feature (144)..(216): n is a, c, g, or t
  misc_feature (270)..(270): n is a, c, g, or t
  misc_feature (514)..(588): n is a, c, g, or t
  misc_feature (628)..(639): n is a, c, g, or t

SEQ ID NO: 386351 - DNA, 974 bp, Homo Sapiens; identical to SEQ ID NO: 357383
  misc_feature (66)..(66): n is a, c, g, or t
  misc_feature (101)..(101): n is a, c, g, or t
  misc_feature (103)..(103): n is a, c, g, or t
  misc_feature (184)..(184): n is a, c, g, or t
  misc_feature (189)..(189): n is a, c, g, or t
  misc_feature (253)..(253): n is a, c, g, or t

SEQ ID NO: 386352 - DNA, 858 bp, Homo Sapiens; identical to SEQ ID NO: 357384
  misc_feature (101)..(115): n is a, c, g, or t
  misc_feature (840)..(840): n is a, c, g, or t

SEQ ID NO: 386353 - DNA, 1896 bp, Homo Sapiens; identical to SEQ ID NO: 357385

SEQ ID NO: 386354 - DNA, 999 bp, Homo Sapiens; identical to SEQ ID NO: 357386
  misc_feature (980)..(980): n is a, c, g, or t

SEQ ID NO: 386355 - DNA, 993 bp, Homo Sapiens; identical to SEQ ID NO: 357388
  misc_feature (985)..(985): n is a, c, g, or t
  misc_feature (989)..(989): n is a, c, g, or t

SEQ ID NO: 386356 - DNA, 850 bp, Homo Sapiens; identical to SEQ ID NO: 357389
  misc_feature (26)..(26): n is a, c, g, or t
  misc_feature (755)..(774): n is a, c, g, or t

SEQ ID NO: 386357 - DNA, 980 bp, Homo Sapiens; identical to SEQ ID NO: 357390

SEQ ID NO: 386358 - DNA, 992 bp, Homo Sapiens; identical to SEQ ID NO: 357392
  misc_feature (829)..(829): n is a, c, g, or t
  misc_feature (846)..(846): n is a, c, g, or t
  misc_feature (869)..(869): n is a, c, g, or t
  misc_feature (876)..(876): n is a, c, g, or t
  misc_feature (878)..(878): n is a, c, g, or t
  misc_feature (880)..(880): n is a, c, g, or t
  misc_feature (882)..(882): n is a, c, g, or t
  misc_feature (884)..(884): n is a, c, g, or t
  misc_feature (895)..(896): n is a, c, g, or t
  misc_feature (901)..(902): n is a, c, g, or t
  misc_feature (911)..(911): n is a, c, g, or t
  misc_feature (913)..(915): n is a, c, g, or t
  misc_feature (917)..(917): n is a, c, g, or t
  misc_feature (920)..(922): n is a, c, g, or t
  misc_feature (935)..(935): n is a, c, g, or t
  misc_feature (938)..(938): n is a, c, g, or t
  misc_feature (943)..(943): n is a, c, g, or t
  misc_feature (954)..(954): n is a, c, g, or t
  misc_feature (958)..(958): n is a, c, g, or t
  misc_feature (971)..(971): n is a, c, g, or t
  misc_feature (981)..(981): n is a, c, g, or t
  misc_feature (987)..(987): n is a, c, g, or t
  misc_feature (989)..(989): n is a, c, g, or t

SEQ ID NO: 386359 - DNA, 1129 bp, Homo Sapiens; identical to SEQ ID NO: 357393
  misc_feature (7)..(7): n is a, c, g, or t
  misc_feature (123)..(156): n is a, c, g, or t
  misc_feature (907)..(907): n is a, c, g, or t
  misc_feature (991)..(991): n is a, c, g, or t
  misc_feature (1002)..(1002): n is a, c, g, or t
  misc_feature (1019)..(1019): n is a, c, g, or t
  misc_feature (1021)..(1021): n is a, c, g, or t
  misc_feature (1030)..(1030): n is a, c, g, or t
  misc_feature (1032)..(1032): n is a, c, g, or t
  misc_feature (1040)..(1040): n is a, c, g, or t
  misc_feature (1046)..(1047): n is a, c, g, or t
  misc_feature (1050)..(1051): n is a, c, g, or t
  misc_feature (1062)..(1062): n is a, c, g, or t
  misc_feature (1064)..(1064): n is a, c, g, or t
  misc_feature (1068)..(1068): n is a, c, g, or t
  misc_feature (1070)..(1070): n is a, c, g, or t
  misc_feature (1074)..(1074): n is a, c, g, or t
  misc_feature (1076)..(1076): n is a, c, g, or t
  misc_feature (1084)..(1084): n is a, c, g, or t
  misc_feature (1088)..(1088): n is a, c, g, or t
  misc_feature (1093)..(1093): n is a, c, g, or t
  misc_feature (1095)..(1095): n is a, c, g, or t
  misc_feature (1103)..(1103): n is a, c, g, or t
  misc_feature (1111)..(1111): n is a, c, g, or t
  misc_feature (1116)..(1117): n is a, c, g, or t
  misc_feature (1120)..(1120): n is a, c, g, or t
  misc_feature (1126)..(1126): n is a, c, g, or t

SEQ ID NO: 386360 - DNA, 901 bp, Homo Sapiens; identical to SEQ ID NO: 357394
  misc_feature (91)..(128): n is a, c, g, or t

SEQ ID NO: 386361 - DNA, 2081 bp, Homo Sapiens; identical to SEQ ID NO: 357396
  misc_feature (1785)..(1847): n is a, c, g, or t

SEQ ID NO: 386362 - DNA, 949 bp, Homo Sapiens; identical to SEQ ID NO: 357397
  misc_feature (51)..(51): n is a, c, g, or t

SEQ ID NO: 386363 - DNA, 1515 bp, Homo Sapiens; identical to SEQ ID NO: 357409
  misc_feature (69)..(94): n is a, c, g, or t

SEQ ID NO: 386364 - DNA, 1249 bp, Homo Sapiens; identical to SEQ ID NO: 357410
  misc_feature (184)..(209): n is a, c, g, or t
  misc_feature (770)..(809): n is a, c, g, or t

SEQ ID NO: 386365 - DNA, 1736 bp, Homo Sapiens; identical to SEQ ID NO: 357422
  misc_feature (321)..(321): n is a, c, g, or t
  misc_feature (1601)..(1601): n is a, c, g, or t

SEQ ID NO: 386366 - DNA, 898 bp, Homo Sapiens; identical to SEQ ID NO: 357423
  misc_feature (548)..(602): n is a, c, g, or t
  misc_feature (741)..(826): n is a, c, g, or t

SEQ ID NO: 386367 - DNA, 1837 bp, Homo Sapiens; identical to SEQ ID NO: 357439
  misc_feature (7)..(7): n is a, c, g, or t
  misc_feature (38)..(38): n is a, c, g, or t
  misc_feature (264)..(264): n is a, c, g, or t
  misc_feature (267)..(267): n is a, c, g, or t
  misc_feature (510)..(510): n is a, c, g, or t
  misc_feature (615)..(615): n is a, c, g, or t

SEQ ID NO: 386368 - DNA, 1107 bp, Homo Sapiens; identical to SEQ ID NO: 357440

SEQ ID NO: 386369 - DNA, 364 bp, Homo Sapiens; identical to SEQ ID NO: 357445

SEQ ID NO: 386370 - DNA, 1978 bp, Homo Sapiens; identical to SEQ ID NO: 357446
  misc_feature (24)..(24): n is a, c, g, or t
  misc_feature (57)..(57): n is a, c, g, or t
  misc_feature (163)..(163): n is a, c, g, or t
  misc_feature (1097)..(1107): n is a, c, g, or t

SEQ ID NO: 386371 - DNA, 776 bp, Homo Sapiens; identical to SEQ ID NO: 357448

SEQ ID NO: 386372 - DNA, 440 bp, Homo Sapiens; identical to SEQ ID NO: 357449

SEQ ID NO: 386373 - DNA, 727 bp, Homo Sapiens; identical to SEQ ID NO: 357452
  misc_feature (496)..(513): n is a, c, g, or t

SEQ ID NO: 386374 - DNA, 1841 bp, Homo Sapiens; identical to SEQ ID NO: 357453
  misc_feature (151)..(159): n is a, c, g, or t
  misc_feature (301)..(337): n is a, c, g, or t
  misc_feature (1155)..(1224): n is a, c, g, or t
  misc_feature (1283)..(1428): n is a, c, g, or t

SEQ ID NO: 386375 - DNA, 3136 bp, Homo Sapiens; identical to SEQ ID NO: 357462
  misc_feature (2508)..(2519): n is a, c, g, or t

SEQ ID NO: 386376 - DNA, 1119 bp, Homo Sapiens; identical to SEQ ID NO: 357463
  misc_feature (838)..(838): n is a, c, g, or t
  misc_feature (936)..(960): n is a, c, g, or t

SEQ ID NO: 386377 - DNA, 1006 bp, Homo Sapiens; identical to SEQ ID NO: 357465

SEQ ID NO: 386378 - DNA, 987 bp, Homo Sapiens; identical to SEQ ID NO: 357466
  misc_feature (14)..(14): n is a, c, g, or t

SEQ ID NO: 386379 - DNA, 962 bp, Homo Sapiens; identical to SEQ ID NO: 357467

SEQ ID NO: 386380 - DNA, 1743 bp, Homo Sapiens; identical to SEQ ID NO: 357468

SEQ ID NO: 386381 - DNA, 515 bp, Homo Sapiens; identical to SEQ ID NO: 357469
  misc_feature (463)..(463): n is a, c, g, or t
  misc_feature (494)..(494): n is a, c, g, or t

SEQ ID NO: 386382 - DNA, 1470 bp, Homo Sapiens; identical to SEQ ID NO: 357474
  misc_feature (4)..(4): n is a, c, g, or t
  misc_feature (28)..(29): n is a, c, g, or t
  misc_feature (32)..(32): n is a, c, g, or t
  misc_feature (87)..(87): n is a, c, g, or t
  misc_feature (91)..(91): n is a, c, g, or t
  misc_feature (139)..(139): n is a, c, g, or t
  misc_feature (155)..(155): n is a, c, g, or t
  misc_feature (189)..(189): n is a, c, g, or t
  misc_feature (194)..(194): n is a, c, g, or t
  misc_feature (212)..(212): n is a, c, g, or t
  misc_feature (274)..(274): n is a, c, g, or t
  misc_feature (278)..(278): n is a, c, g, or t
  misc_feature (310)..(310): n is a, c, g, or t
  misc_feature (318)..(318): n is a, c, g, or t
  misc_feature (327)..(328): n is a, c, g, or t
  misc_feature (354)..(355): n is a, c, g, or t
  misc_feature (358)..(358): n is a, c, g, or t
  misc_feature (364)..(364): n is a, c, g, or t
  misc_feature (366)..(369): n is a, c, g, or t
  misc_feature (372)..(372): n is a, c, g, or t
  misc_feature (375)..(387): n is a, c, g, or t
  misc_feature (390)..(390): n is a, c, g, or t
  misc_feature (393)..(397): n is a, c, g, or t
  misc_feature (400)..(401): n is a, c, g, or t
  misc_feature (405)..(405): n is a, c, g, or t
  misc_feature (413)..(413): n is a, c, g, or t
  misc_feature (416)..(416): n is a, c, g, or t
  misc_feature (420)..(420): n is a, c, g, or t
  misc_feature (423)..(424): n is a, c, g, or t
  misc_feature (426)..(426): n is a, c, g, or t
  misc_feature (429)..(429): n is a, c, g, or t
  misc_feature (437)..(437): n is a, c, g, or t
  misc_feature (440)..(440): n is a, c, g, or t
  misc_feature (447)..(447): n is a, c, g, or t
  misc_feature (451)..(451): n is a, c, g, or t
  misc_feature (453)..(453): n is a, c, g, or t
  misc_feature (461)..(461): n is a, c, g, or t
  misc_feature (467)..(467): n is a, c, g, or t
  misc_feature (486)..(486): n is a, c, g, or t
  misc_feature (497)..(497): n is a, c, g, or t
  misc_feature (503)..(503): n is a, c, g, or t
  misc_feature (505)..(505): n is a, c, g, or t
  misc_feature (509)..(510): n is a, c, g, or t
  misc_feature (516)..(517): n is a, c, g, or t
  misc_feature (552)..(552): n is a, c, g, or t
  misc_feature (577)..(577): n is a, c, g, or t
  misc_feature (582)..(582): n is a, c, g, or t
  misc_feature (585)..(585): n is a, c, g, or t
  misc_feature (590)..(590): n is a, c, g, or t
  misc_feature (596)..(596): n is a, c, g, or t
  misc_feature (600)..(600): n is a, c, g, or t
  misc_feature (695)..(695): n is a, c, g, or t
  misc_feature (757)..(757): n is a, c, g, or t
  misc_feature (1358)..(1397): n is a, c, g, or t

SEQ ID NO: 386383 - DNA, 1452 bp, Homo Sapiens; identical to SEQ ID NO: 357475
  misc_feature (104)..(227): n is a, c, g, or t

SEQ ID NO: 386384 - DNA, 991 bp, Homo Sapiens; identical to SEQ ID NO: 357476

SEQ ID NO: 386385 - DNA, 438 bp, Homo Sapiens; identical to SEQ ID NO: 357477
  misc_feature (341)..(341): n is a, c, g, or t
  misc_feature (348)..(348): n is a, c, g, or t
  misc_feature (353)..(353): n is a, c, g, or t
  misc_feature (384)..(384): n is a, c, g, or t
  misc_feature (396)..(396): n is a, c, g, or t
  misc_feature (417)..(417): n is a, c, g, or t

SEQ ID NO: 386386 - DNA, 1426 bp, Homo Sapiens; identical to SEQ ID NO: 357480
  misc_feature (735)..(735): n is a, c, g, or t
  misc_feature (751)..(751): n is a, c, g, or t
  misc_feature (773)..(773): n is a, c, g, or t
  misc_feature (889)..(889): n is a, c, g, or t
  misc_feature (1334)..(1334): n is a, c, g, or t
  misc_feature (1389)..(1389): n is a, c, g, or t
  misc_feature (1396)..(1396): n is a, c, g, or t
  misc_feature (1402)..(1402): n is a, c, g, or t
  misc_feature (1416)..(1416): n is a, c, g, or t

SEQ ID NO: 386387 - DNA, 551 bp, Homo Sapiens; identical to SEQ ID NO: 357481
  misc_feature (129)..(190): n is a, c, g, or t

SEQ ID NO: 386388 - DNA, 1110 bp, Homo Sapiens; identical to SEQ ID NO: 357482

SEQ ID NO: 386389 - DNA, 687 bp, Homo Sapiens; identical to SEQ ID NO: 357483

SEQ ID NO: 386390 - DNA, 1332 bp, Homo Sapiens; identical to SEQ ID NO: 357485
  misc_feature (1090)..(1090): n is a, c, g, or t

SEQ ID NO: 386391 - DNA, 635 bp, Homo Sapiens; identical to SEQ ID NO: 357486

SEQ ID NO: 386392 - DNA, 1150 bp, Homo Sapiens; identical to SEQ ID NO: 357490
  misc_feature (167)..(168): n is a, c, g, or t
  misc_feature (192)..(255): n is a, c, g, or t
  misc_feature (401)..(474): n is a, c, g, or t

SEQ ID NO: 386393 - DNA, 1802 bp, Homo Sapiens; identical to SEQ ID NO: 357491
  misc_feature (244)..(244): n is a, c, g, or t
  misc_feature (1516)..(1524): n is a, c, g, or t

SEQ ID NO: 386394 - DNA, 890 bp, Homo Sapiens; identical to SEQ ID NO: 357492
  misc_feature (50)..(152): n is a, c, g, or t
  misc_feature (417)..(629): n is a, c, g, or t

SEQ ID NO: 386395 - DNA, 839 bp, Homo Sapiens; identical to SEQ ID NO: 264323

SEQ ID NO: 386396 - DNA, 1627 bp, Homo Sapiens; identical to SEQ ID NO: 357500
  misc_feature (1079)..(1079): n is a, c, g, or t

SEQ ID NO: 386397 - DNA, 869 bp, Homo Sapiens; identical to SEQ ID NO: 357501
  misc_feature (191)..(191): n is a, c, g, or t
  misc_feature (224)..(224): n is a, c, g, or t

SEQ ID NO: 386398 - DNA, 1197 bp, Homo Sapiens; identical to SEQ ID NO: 357502
  misc_feature (124)..(151): n is a, c, g, or t
  misc_feature (337)..(410): n is a, c, g, or t

SEQ ID NO: 386399 - DNA, 893 bp, Homo Sapiens; identical to SEQ ID NO: 357503
  misc_feature (409)..(482): n is a, c, g, or t
  misc_feature (673)..(700): n is a, c, g, or t
  misc_feature (824)..(853): n is a, c, g, or t

SEQ ID NO: 386400 - DNA, 1703 bp, Homo Sapiens; identical to SEQ ID NO: 357507
  misc_feature (31)..(31): n is a, c, g, or t
  misc_feature (54)..(54): n is a, c, g, or t
  misc_feature (98)..(98): n is a, c, g, or t
  misc_feature (152)..(152): n is a, c, g, or t
  misc_feature (300)..(300): n is a, c, g, or t
  misc_feature (1139)..(1139): n is a, c, g, or t
  misc_feature (1259)..(1259): n is a, c, g, or t
  misc_feature (1266)..(1266): n is a, c, g, or t
  misc_feature (1294)..(1294): n is a, c, g, or t
  misc_feature (1310)..(1311): n is a, c, g, or t
  misc_feature (1342)..(1342): n is a, c, g, or t
  misc_feature (1354)..(1355): n is a, c, g, or t
  misc_feature (1357)..(1357): n is a, c, g, or t
  misc_feature (1359)..(1359): n is a, c, g, or t
  misc_feature (1361)..(1361): n is a, c, g, or t
  misc_feature (1363)..(1363): n is a, c, g, or t
  misc_feature (1365)..(1365): n is a, c, g, or t
  misc_feature (1374)..(1375): n is a, c, g, or t
  misc_feature (1379)..(1379): n is a, c, g, or t
  misc_feature (1382)..(1382): n is a, c, g, or t
  misc_feature (1386)..(1386): n is a, c, g, or t
  misc_feature (1394)..(1396): n is a, c, g, or t
  misc_feature (1402)..(1404): n is a, c, g, or t
  misc_feature (1411)..(1411): n is a, c, g, or t
  misc_feature (1461)..(1461): n is a, c, g, or t
  misc_feature (1536)..(1536): n is a, c, g, or t
  misc_feature (1538)..(1538): n is a, c, g, or t
  misc_feature (1623)..(1623): n is a, c, g, or t
  misc_feature (1651)..(1663): n is a, c, g, or t
  misc_feature (1679)..(1679): n is a, c, g, or t
  misc_feature (1682)..(1682): n is a, c, g, or t
  misc_feature (1696)..(1696): n is a, c, g, or t

SEQ ID NO: 386401 - DNA, 1059 bp, Homo Sapiens; identical to SEQ ID NO: 357508

SEQ ID NO: 386402 - DNA, 886 bp, Homo Sapiens; identical to SEQ ID NO: 357514
  misc_feature (870)..(870): n is a, c, g, or t

SEQ ID NO: 386403 - DNA, 921 bp, Homo Sapiens; identical to SEQ ID NO: 357515

SEQ ID NO: 386404 - DNA, 1710 bp, Homo Sapiens; identical to SEQ ID NO: 357523

SEQ ID NO: 386405 - DNA, 1474 bp, Homo Sapiens; identical to SEQ ID NO: 357524
  misc_feature (134)..(134): n is a, c, g, or t
  misc_feature (429)..(429): n is a, c, g, or t
  misc_feature (523)..(523): n is a, c, g, or t

SEQ ID NO: 386406 - DNA, 1028 bp, Homo Sapiens; identical to SEQ ID NO: 357533
  misc_feature (870)..(878): n is a, c, g, or t
  misc_feature (886)..(886): n is a, c, g, or t
  misc_feature (888)..(888): n is a, c, g, or t
  misc_feature (901)..(901): n is a, c, g, or t
  misc_feature (925)..(925): n is a, c, g, or t
  misc_feature (928)..(928): n is a, c, g, or t
  misc_feature (942)..(942): n is a, c, g, or t
  misc_feature (979)..(979): n is a, c, g, or t
  misc_feature (988)..(988): n is a, c, g, or t
  misc_feature (994)..(994): n is a, c, g, or t
  misc_feature (1001)..(1001): n is a, c, g, or t
  misc_feature (1010)..(1010): n is a, c, g, or t
  misc_feature (1013)..(1013): n is a, c, g, or t
  misc_feature (1016)..(1017): n is a, c, g, or t
  misc_feature (1022)..(1022): n is a, c, g, or t
  misc_feature (1024)..(1024): n is a, c, g, or t

SEQ ID NO: 386407 - DNA, 806 bp, Homo Sapiens; identical to SEQ ID NO: 357534
  misc_feature (162)..(170): n is a, c, g, or t

SEQ ID NO: 386408 - DNA, 504 bp, Homo Sapiens; identical to SEQ ID NO: 357535
  misc_feature (24)..(24): n is a, c, g, or t
  misc_feature (56)..(56): n is a, c, g, or t
  misc_feature (64)..(72): n is a, c, g, or t
  misc_feature (419)..(419): n is a, c, g, or t

SEQ ID NO: 386409 - DNA, 2119 bp, Homo Sapiens; identical to SEQ ID NO: 357537
  misc_feature (1036)..(1036): n is a, c, g, or t
  misc_feature (1905)..(1905): n is a, c, g, or t

SEQ ID NO: 386410 - DNA, 691 bp, Homo Sapiens; identical to SEQ ID NO: 357538
  misc_feature (403)..(426): n is a, c, g, or t

SEQ ID NO: 386411 - DNA, 1616 bp, Homo Sapiens; identical to SEQ ID NO: 357543

SEQ ID NO: 386412 - DNA, 887 bp, Homo Sapiens; identical to SEQ ID NO: 357544
  misc_feature (876)..(876): n is a, c, g, or t

SEQ ID NO: 386413 - DNA, 273 bp, Homo Sapiens; identical to SEQ ID NO: 357545

SEQ ID NO: 386414 - DNA, 3232 bp, Homo Sapiens; identical to SEQ ID NO: 357554
  misc_feature (2728)..(2825): n is a, c, g, or t

SEQ ID NO: 386415 - DNA, 999 bp, Homo Sapiens; identical to SEQ ID NO: 357555

SEQ ID NO: 386416 - DNA, 1045 bp, Homo Sapiens; identical to SEQ ID NO: 357556
  misc_feature (975)..(983): n is a, c, g, or t

SEQ ID NO: 386417 - DNA, 741 bp, Homo Sapiens; identical to SEQ ID NO: 357557

SEQ ID NO: 386418 - DNA, 853 bp, Homo Sapiens; identical to SEQ ID NO: 357562
  misc_feature (45)..(82): n is a, c, g, or t

SEQ ID NO: 386419 - DNA, 1177 bp, Homo Sapiens; identical to SEQ ID NO: 357563

SEQ ID NO: 386420 - DNA, 420 bp, Homo Sapiens; identical to SEQ ID NO: 357564

SEQ ID NO: 386421 - DNA, 1003 bp, Homo Sapiens; identical to SEQ ID NO: 357565
  misc_feature (270)..(270): n is a, c, g, or t
  misc_feature (272)..(272): n is a, c, g, or t
  misc_feature (277)..(277): n is a, c, g, or t
  misc_feature (279)..(283): n is a, c, g, or t
  misc_feature (301)..(301): n is a, c, g, or t
  misc_feature (305)..(306): n is a, c, g, or t
  misc_feature (310)..(311): n is a, c, g, or t
  misc_feature (313)..(315): n is a, c, g, or t
  misc_feature (324)..(325): n is a, c, g, or t
  misc_feature (349)..(350): n is a, c, g, or t
  misc_feature (357)..(359): n is a, c, g, or t
  misc_feature (361)..(361): n is a, c, g, or t
  misc_feature (363)..(364): n is a, c, g, or t
  misc_feature (369)..(371): n is a, c, g, or t
  misc_feature (374)..(375): n is a, c, g, or t
  misc_feature (380)..(381): n is a, c, g, or t
  misc_feature (383)..(384): n is a, c, g, or t
  misc_feature (389)..(389): n is a, c, g, or t
  misc_feature (391)..(391): n is a, c, g, or t
  misc_feature (396)..(396): n is a, c, g, or t
  misc_feature (399)..(400): n is a, c, g, or t
  misc_feature (402)..(405): n is a, c, g, or t
  misc_feature (413)..(415): n is a, c, g, or t
  misc_feature (417)..(418): n is a, c, g, or t
  misc_feature (422)..(422): n is a, c, g, or t
  misc_feature (433)..(433): n is a, c, g, or t
  misc_feature (436)..(437): n is a, c, g, or t
  misc_feature (439)..(439): n is a, c, g, or t
  misc_feature (448)..(448): n is a, c, g, or t
  misc_feature (450)..(450): n is a, c, g, or t
  misc_feature (455)..(455): n is a, c, g, or t
  misc_feature (459)..(460): n is a, c, g, or t
  misc_feature (462)..(462): n is a, c, g, or t
  misc_feature (467)..(468): n is a, c, g, or t
  misc_feature (471)..(472): n is a, c, g, or t
  misc_feature (475)..(475): n is a, c, g, or t
  misc_feature (478)..(478): n is a, c, g, or t
  misc_feature (481)..(481): n is a, c, g, or t
  misc_feature (485)..(486): n is a, c, g, or t
  misc_feature (497)..(498): n is a, c, g, or t
  misc_feature (509)..(509): n is a, c, g, or t
  misc_feature (526)..(529): n is a, c, g, or t
  misc_feature (532)..(534): n is a, c, g, or t
  misc_feature (536)..(537): n is a, c, g, or t
  misc_feature (540)..(541): n is a, c, g, or t
  misc_feature (546)..(548): n is a, c, g, or t
  misc_feature (552)..(552): n is a, c, g, or t
  misc_feature (554)..(554): n is a, c, g, or t
  misc_feature (564)..(567): n is a, c, g, or t
  misc_feature (576)..(577): n is a, c, g, or t
  misc_feature (581)..(581): n is a, c, g, or t
  misc_feature (588)..(592): n is a, c, g, or t
  misc_feature (605)..(605): n is a, c, g, or t
  misc_feature (611)..(612): n is a, c, g, or t
  misc_feature (629)..(629): n is a, c, g, or t
  misc_feature (632)..(632): n is a, c, g, or t
  misc_feature (643)..(643): n is a, c, g, or t
  misc_feature (648)..(648): n is a, c, g, or t
  misc_feature (671)..(671): n is a, c, g, or t
  misc_feature (673)..(673): n is a, c, g, or t
  misc_feature (677)..(677): n is a, c, g, or t
  misc_feature (680)..(680): n is a, c, g, or t
  misc_feature (686)..(704): n is a, c, g, or t
  misc_feature (730)..(730): n is a, c, g, or t
  misc_feature (732)..(732): n is a, c, g, or t
  misc_feature (737)..(737): n is a, c, g, or t
  misc_feature (747)..(747): n is a, c, g, or t
  misc_feature (751)..(751): n is a, c, g, or t
  misc_feature (756)..(756): n is a, c, g, or t
  misc_feature (936)..(936): n is a, c, g, or t
  misc_feature (981)..(981): n is a, c, g, or t
  misc_feature (991)..(991): n is a, c, g, or t

SEQ ID NO: 386422 - DNA, 887 bp, Homo Sapiens; identical to SEQ ID NO: 357566

SEQ ID NO: 386423 - DNA, 946 bp, Homo Sapiens; identical to SEQ ID NO: 357567

SEQ ID NO: 386424 - DNA, 1575 bp, Homo Sapiens; identical to SEQ ID NO: 357568
  misc_feature (1489)..(1489): n is a, c, g, or t
  misc_feature (1531)..(1531): n is a, c, g, or t
  misc_feature (1558)..(1558): n is a, c, g, or t

SEQ ID NO: 386425 - DNA, 1601 bp, Homo Sapiens; identical to SEQ ID NO: 357570
  misc_feature (725)..(725): n is a, c, g, or t
  misc_feature (1184)..(1184): n is a, c, g, or t
  misc_feature (1196)..(1196): n is a, c, g, or t
  misc_feature (1596)..(1596): n is a, c, g, or t

SEQ ID NO: 386426 - DNA, 1289 bp, Homo Sapiens; identical to SEQ ID NO: 357571

SEQ ID NO: 386427 - DNA, 556 bp, Homo Sapiens; identical to SEQ ID NO: 357572
  misc_feature (522)..(522): n is a, c, g, or t
  misc_feature (527)..(527): n is a, c, g, or t
  misc_feature (541)..(541): n is a, c, g, or t

SEQ ID NO: 386428 - DNA, 1093 bp, Homo Sapiens; identical to SEQ ID NO: 357576
  misc_feature (32)..(32): n is a, c, g, or t
  misc_feature (35)..(35): n is a, c, g, or t
  misc_feature (224)..(224): n is a, c, g, or t
  misc_feature (235)..(251): n is a, c, g, or t

SEQ ID NO: 386429 - DNA, 487 bp, Homo Sapiens; identical to SEQ ID NO: 357577

SEQ ID NO: 386430 - DNA, 733 bp, Homo Sapiens; identical to SEQ ID NO: 357585

SEQ ID NO: 386431 - DNA, 544 bp, Homo Sapiens; identical to SEQ ID NO: 357586

SEQ ID NO: 386432 - DNA, 1075 bp, Homo Sapiens; identical to SEQ ID NO: 357592
  misc_feature (51)..(87): n is a, c, g, or t

SEQ ID NO: 386433 - DNA, 1617 bp, Homo Sapiens; identical to SEQ ID NO: 357593
  misc_feature (610)..(644): n is a, c, g, or t

SEQ ID NO: 386434 - DNA, 1022 bp, Homo Sapiens; identical to SEQ ID NO: 357594
  misc_feature (148)..(148): n is a, c, g, or t
  misc_feature (276)..(276): n is a, c, g, or t
  misc_feature (908)..(908): n is a, c, g, or t
  misc_feature (921)..(921): n is a, c, g, or t
  misc_feature (949)..(949): n is a, c, g, or t
  misc_feature (958)..(958): n is a, c, g, or t
  misc_feature (964)..(966): n is a, c, g, or t
  misc_feature (979)..(979): n is a, c, g, or t
  misc_feature (982)..(982): n is a, c, g, or t
  misc_feature (993)..(993): n is a, c, g, or t
  misc_feature (996)..(996): n is a, c, g, or t
  misc_feature (999)..(1000): n is a, c, g, or t
  misc_feature (1019)..(1019): n is a, c, g, or t

SEQ ID NO: 386435 - DNA, 920 bp, Homo Sapiens; identical to SEQ ID NO: 357595

SEQ ID NO: 386436 - DNA, 469 bp, Homo Sapiens; identical to SEQ ID NO: 357596
  misc_feature (38)..(38): n is a, c, g, or t
  misc_feature (44)..(44): n is a, c, g, or t
  misc_feature (102)..(102): n is a, c, g, or t

SEQ ID NO: 386437 - DNA, 1082 bp, Homo Sapiens; identical to SEQ ID NO: 357597

SEQ ID NO: 386438 - DNA, 448 bp, Homo Sapiens; identical to SEQ ID NO: 357598
  misc_feature (437)..(437): n is a, c, g, or t

SEQ ID NO: 386439 - DNA, 932 bp, Homo Sapiens; identical to SEQ ID NO: 357599
  misc_feature (855)..(891): n is a, c, g, or t

SEQ ID NO: 386440 - DNA, 477 bp, Homo Sapiens; identical to SEQ ID NO: 357600

SEQ ID NO: 386441 - DNA, 1523 bp, Homo Sapiens; identical to SEQ ID NO: 357612

SEQ ID NO: 386442 - DNA, 696 bp, Homo Sapiens; identical to SEQ ID NO: 357613
  misc_feature (106)..(106): n is a, c, g, or t

SEQ ID NO: 386443 - DNA, 850 bp, Homo Sapiens; identical to SEQ ID NO: 357616

SEQ ID NO: 386444 - DNA, 2623 bp, Homo Sapiens; identical to SEQ ID NO: 357617
  misc_feature (959)..(973): n is a, c, g, or t
  misc_feature (999)..(1226): n is a, c, g, or t
  misc_feature (1311)..(1311): n is a, c, g, or t
  misc_feature (1980)..(2027): n is a, c, g, or t
  misc_feature (2076)..(2093): n is a, c, g, or t
  misc_feature (2350)..(2359): n is a, c, g, or t

SEQ ID NO: 386445 - DNA, 1629 bp, Homo Sapiens; identical to SEQ ID NO: 357619
  misc_feature (1619)..(1619): n is a, c, g, or t

SEQ ID NO: 386446 - DNA, 1381 bp, Homo Sapiens; identical to SEQ ID NO: 97785

SEQ ID NO: 386447 - DNA, 1978 bp, Homo Sapiens; identical to SEQ ID NO: 357624
  misc_feature (1218)..(1255): n is a, c, g, or t
  misc_feature (1279)..(1279): n is a, c, g, or t
  misc_feature (1289)..(1305): n is a, c, g, or t
  misc_feature (1816)..(1882): n is a, c, g, or t
  misc_feature (1924)..(1924): n is a, c, g, or t
  misc_feature (1946)..(1946): n is a, c, g, or t
  misc_feature (1972)..(1972): n is a, c, g, or t
  misc_feature (1977)..(1977): n is a, c, g, or t

SEQ ID NO: 386448 - DNA, 785 bp, Homo Sapiens; identical to SEQ ID NO: 357625
  misc_feature (359)..(359): n is a, c, g, or t
  misc_feature (448)..(448): n is a, c, g, or t
  misc_feature (496)..(496): n is a, c, g, or t

SEQ ID NO: 386449 - DNA, 434 bp, Homo Sapiens; identical to SEQ ID NO: 357626
  misc_feature (37)..(37): n is a, c, g, or t

SEQ ID NO: 386450 - DNA, 928 bp, Homo Sapiens; identical to SEQ ID NO: 357627
  misc_feature (919)..(919): n is a, c, g, or t
  misc_feature (923)..(923): n is a, c, g, or t
  misc_feature (926)..(927): n is a, c, g, or t

SEQ ID NO: 386451 - DNA, 1466 bp, Homo Sapiens; identical to SEQ ID NO: 357628
  misc_feature (831)..(848): n is a, c, g, or t
  misc_feature (1018)..(1018): n is a, c, g, or t
  misc_feature (1038)..(1038): n is a, c, g, or t
  misc_feature (1055)..(1055): n is a, c, g, or t
  misc_feature (1059)..(1059): n is a, c, g, or t

SEQ ID NO: 386452 - DNA, 600 bp, Homo Sapiens; identical to SEQ ID NO: 357629
  misc_feature (532)..(532): n is a, c, g, or t
  misc_feature (557)..(557): n is a, c, g, or t

SEQ ID NO: 386453 - DNA, 1114 bp, Homo Sapiens; identical to SEQ ID NO: 357633
  misc_feature (7)..(7): n is a, c, g, or t
  misc_feature (16)..(16): n is a, c, g, or t
  misc_feature (28)..(28): n is a, c, g, or t
  misc_feature (31)..(31): n is a, c, g, or t
  misc_feature (61)..(61): n is a, c, g, or t
  misc_feature (71)..(71): n is a, c, g, or t
  misc_feature (82)..(82): n is a, c, g, or t
  misc_feature (833)..(857): n is a, c, g, or t
  misc_feature (859)..(976): n is a, c, g, or t

SEQ ID NO: 386454 - DNA, 1168 bp, Homo Sapiens; identical to SEQ ID NO: 357634
  misc_feature (309)..(434): n is a, c, g, or t
  misc_feature (1038)..(1046): n is a, c, g, or t

SEQ ID NO: 386455 - DNA, 942 bp, Homo Sapiens; identical to SEQ ID NO: 357635
  misc_feature (444)..(444): n is a, c, g, or t
  misc_feature (469)..(469): n is a, c, g, or t
  misc_feature (486)..(486): n is a, c, g, or t
  misc_feature (519)..(521): n is a, c, g, or t
  misc_feature (529)..(549): n is a, c, g, or t
  misc_feature (563)..(563): n is a, c, g, or t
  misc_feature (571)..(571): n is a, c, g, or t
  misc_feature (574)..(574): n is a, c, g, or t
  misc_feature (579)..(580): n is a, c, g, or t
  misc_feature (582)..(582): n is a, c, g, or t
  misc_feature (595)..(595): n is a, c, g, or t
  misc_feature (646)..(646): n is a, c, g, or t
  misc_feature (648)..(651): n is a, c, g, or t
  misc_feature (688)..(690): n is a, c, g, or t
  misc_feature (739)..(739): n is a, c, g, or t

SEQ ID NO: 386456 - DNA, 941 bp, Homo Sapiens; identical to SEQ ID NO: 357636

SEQ ID NO: 386457 - DNA, 684 bp, Homo Sapiens; identical to SEQ ID NO: 357637
  misc_feature (33)..(33): n is a, c, g, or t
  misc_feature (535)..(544): n is a, c, g, or t

SEQ ID NO: 386458 - DNA, 1324 bp, Homo Sapiens; identical to SEQ ID NO: 357638
  misc_feature (1061)..(1061): n is a, c, g, or t
  misc_feature (1063)..(1063): n is a, c, g, or t
  misc_feature (1065)..(1084): n is a, c, g, or t
  misc_feature (1095)..(1179): n is a, c, g, or t
  misc_feature (1189)..(1201): n is a, c, g, or t

SEQ ID NO: 386459 - DNA, 915 bp, Homo Sapiens; identical to SEQ ID NO: 357639

SEQ ID NO: 386460 - DNA, 1247 bp, Homo Sapiens; identical to SEQ ID NO: 357640
  misc_feature (1138)..(1138): n is a, c, g, or t
  misc_feature (1165)..(1165): n is a, c, g, or t
  misc_feature (1194)..(1194): n is a, c, g, or t
  misc_feature (1224)..(1224): n is a, c, g, or t

SEQ ID NO: 386461 - DNA, 997 bp, Homo Sapiens; identical to SEQ ID NO: 357645
  misc_feature (40)..(40): n is a, c, g, or t
  misc_feature (50)..(50): n is a, c, g, or t
  misc_feature (53)..(54): n is a, c, g, or t
  misc_feature (57)..(57): n is a, c, g, or t
  misc_feature (60)..(64): n is a, c, g, or t
  misc_feature (66)..(67): n is a, c, g, or t
  misc_feature (682)..(682): n is a, c, g, or t
  misc_feature (689)..(689): n is a, c, g, or t
  misc_feature (701)..(701): n is a, c, g, or t
  misc_feature (707)..(707): n is a, c, g, or t
  misc_feature (713)..(713): n is a, c, g, or t
  misc_feature (728)..(728): n is a, c, g, or t
  misc_feature (745)..(745): n is a, c, g, or t
  misc_feature (764)..(764): n is a, c, g, or t
  misc_feature (768)..(768): n is a, c, g, or t
  misc_feature (776)..(776): n is a, c, g, or t
  misc_feature (779)..(781): n is a, c, g, or t
  misc_feature (783)..(783): n is a, c, g, or t
  misc_feature (793)..(793): n is a, c, g, or t
  misc_feature (800)..(800): n is a, c, g, or t
  misc_feature (829)..(829): n is a, c, g, or t
  misc_feature (840)..(841): n is a, c, g, or t
  misc_feature (847)..(847): n is a, c, g, or t
  misc_feature (850)..(850): n is a, c, g, or t
  misc_feature (857)..(857): n is a, c, g, or t
  misc_feature (861)..(861): n is a, c, g, or t
  misc_feature (865)..(865): n is a, c, g, or t
  misc_feature (867)..(868): n is a, c, g, or t
  misc_feature (873)..(873): n is a, c, g, or t
  misc_feature (881)..(881): n is a, c, g, or t
  misc_feature (889)..(889): n is a, c, g, or t
  misc_feature (895)..(896): n is a, c, g, or t
  misc_feature (899)..(899): n is a, c, g, or t
  misc_feature (903)..(903): n is a, c, g, or t
  misc_feature (905)..(905): n is a, c, g, or t
  misc_feature (909)..(910): n is a, c, g, or t
  misc_feature (916)..(916): n is a, c, g, or t
  misc_feature (921)..(922): n is a, c, g, or t
  misc_feature (925)..(925): n is a, c, g, or t
  misc_feature (928)..(928): n is a, c, g, or t
  misc_feature (933)..(933): n is a, c, g, or t
  misc_feature (935)..(935): n is a, c, g, or t
  misc_feature (938)..(938): n is a, c, g, or t
  misc_feature (945)..(946): n is a, c, g, or t
  misc_feature (955)..(955): n is a, c, g, or t
  misc_feature (961)..(962): n is a, c, g, or t
  misc_feature (974)..(974): n is a, c, g, or t
  misc_feature (979)..(980): n is a, c, g, or t
  misc_feature (985)..(986): n is a, c, g, or t
  misc_feature (990)..(990): n is a, c, g, or t

SEQ ID NO: 386462 - DNA, 1047 bp, Homo Sapiens; identical to SEQ ID NO: 357646
  misc_feature (829)..(829): n is a, c, g, or t
  misc_feature (889)..(889): n is a, c, g, or t
  misc_feature (897)..(897): n is a, c, g, or t
  misc_feature (912)..(912): n is a, c, g, or t
  misc_feature (920)..(920): n is a, c, g, or t
  misc_feature (931)..(931): n is a, c, g, or t
  misc_feature (976)..(977): n is a, c, g, or t
  misc_feature (980)..(980): n is a, c, g, or t
  misc_feature (993)..(993): n is a, c, g, or t
  misc_feature (1010)..(1010): n is a, c, g, or t
  misc_feature (1015)..(1016): n is a, c, g, or t
  misc_feature (1026)..(1026): n is a, c, g, or t
  misc_feature (1029)..(1029): n is a, c, g, or t
  misc_feature (1039)..(1041): n is a, c, g, or t

SEQ ID NO: 386463 - DNA, 1529 bp, Homo Sapiens; identical to SEQ ID NO: 357647
  misc_feature (1519)..(1519): n is a, c, g, or t

SEQ ID NO: 386464 - DNA, 968 bp, Homo Sapiens; identical to SEQ ID NO: 357648

SEQ ID NO: 386465 - DNA, 1845 bp, Homo Sapiens; identical to SEQ ID NO: 357650

SEQ ID NO: 386466 - DNA, 985 bp, Homo Sapiens; identical to SEQ ID NO: 357651

SEQ ID NO: 386467 - DNA, 543 bp, Homo Sapiens; identical to SEQ ID NO: 357652

SEQ ID NO: 386468 - DNA, 1172 bp, Homo Sapiens; identical to SEQ ID NO: 357653
  misc_feature (14)..(14): n is a, c, g, or t
  misc_feature (16)..(16): n is a, c, g, or t
  misc_feature (18)..(18): n is a, c, g, or t
  misc_feature (22)..(22): n is a, c, g, or t
  misc_feature (26)..(26): n is a, c, g, or t
  misc_feature (48)..(48): n is a, c, g, or t
  misc_feature (69)..(69): n is a, c, g, or t
  misc_feature (72)..(72): n is a, c, g, or t
  misc_feature (77)..(77): n is a, c, g, or t
  misc_feature (88)..(88): n is a, c, g, or t
  misc_feature (127)..(127): n is a, c, g, or t
  misc_feature (134)..(134): n is a, c, g, or t
  misc_feature (136)..(136): n is a, c, g, or t
  misc_feature (148)..(148): n is a, c, g, or t
  misc_feature (151)..(151): n is a, c, g, or t
  misc_feature (157)..(157): n is a, c, g, or t
  misc_feature (162)..(162): n is a, c, g, or t
  misc_feature (165)..(165): n is a, c, g, or t
  misc_feature (192)..(192): n is a, c, g, or t
  misc_feature (220)..(220): n is a, c, g, or t
  misc_feature (225)..(225): n is a, c, g, or t
  misc_feature (231)..(231): n is a, c, g, or t
  misc_feature (235)..(235): n is a, c, g, or t
  misc_feature (281)..(325): n is a, c, g, or t
  misc_feature (329)..(329): n is a, c, g, or t
  misc_feature (393)..(393): n is a, c, g, or t
  misc_feature (401)..(401): n is a, c, g, or t
  misc_feature (418)..(418): n is a, c, g, or t
  misc_feature (466)..(466): n is a, c, g, or t
  misc_feature (469)..(469): n is a, c, g, or t
  misc_feature (530)..(530): n is a, c, g, or t
  misc_feature (596)..(661): n is a, c, g, or t

SEQ ID NO: 386469 - DNA, 1020 bp, Homo Sapiens; identical to SEQ ID NO: 357654
  misc_feature (22)..(22): n is a, c, g, or t
  misc_feature (25)..(25): n is a, c, g, or t
  misc_feature (73)..(73): n is a, c, g, or t
  misc_feature (605)..(620): n is a, c, g, or t
  misc_feature (903)..(911): n is a, c, g, or t

SEQ ID NO: 386470 - DNA, 988 bp, Homo Sapiens; identical to SEQ ID NO: 357655
  misc_feature (3)..(3): n is a, c, g, or t
  misc_feature (5)..(5): n is a, c, g, or t
  misc_feature (13)..(13): n is a, c, g, or t
  misc_feature (22)..(22): n is a, c, g, or t
  misc_feature (25)..(25): n is a, c, g, or t
  misc_feature (42)..(42): n is a, c, g, or t
  misc_feature (47)..(47): n is a, c, g, or t
  misc_feature (74)..(74): n is a, c, g, or t
  misc_feature (80)..(80): n is a, c, g, or t
  misc_feature (93)..(93): n is a, c, g, or t
  misc_feature (96)..(96): n is a, c, g, or t

SEQ ID NO: 386471 - DNA, 1037 bp, Homo Sapiens; identical to SEQ ID NO: 357656

SEQ ID NO: 386472 - DNA, 814 bp, Homo Sapiens; identical to SEQ ID NO: 357657

SEQ ID NO: 386473 - DNA, 970 bp, Homo Sapiens; identical to SEQ ID NO: 357658
  misc_feature (41)..(77): n is a, c, g, or t

SEQ ID NO: 386474 - DNA, 1865 bp, Homo Sapiens; identical to SEQ ID NO: 357659

SEQ ID NO: 386475 - DNA, 1075 bp, Homo Sapiens; identical to SEQ ID NO: 357666
  misc_feature (198)..(198): n is a, c, g, or t
  misc_feature (932)..(932): n is a, c, g, or t
  misc_feature (1007)..(1007): n is a, c, g, or t
  misc_feature (1025)..(1025): n is a, c, g, or t
  misc_feature (1048)..(1048): n is a, c, g, or t
  misc_feature (1050)..(1051): n is a, c, g, or t
  misc_feature (1055)..(1055): n is a, c, g, or t
  misc_feature (1058)..(1058): n is a, c, g, or t
  misc_feature (1062)..(1062): n is a, c, g, or t
  misc_feature (1064)..(1064): n is a, c, g, or t
  misc_feature (1071)..(1071): n is a, c, g, or t

SEQ ID NO: 386476 - DNA, 1304 bp, Homo Sapiens; identical to SEQ ID NO: 357667

SEQ ID NO: 386477 - DNA, 848 bp, Homo Sapiens; identical to SEQ ID NO: 357668

SEQ ID NO: 386478 - DNA, 1035 bp, Homo Sapiens; identical to SEQ ID NO: 357669
  misc_feature (842)..(842): n is a, c, g, or t

SEQ ID NO: 386479 - DNA, 1471 bp, Homo Sapiens; identical to SEQ ID NO: 357670
  misc_feature (48)..(84): n is a, c, g, or t

SEQ ID NO: 386480 - DNA, 1572 bp, Homo Sapiens; identical to SEQ ID NO: 357671
  misc_feature (1491)..(1491): n is a, c, g, or t

SEQ ID NO: 386481 - DNA, 1083 bp, Homo Sapiens; identical to SEQ ID NO: 357672
  misc_feature (57)..(57): n is a, c, g, or t
  misc_feature (602)..(682): n is a, c, g, or t
  misc_feature (719)..(821): n is a, c, g, or t
  misc_feature (846)..(846): n is a, c, g, or t
  misc_feature (860)..(861): n is a, c, g, or t
  misc_feature (883)..(884): n is a, c, g, or t
  misc_feature (917)..(1035): n is a, c, g, or t
  misc_feature (1047)..(1047): n is a, c, g, or t
  misc_feature (1079)..(1079): n is a, c, g, or t

SEQ ID NO: 386482 - DNA, 827 bp, Homo Sapiens; identical to SEQ ID NO: 357673
  misc_feature (35)..(35): n is a, c, g, or t

SEQ ID NO: 386483 - DNA, 1019 bp, Homo Sapiens; identical to SEQ ID NO: 357674
  misc_feature (878)..(878): n is a, c, g, or t
  misc_feature (896)..(896): n is a, c, g, or t
  misc_feature (934)..(934): n is a, c, g, or t
  misc_feature (1009)..(1009): n is a, c, g, or t

SEQ ID NO: 386484 - DNA, 1231 bp, Homo Sapiens; identical to SEQ ID NO: 357677
  misc_feature (20)..(20): n is a, c, g, or t
  misc_feature (34)..(34): n is a, c, g, or t
  misc_feature (56)..(56): n is a, c, g, or t
  misc_feature (63)..(63): n is a, c, g, or t
  misc_feature (164)..(164): n is a, c, g, or t
  misc_feature (927)..(927): n is a, c, g, or t

SEQ ID NO: 386485 - DNA, 501 bp, Homo Sapiens; identical to SEQ ID NO: 357678
  misc_feature (425)..(449): n is a, c, g, or t

SEQ ID NO: 386486 - DNA, 1150 bp, Homo Sapiens; identical to SEQ ID NO: 357680
  misc_feature (1142)..(1142): n is a, c, g, or t
  misc_feature (1147)..(1147): n is a, c, g, or t

SEQ ID NO: 386487 - DNA, 1231 bp, Homo Sapiens; identical to SEQ ID NO: 357681

SEQ ID NO: 386488 - DNA, 1074 bp, Homo Sapiens; identical to SEQ ID NO: 357683
  misc_feature (828)..(828): n is a, c, g, or t
  misc_feature (958)..(958): n is a, c, g, or t
  misc_feature (1001)..(1001): n is a, c, g, or t
  misc_feature (1006)..(1006): n is a, c, g, or t
  misc_feature (1014)..(1014): n is a, c, g, or t
  misc_feature (1030)..(1030): n is a, c, g, or t
  misc_feature (1036)..(1036): n is a, c, g, or t
  misc_feature (1043)..(1043): n is a, c, g, or t
  misc_feature (1046)..(1046): n is a, c, g, or t
  misc_feature (1049)..(1049): n is a, c, g, or t
  misc_feature (1069)..(1069): n is a, c, g, or t

SEQ ID NO: 386489 - DNA, 1640 bp, Homo Sapiens; identical to SEQ ID NO: 357684
  misc_feature (1283)..(1287): n is a, c, g, or t
  misc_feature (1289)..(1381): n is a, c, g, or t
  misc_feature (1383)..(1383): n is a, c, g, or t
  misc_feature (1385)..(1403): n is a, c, g, or t
  misc_feature (1453)..(1461): n is a, c, g, or t
  misc_feature (1499)..(1559): n is a, c, g, or t
  misc_feature (1586)..(1595): n is a, c, g, or t

SEQ ID NO: 386490 - DNA, 776 bp, Homo Sapiens; identical to SEQ ID NO: 357686

SEQ ID NO: 386491 - DNA, 862 bp, Homo Sapiens; identical to SEQ ID NO: 357687

SEQ ID NO: 386492 - DNA, 2833 bp, Homo Sapiens; identical to SEQ ID NO: 357689
  misc_feature (55)..(87): n is a, c, g, or t
  misc_feature (1703)..(1703): n is a, c, g, or t

SEQ ID NO: 386493 - DNA, 533 bp, Homo Sapiens; identical to SEQ ID NO: 357690
  misc_feature (446)..(446): n is a, c, g, or t

SEQ ID NO: 386494 - DNA, 1194 bp, Homo Sapiens; identical to SEQ ID NO: 357695
  misc_feature (502)..(559): n is a, c, g, or t
  misc_feature (1031)..(1031): n is a, c, g, or t
  misc_feature (1038)..(1038): n is a, c, g, or t
  misc_feature (1041)..(1041): n is a, c, g, or t
  misc_feature (1043)..(1044): n is a, c, g, or t
  misc_feature (1054)..(1054): n is a, c, g, or t
  misc_feature (1059)..(1059): n is a, c, g, or t
  misc_feature (1064)..(1064): n is a, c, g, or t
  misc_feature (1083)..(1084): n is a, c, g, or t
  misc_feature (1092)..(1092): n is a, c, g, or t
  misc_feature (1094)..(1094): n is a, c, g, or t
  misc_feature (1099)..(1099): n is a, c, g, or t
  misc_feature (1102)..(1102): n is a, c, g, or t
  misc_feature (1121)..(1121): n is a, c, g, or t
  misc_feature (1123)..(1124): n is a, c, g, or t
  misc_feature (1135)..(1136): n is a, c, g, or t
  misc_feature (1143)..(1143): n is a, c, g, or t
  misc_feature (1145)..(1145): n is a, c, g, or t
  misc_feature (1155)..(1155): n is a, c, g, or t
  misc_feature (1159)..(1159): n is a, c, g, or t
  misc_feature (1162)..(1164): n is a, c, g, or t
  misc_feature (1167)..(1167): n is a, c, g, or t
  misc_feature (1173)..(1173): n is a, c, g, or t
  misc_feature (1186)..(1186): n is a, c, g, or t
  misc_feature (1191)..(1191): n is a, c, g, or t

SEQ ID NO: 386495 - DNA, 1491 bp, Homo Sapiens; identical to SEQ ID NO: 357696
  misc_feature (1156)..(1228): n is a, c, g, or t

SEQ ID NO: 386496 - DNA, 1202 bp, Homo Sapiens; identical to SEQ ID NO: 357697
  misc_feature (84)..(146): n is a, c, g, or t

SEQ ID NO: 386497 - DNA, 1777 bp, Homo Sapiens; identical to SEQ ID NO: 357698
  misc_feature (1533)..(1617): n is a, c, g, or t

SEQ ID NO: 386498 - DNA, 1378 bp, Homo Sapiens; identical to SEQ ID NO: 357699
  misc_feature (1257)..(1258): n is a, c, g, or t
  misc_feature (1315)..(1315): n is a, c, g, or t
  misc_feature (1330)..(1330): n is a, c, g, or t

SEQ ID NO: 386499 - DNA, 629 bp, Homo Sapiens; identical to SEQ ID NO: 357700
  misc_feature (513)..(513): n is a, c, g, or t

SEQ ID NO: 386500 - DNA, 430 bp, Homo Sapiens; identical to SEQ ID NO: 357701
  misc_feature (15)..(15): n is a, c, g, or t
  misc_feature (22)..(22): n is a, c, g, or t
  misc_feature (43)..(43): n is a, c, g, or t
  misc_feature (61)..(61): n is a, c, g, or t
  misc_feature (82)..(82): n is a, c, g, or t
  misc_feature (130)..(130): n is a, c, g, or t
  misc_feature (208)..(208): n is a, c, g, or t
  misc_feature (213)..(213): n is a, c, g, or t
  misc_feature (381)..(381): n is a, c, g, or t
  misc_feature (397)..(397): n is a, c, g, or t

SEQ ID NO: 386501 - DNA, 2437 bp, Homo Sapiens; identical to SEQ ID NO: 357705
  misc_feature (128)..(128): n is a, c, g, or t
  misc_feature (473)..(525): n is a, c, g, or t

SEQ ID NO: 386502 - DNA, 1107 bp, Homo Sapiens; identical to SEQ ID NO: 357706
  misc_feature (45)..(63): n is a, c, g, or t
  misc_feature (843)..(843): n is a, c, g, or t
  misc_feature (912)..(912): n is a, c, g, or t

SEQ ID NO: 386503 - DNA, 1152 bp, Homo Sapiens; identical to SEQ ID NO: 357708
  misc_feature (13)..(13): n is a, c, g, or t
  misc_feature (67)..(67): n is a, c, g, or t
  misc_feature (71)..(72): n is a, c, g, or t
  misc_feature (79)..(79): n is a, c, g, or t
  misc_feature (82)..(82): n is a, c, g, or t
  misc_feature (86)..(86): n is a, c, g, or t
  misc_feature (1094)..(1095): n is a, c, g, or t
  misc_feature (1126)..(1126): n is a, c, g, or t
  misc_feature (1142)..(1142): n is a, c, g, or t

SEQ ID NO: 386504 - DNA, 3421 bp, Homo Sapiens; identical to SEQ ID NO: 357709
  misc_feature (2868)..(2878): n is a, c, g, or t

SEQ ID NO: 386505 - DNA, 313 bp, Homo Sapiens; identical to SEQ ID NO: 357710

SEQ ID NO: 386506 - DNA, 1158 bp, Homo Sapiens; identical to SEQ ID NO: 357713
  misc_feature (12)..(12): n is a, c, g, or t
  misc_feature (17)..(17): n is a, c, g, or t
  misc_feature (19)..(20): n is a, c, g, or t
  misc_feature (28)..(29): n is a, c, g, or t
  misc_feature (31)..(31): n is a, c, g, or t
  misc_feature (35)..(35): n is a, c, g, or t
  misc_feature (38)..(38): n is a, c, g, or t
  misc_feature (43)..(44): n is a, c, g, or t
  misc_feature (56)..(57): n is a, c, g, or t
  misc_feature (68)..(68): n is a, c, g, or t
  misc_feature (71)..(71): n is a, c, g, or t
  misc_feature (74)..(74): n is a, c, g, or t
  misc_feature (89)..(89): n is a, c, g, or t
  misc_feature (94)..(94): n is a, c, g, or t
  misc_feature (610)..(610): n is a, c, g, or t
  misc_feature (726)..(726): n is a, c, g, or t
  misc_feature (741)..(741): n is a, c, g, or t
  misc_feature (777)..(865): n is a, c, g, or t
  misc_feature (877)..(877): n is a, c, g, or t
  misc_feature (895)..(895): n is a, c, g, or t
  misc_feature (910)..(1016): n is a, c, g, or t
  misc_feature (1030)..(1030): n is a, c, g, or t
  misc_feature (1062)..(1063): n is a, c, g, or t
  misc_feature (1156)..(1156): n is a, c, g, or t

SEQ ID NO: 386507 - DNA, 1867 bp, Homo Sapiens; identical to SEQ ID NO: 357714
  misc_feature (1456)..(1544): n is a, c, g, or t
  misc_feature (1586)..(1595): n is a, c, g, or t
  misc_feature (1597)..(1697): n is a, c, g, or t

SEQ ID NO: 386508 - DNA, 749 bp, Homo Sapiens; identical to SEQ ID NO: 357717
  misc_feature (508)..(518): n is a, c, g, or t
  misc_feature (603)..(604): n is a, c, g, or t
  misc_feature (614)..(614): n is a, c, g, or t
  misc_feature (620)..(620): n is a, c, g, or t
  misc_feature (625)..(625): n is a, c, g, or t
  misc_feature (627)..(627): n is a, c, g, or t
  misc_feature (631)..(631): n is a, c, g, or t
  misc_feature (637)..(637): n is a, c, g, or t
  misc_feature (649)..(649): n is a, c, g, or t
  misc_feature (659)..(659): n is a, c, g, or t
  misc_feature (663)..(663): n is a, c, g, or t
  misc_feature (666)..(667): n is a, c, g, or t
  misc_feature (671)..(672): n is a, c, g, or t
  misc_feature (674)..(674): n is a, c, g, or t
  misc_feature (681)..(681): n is a, c, g, or t
  misc_feature (685)..(688): n is a, c, g, or t
  misc_feature (691)..(691): n is a, c, g, or t
  misc_feature (693)..(693): n is a, c, g, or t
  misc_feature (708)..(708): n is a, c, g, or t
  misc_feature (722)..(722): n is a, c, g, or t
  misc_feature (736)..(736): n is a, c, g, or t
  misc_feature (739)..(739): n is a, c, g, or t

SEQ ID NO: 386509 - DNA, 995 bp, Homo Sapiens; identical to SEQ ID NO: 357718

SEQ ID NO: 386510 - DNA, 1496 bp, Homo Sapiens; identical to SEQ ID NO: 357719
  misc_feature (352)..(352): n is a, c, g, or t

SEQ ID NO: 386511 - DNA, 1136 bp, Homo Sapiens; identical to SEQ ID NO: 357720

SEQ ID NO: 386512 - DNA, 1393 bp, Homo Sapiens; identical to SEQ ID NO: 357724
  misc_feature (274)..(302): n is a, c, g, or t
  misc_feature (1178)..(1186): n is a, c, g, or t
  misc_feature (1207)..(1217): n is a, c, g, or t

SEQ ID NO: 386513 - DNA, 460 bp, Homo Sapiens; identical to SEQ ID NO: 357725
  misc_feature (31)..(31): n is a, c, g, or t
  misc_feature (264)..(264): n is a, c, g, or t

SEQ ID NO: 386514 - DNA, 777 bp, Homo Sapiens; identical to SEQ ID NO: 357726
  misc_feature (285)..(285): n is a, c, g, or t
  misc_feature (554)..(617): n is a, c, g, or t
  misc_feature (705)..(705): n is a, c, g, or t

SEQ ID NO: 386515 - DNA, 947 bp, Homo Sapiens; identical to SEQ ID NO: 357727

SEQ ID NO: 386516 - DNA, 1647 bp, Homo Sapiens; identical to SEQ ID NO: 357732

SEQ ID NO: 386517 - DNA, 577 bp, Homo Sapiens; identical to SEQ ID NO: 357733
  misc_feature (373)..(373): n is a, c, g, or t
  misc_feature (523)..(523): n is a, c, g, or t
  misc_feature (535)..(535): n is a, c, g, or t
  misc_feature (546)..(546): n is a, c, g, or t

SEQ ID NO: 386518 - DNA, 713 bp, Homo Sapiens; identical to SEQ ID NO: 357743
  misc_feature (146)..(531): n is a, c, g, or t
  misc_feature (695)..(695): n is a, c, g, or t

SEQ ID NO: 386519 - DNA, 437 bp, Homo Sapiens; identical to SEQ ID NO: 357744
  misc_feature (62)..(62): n is a, c, g, or t

SEQ ID NO: 386520 - DNA, 967 bp, Homo Sapiens; identical to SEQ ID NO: 357749
  misc_feature (947)..(947): n is a, c, g, or t

SEQ ID NO: 386521 - DNA, 1043 bp, Homo Sapiens; identical to SEQ ID NO: 357750

SEQ ID NO: 386522 - DNA, 1713 bp, Homo Sapiens; identical to SEQ ID NO: 357751

SEQ ID NO: 386523 - DNA, 1003 bp, Homo Sapiens; identical to SEQ ID NO: 357752
  misc_feature (71)..(71): n is a, c, g, or t
  misc_feature (202)..(202): n is a, c, g, or t
  misc_feature (205)..(205): n is a, c, g, or t
  misc_feature (266)..(266): n is a, c, g, or t
  misc_feature (352)..(352): n is a, c, g, or t
  misc_feature (459)..(461): n is a, c, g, or t
  misc_feature (673)..(736): n is a, c, g, or t

SEQ ID NO: 386524 - DNA, 1094 bp, Homo Sapiens; identical to SEQ ID NO: 357753

SEQ ID NO: 386525 - DNA, 1092 bp, Homo Sapiens; identical to SEQ ID NO: 357754
  misc_feature (726)..(773): n is a, c, g, or t
  misc_feature (989)..(997): n is a, c, g, or t

SEQ ID NO: 386526 - DNA, 1133 bp, Homo Sapiens; identical to SEQ ID NO: 357756
  misc_feature (8)..(8): n is a, c, g, or t
  misc_feature (17)..(17): n is a, c, g, or t
  misc_feature (20)..(20): n is a, c, g, or t
  misc_feature (22)..(23): n is a, c, g, or t
  misc_feature (27)..(27): n is a, c, g, or t
  misc_feature (34)..(35): n is a, c, g, or t
  misc_feature (38)..(39): n is a, c, g, or t
  misc_feature (46)..(46): n is a, c, g, or t
  misc_feature (56)..(57): n is a, c, g, or t
  misc_feature (60)..(60): n is a, c, g, or t
  misc_feature (68)..(68): n is a, c, g, or t
  misc_feature (92)..(92): n is a, c, g, or t
  misc_feature (97)..(97): n is a, c, g, or t
  misc_feature (102)..(102): n is a, c, g, or t
  misc_feature (106)..(106): n is a, c, g, or t
  misc_feature (109)..(109): n is a, c, g, or t
  misc_feature (114)..(114): n is a, c, g, or t
  misc_feature (117)..(117): n is a, c, g, or t
  misc_feature (128)..(128): n is a, c, g, or t
  misc_feature (140)..(140): n is a, c, g, or t
  misc_feature (146)..(146): n is a, c, g, or t
  misc_feature (153)..(153): n is a, c, g, or t
  misc_feature (162)..(162): n is a, c, g, or t
  misc_feature (230)..(230): n is a, c, g, or t
  misc_feature (235)..(235): n is a, c, g, or t
  misc_feature (238)..(238): n is a, c, g, or t
  misc_feature (281)..(328): n is a, c, g, or t
  misc_feature (373)..(373): n is a, c, g, or t
  misc_feature (490)..(490): n is a, c, g, or t
  misc_feature (501)..(501): n is a, c, g, or t
  misc_feature (521)..(521): n is a, c, g, or t
  misc_feature (558)..(558): n is a, c, g, or t

SEQ ID NO: 386527 - DNA, 1001 bp, Homo Sapiens; identical to SEQ ID NO: 357757
  misc_feature (415)..(415): n is a, c, g, or t
  misc_feature (428)..(428): n is a, c, g, or t
  misc_feature (476)..(476): n is a, c, g, or t

SEQ ID NO: 386528 - DNA, 1382 bp, Homo Sapiens; identical to SEQ ID NO: 357761

SEQ ID NO: 386529 - DNA, 394 bp, Homo Sapiens; identical to SEQ ID NO: 357762
  misc_feature (296)..(321): n is a, c, g, or t

SEQ ID NO: 386530 - DNA, 291 bp, Homo Sapiens; identical to SEQ ID NO: 357763

SEQ ID NO: 386531 - DNA, 2121 bp, Homo Sapiens; identical to SEQ ID NO: 357764
  misc_feature (2015)..(2041): n is a, c, g, or t

SEQ ID NO: 386532 - DNA, 1015 bp, Homo Sapiens; identical to SEQ ID NO: 357765
  misc_feature (11)..(11): n is a, c, g, or t
  misc_feature (20)..(20): n is a, c, g, or t
  misc_feature (22)..(22): n is a, c, g, or t
  misc_feature (26)..(27): n is a, c, g, or t
  misc_feature (31)..(31): n is a, c, g, or t
  misc_feature (34)..(35): n is a, c, g, or t
  misc_feature (43)..(43): n is a, c, g, or t
  misc_feature (53)..(54): n is a, c, g, or t
  misc_feature (93)..(93): n is a, c, g, or t
  misc_feature (499)..(499): n is a, c, g, or t
  misc_feature (506)..(506): n is a, c, g, or t
  misc_feature (539)..(539): n is a, c, g, or t
  misc_feature (568)..(576): n is a, c, g, or t
  misc_feature (614)..(614): n is a, c, g, or t
  misc_feature (653)..(661): n is a, c, g, or t

SEQ ID NO: 386533 - DNA, 2127 bp, Homo Sapiens; identical to SEQ ID NO: 357766
  misc_feature (1922)..(1922): n is a, c, g, or t
  misc_feature (1924)..(1924): n is a, c, g, or t
  misc_feature (1937)..(1937): n is a, c, g, or t
  misc_feature (1991)..(1991): n is a, c, g, or t

SEQ ID NO: 386534 - DNA, 902 bp, Homo Sapiens; identical to SEQ ID NO: 357778
  misc_feature (112)..(164): n is a, c, g, or t

SEQ ID NO: 386535 - DNA, 1346 bp, Homo Sapiens; identical to SEQ ID NO: 357779
  misc_feature (468)..(476): n is a, c, g, or t
  misc_feature (824)..(887): n is a, c, g, or t
  misc_feature (1228)..(1306): n is a, c, g, or t

SEQ ID NO: 386536 - DNA, 959 bp, Homo Sapiens; identical to SEQ ID NO: 357784

SEQ ID NO: 386537 - DNA, 990 bp, Homo Sapiens; identical to SEQ ID NO: 357785

SEQ ID NO: 386538 - DNA, 847 bp, Homo Sapiens; identical to SEQ ID NO: 357788

SEQ ID NO: 386539 - DNA, 3272 bp, Homo Sapiens; identical to SEQ ID NO: 357789
  misc_feature (200)..(265): n is a, c, g, or t
  misc_feature (1385)..(1481): n is a, c, g, or t
  misc_feature (2574)..(2574): n is a, c, g, or t
  misc_feature (2660)..(2660): n is a, c, g, or t
  misc_feature (2924)..(2924): n is a, c, g, or t

SEQ ID NO: 386540 - DNA, 1841 bp, Homo Sapiens; identical to SEQ ID NO: 357790

SEQ ID NO: 386541 - DNA, 460 bp, Homo Sapiens; identical to SEQ ID NO: 357791

SEQ ID NO: 386542 - DNA, 730 bp, Homo Sapiens; identical to SEQ ID NO: 357792
  misc_feature (12)..(12): n is a, c, g, or t

SEQ ID NO: 386543 - DNA, 1054 bp, Homo Sapiens; identical to SEQ ID NO: 357794
  misc_feature (799)..(799): n is a, c, g, or t
  misc_feature (804)..(804): n is a, c, g, or t
  misc_feature (863)..(863): n is a, c, g, or t
  misc_feature (867)..(867): n is a, c, g, or t
  misc_feature (882)..(882): n is a, c, g, or t
  misc_feature (888)..(888): n is a, c, g, or t
  misc_feature (892)..(892): n is a, c, g, or t
  misc_feature (952)..(952): n is a, c, g, or t
  misc_feature (991)..(991): n is a, c, g, or t
  misc_feature (1003)..(1003): n is a, c, g, or t
  misc_feature (1005)..(1005): n is a, c, g, or t
  misc_feature (1013)..(1013): n is a, c, g, or t
  misc_feature (1018)..(1018): n is a, c, g, or t
  misc_feature (1026)..(1026): n is a, c, g, or t
  misc_feature (1031)..(1031): n is a, c, g, or t
  misc_feature (1050)..(1050): n is a, c, g, or t

SEQ ID NO: 386544 - DNA, 1501 bp, Homo Sapiens; identical to SEQ ID NO: 357795
  misc_feature (922)..(922): n is a, c, g, or t

SEQ ID NO: 386545 - DNA, 1794 bp, Homo Sapiens; identical to SEQ ID NO: 357797
  misc_feature (302)..(302): n is a, c, g, or t
  misc_feature (1092)..(1093): n is a, c, g, or t
  misc_feature (1096)..(1097): n is a, c, g, or t
  misc_feature (1192)..(1192): n is a, c, g, or t
  misc_feature (1250)..(1250): n is a, c, g, or t
  misc_feature (1439)..(1439): n is a, c, g, or t
  misc_feature (1452)..(1452): n is a, c, g, or t
  misc_feature (1520)..(1520): n is a, c, g, or t
  misc_feature (1564)..(1564): n is a, c, g, or t
  misc_feature (1625)..(1625): n is a, c, g, or t
  misc_feature (1629)..(1629): n is a, c, g, or t
  misc_feature (1668)..(1669): n is a, c, g, or t
  misc_feature (1680)..(1680): n is a, c, g, or t
  misc_feature (1694)..(1694): n is a, c, g, or t
  misc_feature (1698)..(1698): n is a, c, g, or t
  misc_feature (1718)..(1718): n is a, c, g, or t
  misc_feature (1740)..(1740): n is a, c, g, or t
  misc_feature (1750)..(1750): n is a, c, g, or t
  misc_feature (1752)..(1752): n is a, c, g, or t
  misc_feature (1758)..(1758): n is a, c, g, or t
  misc_feature (1761)..(1761): n is a, c, g, or t
  misc_feature (1770)..(1770): n is a, c, g, or t
  misc_feature (1775)..(1775): n is a, c, g, or t
  misc_feature (1791)..(1791): n is a, c, g, or t

SEQ ID NO: 386546 - DNA, 1625 bp, Homo Sapiens; identical to SEQ ID NO: 357798

SEQ ID NO: 386547 - DNA, 1837 bp, Homo Sapiens; identical to SEQ ID NO: 357799
  misc_feature (1094)..(1121): n is a, c, g, or t

SEQ ID NO: 386548 - DNA, 881 bp, Homo Sapiens; identical to SEQ ID NO: 357800

SEQ ID NO: 386549 - DNA, 881 bp, Homo Sapiens; identical to SEQ ID NO: 357805

SEQ ID NO: 386550 - DNA, 1402 bp, Homo Sapiens; identical to SEQ ID NO: 357806
  misc_feature (824)..(824): n is a, c, g, or t

SEQ ID NO: 386551 - DNA, 811 bp, Homo Sapiens; identical to SEQ ID NO: 357809

SEQ ID NO: 386552 - DNA, 1500 bp, Homo Sapiens; identical to SEQ ID NO: 357810
  misc_feature (92)..(140): n is a, c, g, or t

SEQ ID NO: 386553 - DNA, 945 bp, Homo Sapiens; identical to SEQ ID NO: 357811

SEQ ID NO: 386554 - DNA, 763 bp, Homo Sapiens; identical to SEQ ID NO: 357812
  misc_feature (484)..(516): n is a, c, g, or t

SEQ ID NO: 386555 - DNA, 2048 bp, Homo Sapiens; identical to SEQ ID NO: 357813
  misc_feature (456)..(465): n is a, c, g, or t
  misc_feature (1358)..(1394): n is a, c, g, or t
  misc_feature (1724)..(1724): n is a, c, g, or t

SEQ ID NO: 386556 - DNA, 1528 bp, Homo Sapiens; identical to SEQ ID NO: 357815
  misc_feature (605)..(613): n is a, c, g, or t

SEQ ID NO: 386557 - DNA, 261 bp, Homo Sapiens; identical to SEQ ID NO: 357816

SEQ ID NO: 386558 - DNA, 438 bp, Homo Sapiens; identical to SEQ ID NO: 357821

SEQ ID NO: 386559 - DNA, 903 bp, Homo Sapiens; identical to SEQ ID NO: 357822
  misc_feature (718)..(718): n is a, c, g, or t
  misc_feature (799)..(799): n is a, c, g, or t
  misc_feature (812)..(812): n is a, c, g, or t
  misc_feature (846)..(846): n is a, c, g, or t
  misc_feature (871)..(871): n is a, c, g, or t

SEQ ID NO: 386560 - DNA, 476 bp, Homo Sapiens; identical to SEQ ID NO: 357823
  misc_feature (21)..(21): n is a, c, g, or t
  misc_feature (44)..(44): n is a, c, g, or t
  misc_feature (60)..(60): n is a, c, g, or t
  misc_feature (82)..(82): n is a, c, g, or t

SEQ ID NO: 386561 - DNA, 2800 bp, Homo Sapiens; identical to SEQ ID NO: 357824

SEQ ID NO: 386562 - DNA, 1590 bp, Homo Sapiens; identical to SEQ ID NO: 357827

SEQ ID NO: 386563 - DNA, 1026 bp, Homo Sapiens; identical to SEQ ID NO: 357828

SEQ ID NO: 386564 - DNA, 2303 bp, Homo Sapiens; identical to SEQ ID NO: 357830
  misc_feature (1365)..(1365): n is a, c, g, or t
  misc_feature (1451)..(1451): n is a, c, g, or t

SEQ ID NO: 386565 - DNA, 886 bp, Homo Sapiens; identical to SEQ ID NO: 357831

SEQ ID NO: 386566 - DNA, 933 bp, Homo Sapiens; identical to SEQ ID NO: 357832

SEQ ID NO: 386567 - DNA, 457 bp, Homo Sapiens; identical to SEQ ID NO: 357833
  misc_feature (414)..(414): n is a, c, g, or t

SEQ ID NO: 386568 - DNA, 1775 bp, Homo Sapiens; identical to SEQ ID NO: 357837
  misc_feature (60)..(74): n is a, c, g, or t
  misc_feature (90)..(279): n is a, c, g, or t
  misc_feature (1367)..(1377): n is a, c, g, or t

SEQ ID NO: 386569 - DNA, 412 bp, Homo Sapiens; identical to SEQ ID NO: 357838
  misc_feature (22)..(22): n is a, c, g, or t
  misc_feature (33)..(33): n is a, c, g, or t
  misc_feature (156)..(156): n is a, c, g, or t
  misc_feature (195)..(195): n is a, c, g, or t

SEQ ID NO: 386570 - DNA, 1020 bp, Homo Sapiens; identical to SEQ ID NO: 357847
  misc_feature (900)..(900): n is a, c, g, or t
  misc_feature (918)..(919): n is a, c, g, or t
  misc_feature (921)..(921): n is a, c, g, or t
  misc_feature (980)..(980): n is a, c, g, or t
  misc_feature (985)..(986): n is a, c, g, or t
  misc_feature (995)..(997): n is a, c, g, or t
  misc_feature (999)..(999): n is a, c, g, or t
  misc_feature (1010)..(1010): n is a, c, g, or t
  misc_feature (1013)..(1014): n is a, c, g, or t

SEQ ID NO: 386571 - DNA, 1144 bp, Homo Sapiens; identical to SEQ ID NO: 357848

SEQ ID NO: 386572 - DNA, 1053 bp, Homo Sapiens; identical to SEQ ID NO: 357853
  misc_feature (915)..(915): n is a, c, g, or t
  misc_feature (922)..(922): n is a, c, g, or t
  misc_feature (937)..(937): n is a, c, g, or t
  misc_feature (939)..(939): n is a, c, g, or t
  misc_feature (941)..(941): n is a, c, g, or t
  misc_feature (943)..(943): n is a, c, g, or t
  misc_feature (949)..(949): n is a, c, g, or t
  misc_feature (953)..(953): n is a, c, g, or t
  misc_feature (957)..(957): n is a, c, g, or t
  misc_feature (975)..(975): n is a, c, g, or t
  misc_feature (988)..(988): n is a, c, g, or t
  misc_feature (995)..(996): n is a, c, g, or t
  misc_feature (1003)..(1003): n is a, c, g, or t
  misc_feature (1006)..(1006): n is a, c, g, or t
  misc_feature (1015)..(1015): n is a, c, g, or t
  misc_feature (1028)..(1029): n is a, c, g, or t
  misc_feature (1038)..(1038): n is a, c, g, or t

SEQ ID NO: 386573 - DNA, 1204 bp, Homo Sapiens; identical to SEQ ID NO: 357854

SEQ ID NO: 386574 - DNA, 1133 bp, Homo Sapiens; identical to SEQ ID NO: 357855

SEQ ID NO: 386575 - DNA, 1697 bp, Homo Sapiens; identical to SEQ ID NO: 357856
  misc_feature (1620)..(1620): n is a, c, g, or t

SEQ ID NO: 386576 - DNA, 1578 bp, Homo Sapiens; identical to SEQ ID NO: 357857
  misc_feature (294)..(349): n is a, c, g, or t
  misc_feature (557)..(565): n is a, c, g, or t
  misc_feature (1195)..(1477): n is a, c, g, or t
  misc_feature (1491)..(1492): n is a, c, g, or t
  misc_feature (1500)..(1500): n is a, c, g, or t
  misc_feature (1509)..(1509): n is a, c, g, or t
  misc_feature (1520)..(1521): n is a, c, g, or t
  misc_feature (1526)..(1526): n is a, c, g, or t
  misc_feature (1534)..(1534): n is a, c, g, or t
  misc_feature (1539)..(1539): n is a, c, g, or t
  misc_feature (1547)..(1547): n is a, c, g, or t
  misc_feature (1554)..(1554): n is a, c, g, or t
  misc_feature (1560)..(1560): n is a, c, g, or t
  misc_feature (1562)..(1562): n is a, c, g, or t
  misc_feature (1565)..(1565): n is a, c, g, or t
  misc_feature (1573)..(1573): n is a, c, g, or t

SEQ ID NO: 386577 - DNA, 465 bp, Homo Sapiens; identical to SEQ ID NO: 357858
  misc_feature (109)..(194): n is a, c, g, or t

SEQ ID NO: 386578 - DNA, 1499 bp, Homo Sapiens; identical to SEQ ID NO: 357861
  misc_feature (482)..(482): n is a, c, g, or t
  misc_feature (540)..(540): n is a, c, g, or t

SEQ ID NO: 386579 - DNA, 493 bp, Homo Sapiens; identical to SEQ ID NO: 357862

SEQ ID NO: 386580 - DNA, 229 bp, Homo Sapiens; identical to SEQ ID NO: 357864

SEQ ID NO: 386581 - DNA, 737 bp, Homo Sapiens; identical to SEQ ID NO: 357865
  misc_feature (521)..(571): n is a, c, g, or t
  misc_feature (646)..(646): n is a, c, g, or t
  misc_feature (697)..(697): n is a, c, g, or t

SEQ ID NO: 386582 - DNA, 1714 bp, Homo Sapiens; identical to SEQ ID NO: 357866
  misc_feature (84)..(123): n is a, c, g, or t
  misc_feature (160)..(160): n is a, c, g, or t
  misc_feature (207)..(253): n is a, c, g, or t
  misc_feature (301)..(363): n is a, c, g, or t
  misc_feature (385)..(438): n is a, c, g, or t
  misc_feature (666)..(666): n is a, c, g, or t
  misc_feature (931)..(931): n is a, c, g, or t
  misc_feature (1252)..(1299): n is a, c, g, or t

SEQ ID NO: 386583 - DNA, 688 bp, Homo Sapiens; identical to SEQ ID NO: 357867
  misc_feature (69)..(105): n is a, c, g, or t

SEQ ID NO: 386584 - DNA, 1737 bp, Homo Sapiens; identical to SEQ ID NO: 357870
  misc_feature (1239)..(1239): n is a, c, g, or t
  misc_feature (1377)..(1377): n is a, c, g, or t
  misc_feature (1397)..(1397): n is a, c, g, or t
  misc_feature (1418)..(1418): n is a, c, g, or t
  misc_feature (1515)..(1515): n is a, c, g, or t
  misc_feature (1558)..(1582): n is a, c, g, or t
  misc_feature (1653)..(1653): n is a, c, g, or t
  misc_feature (1677)..(1677): n is a, c, g, or t
  misc_feature (1694)..(1696): n is a, c, g, or t
  misc_feature (1705)..(1707): n is a, c, g, or t
  misc_feature (1709)..(1709): n is a, c, g, or t
  misc_feature (1715)..(1715): n is a, c, g, or t
  misc_feature (1720)..(1720): n is a, c, g, or t

SEQ ID NO: 386585 - DNA, 885 bp, Homo Sapiens; identical to SEQ ID NO: 357871

SEQ ID NO: 386586 - DNA, 979 bp, Homo Sapiens; identical to SEQ ID NO: 357872

SEQ ID NO: 386587 - DNA, 2774 bp, Homo Sapiens; identical to SEQ ID NO: 357874
  misc_feature (115)..(149): n is a, c, g, or t
  misc_feature (232)..(232): n is a, c, g, or t
  misc_feature (2287)..(2287): n is a, c, g, or t
  misc_feature (2667)..(2693): n is a, c, g, or t

SEQ ID NO: 386588 - DNA, 875 bp, Homo Sapiens; identical to SEQ ID NO: 357875

SEQ ID NO: 386589 - DNA, 1502 bp, Homo Sapiens; identical to SEQ ID NO: 357879
  misc_feature (28)..(28): n is a, c, g, or t
  misc_feature (88)..(88): n is a, c, g, or t
  misc_feature (91)..(91): n is a, c, g, or t
  misc_feature (285)..(285): n is a, c, g, or t
  misc_feature (1337)..(1339): n is a, c, g, or t
  misc_feature (1341)..(1342): n is a, c, g, or t
  misc_feature (1345)..(1353): n is a, c, g, or t

SEQ ID NO: 386590 - DNA, 959 bp, Homo Sapiens; identical to SEQ ID NO: 357880
  misc_feature (3)..(3): n is a, c, g, or t
  misc_feature (8)..(8): n is a, c, g, or t
  misc_feature (90)..(90): n is a, c, g, or t
  misc_feature (197)..(259): n is a, c, g, or t

SEQ ID NO: 386591 - DNA, 1970 bp, Homo Sapiens; identical to SEQ ID NO: 357884
  misc_feature (434)..(434): n is a, c, g, or t
  misc_feature (439)..(440): n is a, c, g, or t
  misc_feature (447)..(447): n is a, c, g, or t
  misc_feature (453)..(453): n is a, c, g, or t
  misc_feature (462)..(462): n is a, c, g, or t
  misc_feature (465)..(465): n is a, c, g, or t
  misc_feature (467)..(467): n is a, c, g, or t
  misc_feature (471)..(471): n is a, c, g, or t
  misc_feature (475)..(475): n is a, c, g, or t
  misc_feature (477)..(477): n is a, c, g, or t
  misc_feature (481)..(481): n is a, c, g, or t
  misc_feature (483)..(483): n is a, c, g, or t
  misc_feature (502)..(502): n is a, c, g, or t

SEQ ID NO: 386592 - DNA, 1098 bp, Homo Sapiens; identical to SEQ ID NO: 357885
  misc_feature (36)..(36): n is a, c, g, or t
  misc_feature (42)..(42): n is a, c, g, or t
  misc_feature (51)..(51): n is a, c, g, or t
  misc_feature (54)..(54): n is a, c, g, or t
  misc_feature (62)..(62): n is a, c, g, or t
  misc_feature (65)..(65): n is a, c, g, or t
  misc_feature (73)..(75): n is a, c, g, or t
  misc_feature (124)..(125): n is a, c, g, or t
  misc_feature (155)..(155): n is a, c, g, or t
  misc_feature (447)..(447): n is a, c, g, or t
  misc_feature (456)..(456): n is a, c, g, or t
  misc_feature (474)..(490): n is a, c, g, or t
  misc_feature (1078)..(1078): n is a, c, g, or t

SEQ ID NO: 386593 - DNA, 1468 bp, Homo Sapiens; identical to SEQ ID NO: 357886
  misc_feature (265)..(317): n is a, c, g, or t
  misc_feature (642)..(669): n is a, c, g, or t
  misc_feature (892)..(892): n is a, c, g, or t
  misc_feature (1299)..(1317): n is a, c, g, or t

SEQ ID NO: 386594 - DNA, 804 bp, Homo Sapiens; identical to SEQ ID NO: 357888

SEQ ID NO: 386595 - DNA, 608 bp, Homo Sapiens; identical to SEQ ID NO: 357889
  misc_feature (539)..(539): n is a, c, g, or t
  misc_feature (553)..(553): n is a, c, g, or t

SEQ ID NO: 386596 - DNA, 994 bp, Homo Sapiens; identical to SEQ ID NO: 357890

SEQ ID NO: 386597 - DNA, 1083 bp, Homo Sapiens; identical to SEQ ID NO: 357891
  misc_feature (64)..(180): n is a, c, g, or t

SEQ ID NO: 386598 - DNA, 494 bp, Homo Sapiens; identical to SEQ ID NO: 357895

SEQ ID NO: 386599 - DNA, 1343 bp, Homo Sapiens; identical to SEQ ID NO: 357896
  misc_feature (1175)..(1175): n is a, c, g, or t
  misc_feature (1191)..(1191): n is a, c, g, or t

SEQ ID NO: 386600 - DNA, 1364 bp, Homo Sapiens; identical to SEQ ID NO: 357907
  misc_feature (18)..(18): n is a, c, g, or t
  misc_feature (26)..(26): n is a, c, g, or t
  misc_feature (30)..(30): n is a, c, g, or t
  misc_feature (39)..(39): n is a, c, g, or t
  misc_feature (47)..(48): n is a, c, g, or t
  misc_feature (57)..(58): n is a, c, g, or t
  misc_feature (66)..(66): n is a, c, g, or t
  misc_feature (80)..(81): n is a, c, g, or t
  misc_feature (99)..(99): n is a, c, g, or t
  misc_feature (111)..(111): n is a, c, g, or t
  misc_feature (113)..(113): n is a, c, g, or t
  misc_feature (115)..(116): n is a, c, g, or t
  misc_feature (137)..(137): n is a, c, g, or t
  misc_feature (170)..(170): n is a, c, g, or t
  misc_feature (176)..(176): n is a, c, g, or t
  misc_feature (192)..(192): n is a, c, g, or t
  misc_feature (486)..(495): n is a, c, g, or t

SEQ ID NO: 386601 - DNA, 871 bp, Homo Sapiens; identical to SEQ ID NO: 357908
  misc_feature (283)..(283): n is a, c, g, or t
  misc_feature (350)..(350): n is a, c, g, or t
  misc_feature (376)..(376): n is a, c, g, or t
  misc_feature (461)..(461): n is a, c, g, or t
  misc_feature (490)..(490): n is a, c, g, or t
  misc_feature (494)..(494): n is a, c, g, or t
  misc_feature (497)..(497): n is a, c, g, or t

SEQ ID NO: 386602 - DNA, 904 bp, Homo Sapiens; identical to SEQ ID NO: 357919
  misc_feature (19)..(19): n is a, c, g, or t
  misc_feature (899)..(899): n is a, c, g, or t

SEQ ID NO: 386603 - DNA, 538 bp, Homo Sapiens; identical to SEQ ID NO: 357920
  misc_feature (110)..(133): n is a, c, g, or t

SEQ ID NO: 386604 - DNA, 1296 bp, Homo Sapiens; identical to SEQ ID NO: 357922
  misc_feature (1192)..(1192): n is a, c, g, or t
  misc_feature (1258)..(1258): n is a, c, g, or t
  misc_feature (1280)..(1280): n is a, c, g, or t
  misc_feature (1285)..(1285): n is a, c, g, or t
  misc_feature (1288)..(1288): n is a, c, g, or t

SEQ ID NO: 386605 - DNA, 3038 bp, Homo Sapiens; identical to SEQ ID NO: 357923

SEQ ID NO: 386606 - DNA, 654 bp, Homo Sapiens; identical to SEQ ID NO: 357924

SEQ ID NO: 386607 - DNA, 713 bp, Homo Sapiens; identical to SEQ ID NO: 357925

SEQ ID NO: 386608 - DNA, 173 bp, Homo Sapiens; identical to SEQ ID NO: 357926

SEQ ID NO: 386609 - DNA, 1721 bp, Homo Sapiens; identical to SEQ ID NO: 357928
  misc_feature (1328)..(1340): n is a, c, g, or t

SEQ ID NO: 386610 - DNA, 360 bp, Homo Sapiens; identical to SEQ ID NO: 357929
  misc_feature (65)..(65): n is a, c, g, or t
  misc_feature (149)..(149): n is a, c, g, or t
  misc_feature (177)..(177): n is a, c, g, or t
  misc_feature (184)..(184): n is a, c, g, or t

SEQ ID NO: 386611 - DNA, 1483 bp, Homo Sapiens; identical to SEQ ID NO: 357930

SEQ ID NO: 386612 - DNA, 467 bp, Homo Sapiens; identical to SEQ ID NO: 357931
  misc_feature (441)..(441): n is a, c, g, or t

SEQ ID NO: 386613 - DNA, 1448 bp, Homo Sapiens; identical to SEQ ID NO: 357934

SEQ ID NO: 386614 - DNA, 482 bp, Homo Sapiens; identical to SEQ ID NO: 357935
  misc_feature (28)..(28): n is a, c, g, or t
  misc_feature (36)..(36): n is a, c, g, or t
  misc_feature (56)..(56): n is a, c, g, or t
  misc_feature (94)..(94): n is a, c, g, or t

SEQ ID NO: 386615 - DNA, 736 bp, Homo Sapiens; identical to SEQ ID NO: 357937

SEQ ID NO: 386616 - DNA, 3744 bp, Homo Sapiens; identical to SEQ ID NO: 357938
  misc_feature (43)..(79): n is a, c, g, or t
  misc_feature (3040)..(3146): n is a, c, g, or t

SEQ ID NO: 386617 - DNA, 655 bp, Homo Sapiens; identical to SEQ ID NO: 357939

SEQ ID NO: 386618 - DNA, 896 bp, Homo Sapiens; identical to SEQ ID NO: 357940

SEQ ID NO: 386619 - DNA, 1291 bp, Homo Sapiens; identical to SEQ ID NO: 357941
  misc_feature (1253)..(1253): n is a, c, g, or t

SEQ ID NO: 386620 - DNA, 1318 bp, Homo Sapiens; identical to SEQ ID NO: 357943

SEQ ID NO: 386621 - DNA, 488 bp, Homo Sapiens; identical to SEQ ID NO: 357944
  misc_feature (19)..(19): n is a, c, g, or t
  misc_feature (46)..(47): n is a, c, g, or t
  misc_feature (71)..(71): n is a, c, g, or t
  misc_feature (77)..(77): n is a, c, g, or t
  misc_feature (93)..(93): n is a, c, g, or t

SEQ ID NO: 386622 - DNA, 1156 bp, Homo Sapiens; identical to SEQ ID NO: 357945
  misc_feature (8)..(9): n is a, c, g, or t
  misc_feature (15)..(15): n is a, c, g, or t
  misc_feature (26)..(26): n is a, c, g, or t
  misc_feature (33)..(33): n is a, c, g, or t
  misc_feature (48)..(48): n is a, c, g, or t
  misc_feature (71)..(71): n is a, c, g, or t
  misc_feature (76)..(76): n is a, c, g, or t
  misc_feature (85)..(86): n is a, c, g, or t
  misc_feature (92)..(92): n is a, c, g, or t
  misc_feature (125)..(125): n is a, c, g, or t
  misc_feature (166)..(166): n is a, c, g, or t
  misc_feature (170)..(288): n is a, c, g, or t
  misc_feature (451)..(466): n is a, c, g, or t

SEQ ID NO: 386623 - DNA, 1841 bp, Homo Sapiens; identical to SEQ ID NO: 357946
  misc_feature (230)..(245): n is a, c, g, or t
  misc_feature (1709)..(1722): n is a, c, g, or t

SEQ ID NO: 386624 - DNA, 1239 bp, Homo Sapiens; identical to SEQ ID NO: 357950

SEQ ID NO: 386625 - DNA, 1233 bp, Homo Sapiens; identical to SEQ ID NO: 357951
  misc_feature (50)..(82): n is a, c, g, or t
  misc_feature (748)..(846): n is a, c, g, or t
  misc_feature (899)..(1000): n is a, c, g, or t
  misc_feature (1003)..(1023): n is a, c, g, or t
  misc_feature (1097)..(1150): n is a, c, g, or t
  misc_feature (1172)..(1192): n is a, c, g, or t

SEQ ID NO: 386626 - DNA, 819 bp, Homo Sapiens; identical to SEQ ID NO: 357952

SEQ ID NO: 386627 - DNA, 360 bp, Homo Sapiens; identical to SEQ ID NO: 357953

SEQ ID NO: 386628 - DNA, 836 bp, Homo Sapiens; identical to SEQ ID NO: 357958
  misc_feature (217)..(217): n is a, c, g, or t
  misc_feature (788)..(796): n is a, c, g, or t

SEQ ID NO: 386629 - DNA, 1215 bp, Homo Sapiens; identical to SEQ ID NO: 357959
  misc_feature (86)..(122): n is a, c, g, or t

SEQ ID NO: 386630 - DNA, 1314 bp, Homo Sapiens; identical to SEQ ID NO: 357961
  misc_feature (667)..(686): n is a, c, g, or t
  misc_feature (697)..(697): n is a, c, g, or t
  misc_feature (706)..(706): n is a, c, g, or t
  misc_feature (713)..(713): n is a, c, g, or t
  misc_feature (741)..(742): n is a, c, g, or t
  misc_feature (753)..(753): n is a, c, g, or t
  misc_feature (759)..(759): n is a, c, g, or t
  misc_feature (765)..(766): n is a, c, g, or t
  misc_feature (772)..(772): n is a, c, g, or t
  misc_feature (774)..(774): n is a, c, g, or t
  misc_feature (779)..(779): n is a, c, g, or t
  misc_feature (781)..(782): n is a, c, g, or t
  misc_feature (785)..(785): n is a, c, g, or t
  misc_feature (791)..(792): n is a, c, g, or t
  misc_feature (795)..(797): n is a, c, g, or t
  misc_feature (804)..(804): n is a, c, g, or t
  misc_feature (807)..(807): n is a, c, g, or t
  misc_feature (810)..(811): n is a, c, g, or t
  misc_feature (815)..(815): n is a, c, g, or t
  misc_feature (818)..(818): n is a, c, g, or t
  misc_feature (821)..(821): n is a, c, g, or t
  misc_feature (828)..(828): n is a, c, g, or t
  misc_feature (833)..(833): n is a, c, g, or t
  misc_feature (836)..(837): n is a, c, g, or t
  misc_feature (856)..(856): n is a, c, g, or t
  misc_feature (860)..(860): n is a, c, g, or t
  misc_feature (911)..(911): n is a, c, g, or t
  misc_feature (941)..(941): n is a, c, g, or t
  misc_feature (956)..(957): n is a, c, g, or t
  misc_feature (960)..(960): n is a, c, g, or t
  misc_feature (972)..(972): n is a, c, g, or t
  misc_feature (999)..(999): n is a, c, g, or t
  misc_feature (1012)..(1012): n is a, c, g, or t

SEQ ID NO: 386631 - DNA, 1115 bp, Homo Sapiens; identical to SEQ ID NO: 357962
  misc_feature (369)..(383): n is a, c, g, or t
  misc_feature (974)..(974): n is a, c, g, or t
  misc_feature (1024)..(1024): n is a, c, g, or t
  misc_feature (1053)..(1053): n is a, c, g, or t
  misc_feature (1055)..(1055): n is a, c, g, or t
  misc_feature (1062)..(1062): n is a, c, g, or t
  misc_feature (1086)..(1086): n is a, c, g, or t

SEQ ID NO: 386632 - DNA, 1035 bp, Homo Sapiens; identical to SEQ ID NO: 357963
  misc_feature (758)..(758): n is a, c, g, or t
  misc_feature (931)..(931): n is a, c, g, or t
  misc_feature (935)..(935): n is a, c, g, or t
  misc_feature (965)..(965): n is a, c, g, or t
  misc_feature (978)..(979): n is a, c, g, or t
  misc_feature (995)..(995): n is a, c, g, or t
  misc_feature (1007)..(1008): n is a, c, g, or t
  misc_feature (1011)..(1011): n is a, c, g, or t
  misc_feature (1013)..(1013): n is a, c, g, or t
  misc_feature (1015)..(1015): n is a, c, g, or t
  misc_feature (1019)..(1019): n is a, c, g, or t

SEQ ID NO: 386633 - DNA, 961 bp, Homo Sapiens; identical to SEQ ID NO: 357964

SEQ ID NO: 386634 - DNA, 1771 bp, Homo Sapiens; identical to SEQ ID NO: 357966
  misc_feature (555)..(606): n is a, c, g, or t
  misc_feature (1173)..(1173): n is a, c, g, or t
  misc_feature (1197)..(1197): n is a, c, g, or t
  misc_feature (1213)..(1213): n is a, c, g, or t
  misc_feature (1231)..(1231): n is a, c, g, or t
  misc_feature (1335)..(1335): n is a, c, g, or t
  misc_feature (1362)..(1362): n is a, c, g, or t
  misc_feature (1379)..(1379): n is a, c, g, or t
  misc_feature (1386)..(1386): n is a, c, g, or t
  misc_feature (1388)..(1388): n is a, c, g, or t
  misc_feature (1401)..(1401): n is a, c, g, or t
  misc_feature (1405)..(1405): n is a, c, g, or t
  misc_feature (1411)..(1411): n is a, c, g, or t
  misc_feature (1442)..(1442): n is a, c, g, or t
  misc_feature (1509)..(1509): n is a, c, g, or t
  misc_feature (1654)..(1654): n is a, c, g, or t
  misc_feature (1686)..(1686): n is a, c, g, or t

SEQ ID NO: 386635 - DNA, 1429 bp, Homo Sapiens; identical to SEQ ID NO: 357967
  misc_feature (47)..(47): n is a, c, g, or t
  misc_feature (49)..(49): n is a, c, g, or t
  misc_feature (1042)..(1042): n is a, c, g, or t
  misc_feature (1108)..(1116): n is a, c, g, or t
  misc_feature (1295)..(1304): n is a, c, g, or t

SEQ ID NO: 386636 - DNA, 794 bp, Homo Sapiens; identical to SEQ ID NO: 357968

SEQ ID NO: 386637 - DNA, 1056 bp, Homo Sapiens; identical to SEQ ID NO: 357969
  misc_feature (953)..(953): n is a, c, g, or t
  misc_feature (956)..(956): n is a, c, g, or t
  misc_feature (972)..(972): n is a, c, g, or t
  misc_feature (975)..(975): n is a, c, g, or t
  misc_feature (979)..(979): n is a, c, g, or t
  misc_feature (981)..(981): n is a, c, g, or t
  misc_feature (983)..(983): n is a, c, g, or t
  misc_feature (989)..(989): n is a, c, g, or t
  misc_feature (992)..(992): n is a, c, g, or t
  misc_feature (994)..(994): n is a, c, g, or t
  misc_feature (998)..(998): n is a, c, g, or t
  misc_feature (1009)..(1009): n is a, c, g, or t
  misc_feature (1012)..(1013): n is a, c, g, or t
  misc_feature (1024)..(1024): n is a, c, g, or t
  misc_feature (1029)..(1029): n is a, c, g, or t
  misc_feature (1034)..(1034): n is a, c, g, or t
  misc_feature (1037)..(1037): n is a, c, g, or t
  misc_feature (1044)..(1045): n is a, c, g, or t
  misc_feature (1050)..(1050): n is a, c, g, or t

SEQ ID NO: 386638 - DNA, 1038 bp, Homo Sapiens; identical to SEQ ID NO: 357970
  misc_feature (876)..(876): n is a, c, g, or t
  misc_feature (968)..(968): n is a, c, g, or t

SEQ ID NO: 386639 - DNA, 892 bp, Homo Sapiens; identical to SEQ ID NO: 357978
  misc_feature (12)..(13): n is a, c, g, or t
  misc_feature (66)..(66): n is a, c, g, or t
  misc_feature (92)..(92): n is a, c, g, or t
  misc_feature (104)..(104): n is a, c, g, or t
  misc_feature (107)..(107): n is a, c, g, or t
  misc_feature (112)..(112): n is a, c, g, or t
  misc_feature (152)..(152): n is a, c, g, or t
  misc_feature (165)..(166): n is a, c, g, or t
  misc_feature (171)..(171): n is a, c, g, or t
  misc_feature (173)..(173): n is a, c, g, or t
  misc_feature (176)..(176): n is a, c, g, or t
  misc_feature (178)..(178): n is a, c, g, or t
  misc_feature (185)..(185): n is a, c, g, or t
  misc_feature (187)..(187): n is a, c, g, or t
  misc_feature (197)..(197): n is a, c, g, or t

SEQ ID NO: 386640 - DNA, 881 bp, Homo Sapiens; identical to SEQ ID NO: 357979

SEQ ID NO: 386641 - DNA, 1039 bp, Homo Sapiens; identical to SEQ ID NO: 357983
  misc_feature (12)..(12): n is a, c, g, or t
  misc_feature (20)..(20): n is a, c, g, or t
  misc_feature (32)..(32): n is a, c, g, or t
  misc_feature (38)..(38): n is a, c, g, or t
  misc_feature (46)..(46): n is a, c, g, or t
  misc_feature (51)..(51): n is a, c, g, or t
  misc_feature (60)..(61): n is a, c, g, or t
  misc_feature (66)..(66): n is a, c, g, or t
  misc_feature (73)..(73): n is a, c, g, or t
  misc_feature (75)..(75): n is a, c, g, or t
  misc_feature (77)..(77): n is a, c, g, or t
  misc_feature (81)..(81): n is a, c, g, or t
  misc_feature (88)..(88): n is a, c, g, or t
  misc_feature (110)..(110): n is a, c, g, or t
  misc_feature (119)..(119): n is a, c, g, or t
  misc_feature (127)..(127): n is a, c, g, or t
  misc_feature (133)..(133): n is a, c, g, or t
  misc_feature (151)..(151): n is a, c, g, or t
  misc_feature (167)..(167): n is a, c, g, or t
  misc_feature (174)..(174): n is a, c, g, or t
  misc_feature (176)..(176): n is a, c, g, or t
  misc_feature (190)..(190): n is a, c, g, or t
  misc_feature (193)..(193): n is a, c, g, or t
  misc_feature (195)..(195): n is a, c, g, or t
  misc_feature (197)..(197): n is a, c, g, or t
  misc_feature (201)..(201): n is a, c, g, or t
  misc_feature (206)..(206): n is a, c, g, or t
  misc_feature (210)..(210): n is a, c, g, or t
  misc_feature (217)..(217): n is a, c, g, or t
  misc_feature (219)..(219): n is a, c, g, or t
  misc_feature (226)..(226): n is a, c, g, or t
  misc_feature (232)..(232): n is a, c, g, or t
  misc_feature (240)..(240): n is a, c, g, or t
  misc_feature (258)..(258): n is a, c, g, or t
  misc_feature (264)..(264): n is a, c, g, or t
  misc_feature (266)..(266): n is a, c, g, or t
  misc_feature (284)..(284): n is a, c, g, or t
  misc_feature (293)..(293): n is a, c, g, or t
  misc_feature (308)..(308): n is a, c, g, or t
  misc_feature (327)..(327): n is a, c, g, or t
  misc_feature (353)..(353): n is a, c, g, or t
  misc_feature (359)..(359): n is a, c, g, or t
  misc_feature (385)..(385): n is a, c, g, or t
  misc_feature (533)..(533): n is a, c, g, or t
  misc_feature (536)..(536): n is a, c, g, or t

SEQ ID NO: 386642 - DNA, 402 bp, Homo Sapiens; identical to SEQ ID NO: 357984
  misc_feature (17)..(17): n is a, c, g, or t
  misc_feature (39)..(39): n is a, c, g, or t
  misc_feature (46)..(46): n is a, c, g, or t

SEQ ID NO: 386643 - DNA, 1111 bp, Homo Sapiens; identical to SEQ ID NO: 357994
  misc_feature (934)..(934): n is a, c, g, or t
  misc_feature (959)..(959): n is a, c, g, or t
  misc_feature (982)..(982): n is a, c, g, or t
  misc_feature (991)..(991): n is a, c, g, or t
  misc_feature (1003)..(1003): n is a, c, g, or t
  misc_feature (1006)..(1006): n is a, c, g, or t
  misc_feature (1008)..(1008): n is a, c, g, or t
  misc_feature (1020)..(1020): n is a, c, g, or t
  misc_feature (1043)..(1043): n is a, c, g, or t
  misc_feature (1050)..(1050): n is a, c, g, or t
  misc_feature (1072)..(1072): n is a, c, g, or t
  misc_feature (1075)..(1075): n is a, c, g, or t
  misc_feature (1083)..(1083): n is a, c, g, or t
  misc_feature (1089)..(1090): n is a, c, g, or t
  misc_feature (1106)..(1106): n is a, c, g, or t

SEQ ID NO: 386644 - DNA, 469 bp, Homo Sapiens; identical to SEQ ID NO: 357995
  misc_feature (51)..(51): n is a, c, g, or t
  misc_feature (94)..(94): n is a, c, g, or t
  misc_feature (139)..(139): n is a, c, g, or t
  misc_feature (192)..(192): n is a, c, g, or t

SEQ ID NO: 386645 - DNA, 1251 bp, Homo Sapiens; identical to SEQ ID NO: 358000
  misc_feature (50)..(327): n is a, c, g, or t
  misc_feature (331)..(339): n is a, c, g, or t
  misc_feature (516)..(516): n is a, c, g, or t
  misc_feature (522)..(522): n is a, c, g, or t
  misc_feature (526)..(526): n is a, c, g, or t
  misc_feature (530)..(530): n is a, c, g, or t
  misc_feature (539)..(540): n is a, c, g, or t
  misc_feature (542)..(542): n is a, c, g, or t
  misc_feature (550)..(550): n is a, c, g, or t
  misc_feature (556)..(556): n is a, c, g, or t
  misc_feature (566)..(566): n is a, c, g, or t
  misc_feature (569)..(569): n is a, c, g, or t
  misc_feature (572)..(572): n is a, c, g, or t
  misc_feature (577)..(577): n is a, c, g, or t
  misc_feature (580)..(580): n is a, c, g, or t
  misc_feature (582)..(582): n is a, c, g, or t
  misc_feature (586)..(586): n is a, c, g, or t
  misc_feature (588)..(588): n is a, c, g, or t
  misc_feature (624)..(641): n is a, c, g, or t
  misc_feature (646)..(646): n is a, c, g, or t
  misc_feature (655)..(655): n is a, c, g, or t
  misc_feature (678)..(678): n is a, c, g, or t
  misc_feature (682)..(682): n is a, c, g, or t
  misc_feature (689)..(689): n is a, c, g, or t
  misc_feature (695)..(695): n is a, c, g, or t
  misc_feature (699)..(699): n is a, c, g, or t
  misc_feature (702)..(702): n is a, c, g, or t
  misc_feature (704)..(705): n is a, c, g, or t
  misc_feature (713)..(714): n is a, c, g, or t
  misc_feature (716)..(775): n is a, c, g, or t
  misc_feature (777)..(777): n is a, c, g, or t
  misc_feature (794)..(808): n is a, c, g, or t
  misc_feature (831)..(831): n is a, c, g, or t
  misc_feature (844)..(844): n is a, c, g, or t
  misc_feature (849)..(849): n is a, c, g, or t
  misc_feature (861)..(861): n is a, c, g, or t
  misc_feature (863)..(863): n is a, c, g, or t
  misc_feature (884)..(887): n is a, c, g, or t
  misc_feature (896)..(896): n is a, c, g, or t
  misc_feature (899)..(899): n is a, c, g, or t
  misc_feature (915)..(915): n is a, c, g, or t
  misc_feature (923)..(923): n is a, c, g, or t
  misc_feature (930)..(930): n is a, c, g, or t
  misc_feature (940)..(940): n is a, c, g, or t
  misc_feature (981)..(981): n is a, c, g, or t
  misc_feature (1241)..(1241): n is a, c, g, or t
  misc_feature (1246)..(1247): n is a, c, g, or t

SEQ ID NO: 386646 - DNA, 458 bp, Homo Sapiens; identical to SEQ ID NO: 358001

SEQ ID NO: 386647 - DNA, 1029 bp, Homo Sapiens; identical to SEQ ID NO: 358002
  misc_feature (9)..(9): n is a, c, g, or t
  misc_feature (16)..(16): n is a, c, g, or t
  misc_feature (19)..(20): n is a, c, g, or t
  misc_feature (25)..(25): n is a, c, g, or t
  misc_feature (31)..(31): n is a, c, g, or t
  misc_feature (49)..(49): n is a, c, g, or t
  misc_feature (68)..(68): n is a, c, g, or t
  misc_feature (79)..(79): n is a, c, g, or t
  misc_feature (87)..(87): n is a, c, g, or t
  misc_feature (101)..(101): n is a, c, g, or t
  misc_feature (105)..(105): n is a, c, g, or t
  misc_feature (112)..(112): n is a, c, g, or t
  misc_feature (115)..(115): n is a, c, g, or t
  misc_feature (168)..(168): n is a, c, g, or t
  misc_feature (193)..(193): n is a, c, g, or t
  misc_feature (201)..(201): n is a, c, g, or t
  misc_feature (324)..(324): n is a, c, g, or t
  misc_feature (359)..(359): n is a, c, g, or t
  misc_feature (395)..(395): n is a, c, g, or t
  misc_feature (405)..(405): n is a, c, g, or t
  misc_feature (409)..(409): n is a, c, g, or t
  misc_feature (421)..(421): n is a, c, g, or t
  misc_feature (430)..(430): n is a, c, g, or t
  misc_feature (442)..(442): n is a, c, g, or t
  misc_feature (449)..(449): n is a, c, g, or t
  misc_feature (461)..(461): n is a, c, g, or t
  misc_feature (464)..(464): n is a, c, g, or t
  misc_feature (472)..(472): n is a, c, g, or t
  misc_feature (477)..(477): n is a, c, g, or t
  misc_feature (484)..(484): n is a, c, g, or t
  misc_feature (489)..(489): n is a, c, g, or t
  misc_feature (548)..(548): n is a, c, g, or t
  misc_feature (551)..(552): n is a, c, g, or t
  misc_feature (559)..(559): n is a, c, g, or t
  misc_feature (566)..(566): n is a, c, g, or t
  misc_feature (571)..(571): n is a, c, g, or t
  misc_feature (601)..(601): n is a, c, g, or t
  misc_feature (614)..(614): n is a, c, g, or t
  misc_feature (622)..(622): n is a, c, g, or t
  misc_feature (631)..(631): n is a, c, g, or t

SEQ ID NO: 386648 - DNA, 892 bp, Homo Sapiens; identical to SEQ ID NO: 358003

SEQ ID NO: 386649 - DNA, 2049 bp, Homo Sapiens; identical to SEQ ID NO: 358004
  misc_feature (1388)..(1430): n is a, c, g, or t

SEQ ID NO: 386650 - DNA, 528 bp, Homo Sapiens; identical to SEQ ID NO: 358005
  misc_feature (13)..(13): n is a, c, g, or t
  misc_feature (42)..(42): n is a, c, g, or t
  misc_feature (70)..(70): n is a, c, g, or t
  misc_feature (104)..(104): n is a, c, g, or t
  misc_feature (138)..(138): n is a, c, g, or t

SEQ ID NO: 386651 - DNA, 1615 bp, Homo Sapiens; identical to SEQ ID NO: 358010

SEQ ID NO: 386652 - DNA, 462 bp, Homo Sapiens; identical to SEQ ID NO: 358011
  misc_feature (13)..(13): n is a, c, g, or t
  misc_feature (31)..(31): n is a, c, g, or t
  misc_feature (37)..(37): n is a, c, g, or t
  misc_feature (46)..(46): n is a, c, g, or t
  misc_feature (60)..(60): n is a, c, g, or t
  misc_feature (75)..(75): n is a, c, g, or t
  misc_feature (89)..(89): n is a, c, g, or t
  misc_feature (118)..(118): n is a, c, g, or t
  misc_feature (168)..(168): n is a, c, g, or t

SEQ ID NO: 386653 - DNA, 1157 bp, Homo Sapiens; identical to SEQ ID NO: 358012
  misc_feature (2)..(2): n is a, c, g, or t
  misc_feature (5)..(5): n is a, c, g, or t
  misc_feature (14)..(14): n is a, c, g, or t
  misc_feature (17)..(18): n is a, c, g, or t
  misc_feature (20)..(20): n is a, c, g, or t
  misc_feature (23)..(23): n is a, c, g, or t
  misc_feature (26)..(26): n is a, c, g, or t
  misc_feature (29)..(29): n is a, c, g, or t
  misc_feature (35)..(35): n is a, c, g, or t
  misc_feature (41)..(43): n is a, c, g, or t
  misc_feature (53)..(53): n is a, c, g, or t
  misc_feature (69)..(70): n is a, c, g, or t
  misc_feature (89)..(89): n is a, c, g, or t
  misc_feature (93)..(93): n is a, c, g, or t
  misc_feature (123)..(123): n is a, c, g, or t
  misc_feature (1037)..(1112): n is a, c, g, or t
  misc_feature (1146)..(1146): n is a, c, g, or t

SEQ ID NO: 386654 - DNA, 1620 bp, Homo Sapiens; identical to SEQ ID NO: 358013
  misc_feature (331)..(373): n is a, c, g, or t

SEQ ID NO: 386655 - DNA, 1371 bp, Homo Sapiens; identical to SEQ ID NO: 358020
  misc_feature (242)..(242): n is a, c, g, or t
  misc_feature (250)..(250): n is a, c, g, or t
  misc_feature (265)..(265): n is a, c, g, or t
  misc_feature (428)..(428): n is a, c, g, or t
  misc_feature (435)..(435): n is a, c, g, or t
  misc_feature (438)..(438): n is a, c, g, or t
  misc_feature (455)..(456): n is a, c, g, or t
  misc_feature (479)..(479): n is a, c, g, or t
  misc_feature (493)..(493): n is a, c, g, or t
  misc_feature (500)..(500): n is a, c, g, or t
  misc_feature (525)..(525): n is a, c, g, or t
  misc_feature (535)..(535): n is a, c, g, or t
  misc_feature (553)..(553): n is a, c, g, or t
  misc_feature (560)..(561): n is a, c, g, or t
  misc_feature (575)..(575): n is a, c, g, or t
  misc_feature (581)..(584): n is a, c, g, or t
  misc_feature (591)..(591): n is a, c, g, or t
  misc_feature (600)..(601): n is a, c, g, or t
  misc_feature (606)..(606): n is a, c, g, or t
  misc_feature (609)..(610): n is a, c, g, or t
  misc_feature (614)..(615): n is a, c, g, or t
  misc_feature (621)..(632): n is a, c, g, or t
  misc_feature (643)..(647): n is a, c, g, or t
  misc_feature (650)..(650): n is a, c, g, or t
  misc_feature (654)..(654): n is a, c, g, or t
  misc_feature (658)..(658): n is a, c, g, or t
  misc_feature (661)..(662): n is a, c, g, or t
  misc_feature (668)..(668): n is a, c, g, or t
  misc_feature (671)..(675): n is a, c, g, or t
  misc_feature (678)..(678): n is a, c, g, or t
  misc_feature (682)..(682): n is a, c, g, or t
  misc_feature (684)..(684): n is a, c, g, or t
  misc_feature (687)..(687): n is a, c, g, or t
  misc_feature (708)..(708): n is a, c, g, or t

SEQ ID NO: 386656 - DNA, 896 bp, Homo Sapiens; identical to SEQ ID NO: 358021
  misc_feature (82)..(82): n is a, c, g, or t

SEQ ID NO: 386657 - DNA, 828 bp, Homo Sapiens; identical to SEQ ID NO: 358031
  misc_feature (27)..(27): n is a, c, g, or t
  misc_feature (56)..(56): n is a, c, g, or t
  misc_feature (76)..(76): n is a, c, g, or t
  misc_feature (80)..(80): n is a, c, g, or t
  misc_feature (103)..(103): n is a, c, g, or t
  misc_feature (132)..(132): n is a, c, g, or t
  misc_feature (134)..(134): n is a, c, g, or t
  misc_feature (136)..(136): n is a, c, g, or t
  misc_feature (157)..(157): n is a, c, g, or t
  misc_feature (191)..(191): n is a, c, g, or t
  misc_feature (211)..(211): n is a, c, g, or t
  misc_feature (228)..(228): n is a, c, g, or t
  misc_feature (248)..(249): n is a, c, g, or t
  misc_feature (268)..(268): n is a, c, g, or t
  misc_feature (283)..(284): n is a, c, g, or t
  misc_feature (290)..(290): n is a, c, g, or t
  misc_feature (296)..(296): n is a, c, g, or t
  misc_feature (298)..(298): n is a, c, g, or t
  misc_feature (302)..(302): n is a, c, g, or t
  misc_feature (305)..(306): n is a, c, g, or t
  misc_feature (310)..(310): n is a, c, g, or t
  misc_feature (316)..(316): n is a, c, g, or t
  misc_feature (337)..(337): n is a, c, g, or t
  misc_feature (339)..(342): n is a, c, g, or t
  misc_feature (453)..(453): n is a, c, g, or t
  misc_feature (462)..(462): n is a, c, g, or t
  misc_feature (468)..(468): n is a, c, g, or t
  misc_feature (478)..(479): n is a, c, g, or t
  misc_feature (481)..(481): n is a, c, g, or t
  misc_feature (483)..(487): n is a, c, g, or t
  misc_feature (527)..(527): n is a, c, g, or t
  misc_feature (533)..(533): n is a, c, g, or t
  misc_feature (535)..(535): n is a, c, g, or t
  misc_feature (544)..(544): n is a, c, g, or t
  misc_feature (550)..(580): n is a, c, g, or t
  misc_feature (583)..(583): n is a, c, g, or t
  misc_feature (588)..(590): n is a, c, g, or t
  misc_feature (594)..(595): n is a, c, g, or t
  misc_feature (665)..(665): n is a, c, g, or t
  misc_feature (704)..(704): n is a, c, g, or t
  misc_feature (718)..(718): n is a, c, g, or t
  misc_feature (725)..(725): n is a, c, g, or t
  misc_feature (728)..(728): n is a, c, g, or t
  misc_feature (742)..(742): n is a, c, g, or t
  misc_feature (744)..(746): n is a, c, g, or t
  misc_feature (756)..(756): n is a, c, g, or t
  misc_feature (767)..(767): n is a, c, g, or t
  misc_feature (772)..(772): n is a, c, g, or t
  misc_feature (777)..(777): n is a, c, g, or t
  misc_feature (793)..(793): n is a, c, g, or t
  misc_feature (816)..(816): n is a, c, g, or t
  misc_feature (828)..(828): n is a, c, g, or t

SEQ ID NO: 386658 - DNA, 2362 bp, Homo Sapiens; identical to SEQ ID NO: 358032
  misc_feature (157)..(179): n is a, c, g, or t
  misc_feature (289)..(344): n is a, c, g, or t
  misc_feature (1817)..(1828): n is a, c, g, or t
  misc_feature (2246)..(2259): n is a, c, g, or t

SEQ ID NO: 386659 - DNA, 1111 bp, Homo Sapiens; identical to SEQ ID NO: 358033

SEQ ID NO: 386660 - DNA, 937 bp, Homo Sapiens; identical to SEQ ID NO: 358034
  misc_feature (782)..(794): n is a, c, g, or t
  misc_feature (803)..(852): n is a, c, g, or t

SEQ ID NO: 386661 - DNA, 2204 bp, Homo Sapiens; identical to SEQ ID NO: 358041
  misc_feature (15)..(15): n is a, c, g, or t
  misc_feature (17)..(17): n is a, c, g, or t
  misc_feature (24)..(24): n is a, c, g, or t
  misc_feature (36)..(36): n is a, c, g, or t
  misc_feature (40)..(40): n is a, c, g, or t
  misc_feature (52)..(53): n is a, c, g, or t
  misc_feature (67)..(67): n is a, c, g, or t
  misc_feature (70)..(70): n is a, c, g, or t
  misc_feature (73)..(73): n is a, c, g, or t
  misc_feature (82)..(82): n is a, c, g, or t
  misc_feature (96)..(96): n is a, c, g, or t
  misc_feature (134)..(134): n is a, c, g, or t
  misc_feature (145)..(145): n is a, c, g, or t
  misc_feature (156)..(156): n is a, c, g, or t
  misc_feature (160)..(160): n is a, c, g, or t
  misc_feature (162)..(162): n is a, c, g, or t
  misc_feature (164)..(164): n is a, c, g, or t
  misc_feature (179)..(179): n is a, c, g, or t
  misc_feature (456)..(456): n is a, c, g, or t
  misc_feature (850)..(858): n is a, c, g, or t
  misc_feature (2126)..(2162): n is a, c, g, or t

SEQ ID NO: 386662 - DNA, 497 bp, Homo Sapiens; identical to SEQ ID NO: 358042

SEQ ID NO: 386663 - DNA, 2111 bp, Homo Sapiens; identical to SEQ ID NO: 358043
  misc_feature (23)..(23): n is a, c, g, or t
  misc_feature (908)..(960): n is a, c, g, or t
  misc_feature (1600)..(1600): n is a, c, g, or t
  misc_feature (1622)..(1623): n is a, c, g, or t

SEQ ID NO: 386664 - DNA, 533 bp, Homo Sapiens; identical to SEQ ID NO: 358044
  misc_feature (12)..(12): n is a, c, g, or t
  misc_feature (47)..(47): n is a, c, g, or t
  misc_feature (54)..(54): n is a, c, g, or t
  misc_feature (89)..(89): n is a, c, g, or t

SEQ ID NO: 386665 - DNA, 1067 bp, Homo Sapiens; identical to SEQ ID NO: 358045
  misc_feature (758)..(905): n is a, c, g, or t
  misc_feature (948)..(1003): n is a, c, g, or t

SEQ ID NO: 386666 - DNA, 824 bp, Homo Sapiens; identical to SEQ ID NO: 358046
  misc_feature (64)..(211): n is a, c, g, or t
  misc_feature (254)..(310): n is a, c, g, or t
  misc_feature (787)..(787): n is a, c, g, or t

SEQ ID NO: 386667 - DNA, 1648 bp, Homo Sapiens; identical to SEQ ID NO: 358056
  misc_feature (45)..(45): n is a, c, g, or t
  misc_feature (802)..(802): n is a, c, g, or t
  misc_feature (862)..(862): n is a, c, g, or t

SEQ ID NO: 386668 - DNA, 600 bp, Homo Sapiens; identical to SEQ ID NO: 358057
  misc_feature (37)..(37): n is a, c, g, or t
  misc_feature (52)..(52): n is a, c, g, or t
  misc_feature (101)..(101): n is a, c, g, or t

SEQ ID NO: 386669 - DNA, 1130 bp, Homo Sapiens; identical to SEQ ID NO: 358090

SEQ ID NO: 386670 - DNA, 1154 bp, Homo Sapiens; identical to SEQ ID NO: 358091

SEQ ID NO: 386671 - DNA, 442 bp, Homo Sapiens; identical to SEQ ID NO: 358092
  misc_feature (401)..(401): n is a, c, g, or t
  misc_feature (407)..(407): n is a, c, g, or t
  misc_feature (412)..(412): n is a, c, g, or t
  misc_feature (425)..(425): n is a, c, g, or t

SEQ ID NO: 386672 - DNA, 288 bp, Homo Sapiens; identical to SEQ ID NO: 358095
  misc_feature (263)..(263): n is a, c, g, or t

SEQ ID NO: 386673 - DNA, 1605 bp, Homo Sapiens; identical to SEQ ID NO: 358096
  misc_feature (98)..(131): n is a, c, g, or t
  misc_feature (889)..(928): n is a, c, g, or t
  misc_feature (1382)..(1426): n is a, c, g, or t

SEQ ID NO: 386674 - DNA, 967 bp, Homo Sapiens; identical to SEQ ID NO: 358105
  misc_feature (878)..(896): n is a, c, g, or t

SEQ ID NO: 386675 - DNA, 1258 bp, Homo Sapiens; identical to SEQ ID NO: 358106
  misc_feature (625)..(625): n is a, c, g, or t
  misc_feature (628)..(628): n is a, c, g, or t
  misc_feature (688)..(688): n is a, c, g, or t
  misc_feature (895)..(895): n is a, c, g, or t
  misc_feature (1107)..(1107): n is a, c, g, or t
  misc_feature (1145)..(1145): n is a, c, g, or t
  misc_feature (1160)..(1160): n is a, c, g, or t
  misc_feature (1246)..(1246): n is a, c, g, or t

SEQ ID NO: 386676 - DNA, 1503 bp, Homo Sapiens; identical to SEQ ID NO: 358110

SEQ ID NO: 386677 - DNA, 1242 bp, Homo Sapiens; identical to SEQ ID NO: 358111

SEQ ID NO: 386678 - DNA, 733 bp, Homo Sapiens; identical to SEQ ID NO: 358113
  misc_feature (470)..(470): n is a, c, g, or t

SEQ ID NO: 386679 - DNA, 1088 bp, Homo Sapiens; identical to SEQ ID NO: 358114

SEQ ID NO: 386680 - DNA, 666 bp, Homo Sapiens; identical to SEQ ID NO: 358117
  misc_feature (21)..(21): n is a, c, g, or t
  misc_feature (42)..(42): n is a, c, g, or t
  misc_feature (70)..(70): n is a, c, g, or t

SEQ ID NO: 386681 - DNA, 1691 bp, Homo Sapiens; identical to SEQ ID NO: 358118
  misc_feature (46)..(56): n is a, c, g, or t
  misc_feature (244)..(267): n is a, c, g, or t
  misc_feature (288)..(288): n is a, c, g, or t
  misc_feature (307)..(318): n is a, c, g, or t

SEQ ID NO: 386682 - DNA, 862 bp, Homo Sapiens; identical to SEQ ID NO: 358130

SEQ ID NO: 386683 - DNA, 1212 bp, Homo Sapiens; identical to SEQ ID NO: 358131
  misc_feature (791)..(791): n is a, c, g, or t
  misc_feature (872)..(872): n is a, c, g, or t

SEQ ID NO: 386684 - DNA, 2264 bp, Homo Sapiens; identical to SEQ ID NO: 358138
  misc_feature (130)..(255): n is a, c, g, or t
  misc_feature (1883)..(1885): n is a, c, g, or t
  misc_feature (2091)..(2091): n is a, c, g, or t
  misc_feature (2103)..(2103): n is a, c, g, or t
  misc_feature (2112)..(2112): n is a, c, g, or t
  misc_feature (2130)..(2130): n is a, c, g, or t
  misc_feature (2148)..(2148): n is a, c, g, or t
  misc_feature (2178)..(2178): n is a, c, g, or t
  misc_feature (2185)..(2185): n is a, c, g, or t
  misc_feature (2197)..(2197): n is a, c, g, or t
  misc_feature (2206)..(2206): n is a, c, g, or t
  misc_feature (2223)..(2223): n is a, c, g, or t
  misc_feature (2241)..(2241): n is a, c, g, or t
  misc_feature (2250)..(2250): n is a, c, g, or t

SEQ ID NO: 386685 - DNA, 1448 bp, Homo Sapiens; identical to SEQ ID NO: 358139
  misc_feature (152)..(169): n is a, c, g, or t

SEQ ID NO: 386686 - DNA, 520 bp, Homo Sapiens; identical to SEQ ID NO: 358153

SEQ ID NO: 386687 - DNA, 440 bp, Homo Sapiens; identical to SEQ ID NO: 358154

SEQ ID NO: 386688 - DNA, 1641 bp, Homo Sapiens; identical to SEQ ID NO: 358160

SEQ ID NO: 386689 - DNA, 1115 bp, Homo Sapiens; identical to SEQ ID NO: 358161

SEQ ID NO: 386690 - DNA, 1119 bp, Homo Sapiens; identical to SEQ ID NO: 358162

SEQ ID NO: 386691 - DNA, 1431 bp, Homo Sapiens; identical to SEQ ID NO: 358164
  misc_feature (166)..(222): n is a, c, g, or t

SEQ ID NO: 386692 - DNA, 957 bp, Homo Sapiens; identical to SEQ ID NO: 358165
  misc_feature (703)..(711): n is a, c, g, or t

SEQ ID NO: 386693 - DNA, 770 bp, Homo Sapiens; identical to SEQ ID NO: 358168
  misc_feature (14)..(14): n is a, c, g, or t

SEQ ID NO: 386694 - DNA, 1231 bp, Homo Sapiens; identical to SEQ ID NO: 358169
  misc_feature (34)..(34): n is a, c, g, or t
  misc_feature (583)..(591): n is a, c, g, or t
  misc_feature (1137)..(1137): n is a, c, g, or t

SEQ ID NO: 386695 - DNA, 2049 bp, Homo Sapiens; identical to SEQ ID NO: 358172
  misc_feature (1284)..(1284): n is a, c, g, or t

SEQ ID NO: 386696 - DNA, 521 bp, Homo Sapiens; identical to SEQ ID NO: 358173
  misc_feature (17)..(17): n is a, c, g, or t
  misc_feature (24)..(24): n is a, c, g, or t
  misc_feature (73)..(73): n is a, c, g, or t

SEQ ID NO: 386697 - DNA, 662 bp, Homo Sapiens; identical to SEQ ID NO: 358183

SEQ ID NO: 386698 - DNA, 447 bp, Homo Sapiens; identical to SEQ ID NO: 358184

SEQ ID NO: 386699 - DNA, 986 bp, Homo Sapiens; identical to SEQ ID NO: 358188
  misc_feature (740)..(740): n is a, c, g, or t
  misc_feature (750)..(751): n is a, c, g, or t
  misc_feature (828)..(828): n is a, c, g, or t
  misc_feature (832)..(832): n is a, c, g, or t
  misc_feature (843)..(843): n is a, c, g, or t
  misc_feature (847)..(847): n is a, c, g, or t
  misc_feature (853)..(853): n is a, c, g, or t
  misc_feature (858)..(875): n is a, c, g, or t

SEQ ID NO: 386700 - DNA, 503 bp, Homo Sapiens; identical to SEQ ID NO: 358189
  misc_feature (21)..(21): n is a, c, g, or t
  misc_feature (386)..(406): n is a, c, g, or t

SEQ ID NO: 386701 - DNA, 987 bp, Homo Sapiens; identical to SEQ ID NO: 358202

SEQ ID NO: 386702 - DNA, 1092 bp, Homo Sapiens; identical to SEQ ID NO: 358203
  misc_feature (352)..(385): n is a, c, g, or t

SEQ ID NO: 386703 - DNA, 1091 bp, Homo Sapiens; identical to SEQ ID NO: 358205

SEQ ID NO: 386704 - DNA, 1227 bp, Homo Sapiens; identical to SEQ ID NO: 358206

SEQ ID NO: 386705 - DNA, 1309 bp, Homo Sapiens; identical to SEQ ID NO: 358208

SEQ ID NO: 386706 - DNA, 1252 bp, Homo Sapiens; identical to SEQ ID NO: 358209
  misc_feature (83)..(83): n is a, c, g, or t
  misc_feature (429)..(545): n is a, c, g, or t
  misc_feature (549)..(580): n is a, c, g, or t
  misc_feature (715)..(726): n is a, c, g, or t

SEQ ID NO: 386707 - DNA, 745 bp, Homo Sapiens; identical to SEQ ID NO: 358233
  misc_feature (177)..(177): n is a, c, g, or t

SEQ ID NO: 386708 - DNA, 842 bp, Homo Sapiens; identical to SEQ ID NO: 358234

SEQ ID NO: 386709 - DNA, 1143 bp, Homo Sapiens; identical to SEQ ID NO: 358240

SEQ ID NO: 386710 - DNA, 523 bp, Homo Sapiens; identical to SEQ ID NO: 233124

SEQ ID NO: 386711 - DNA, 1038 bp, Homo Sapiens; identical to SEQ ID NO: 358250
  misc_feature (67)..(67): n is a, c, g, or t
  misc_feature (640)..(706): n is a, c, g, or t

SEQ ID NO: 386712 - DNA, 664 bp, Homo Sapiens; identical to SEQ ID NO: 358251
  misc_feature (93)..(93): n is a, c, g, or t

SEQ ID NO: 386713 - DNA, 791 bp, Homo Sapiens; identical to SEQ ID NO: 358252
  misc_feature (306)..(315): n is a, c, g, or t
  misc_feature (699)..(699): n is a, c, g, or t

SEQ ID NO: 386714 - DNA, 1551 bp, Homo Sapiens; identical to SEQ ID NO: 358279

SEQ ID NO: 386715 - DNA, 627 bp, Homo Sapiens; identical to SEQ ID NO: 358280
  misc_feature (41)..(126): n is a, c, g, or t

SEQ ID NO: 386716 - DNA, 1108 bp, Homo Sapiens; identical to SEQ ID NO: 358287

SEQ ID NO: 386717 - DNA, 1069 bp, Homo Sapiens; identical to SEQ ID NO: 358288

SEQ ID NO: 386718 - DNA, 220 bp, Homo Sapiens; identical to SEQ ID NO: 358293

SEQ ID NO: 386719 - DNA, 823 bp, Homo Sapiens; identical to SEQ ID NO: 358294

SEQ ID NO: 386720 - DNA, 823 bp, Homo Sapiens; identical to SEQ ID NO: 358303

SEQ ID NO: 386721 - DNA, 1083 bp, Homo Sapiens; identical to SEQ ID NO: 358304
  misc_feature (403)..(403): n is a, c, g, or t
  misc_feature (674)..(684): n is a, c, g, or t

SEQ ID NO: 386722 - DNA, 761 bp, Homo Sapiens; identical to SEQ ID NO: 358309
  misc_feature (101)..(101): n is a, c, g, or t
  misc_feature (134)..(134): n is a, c, g, or t
  misc_feature (145)..(145): n is a, c, g, or t
  misc_feature (168)..(168): n is a, c, g, or t
  misc_feature (170)..(170): n is a, c, g, or t
  misc_feature (212)..(212): n is a, c, g, or t
  misc_feature (220)..(220): n is a, c, g, or t
  misc_feature (241)..(242): n is a, c, g, or t

SEQ ID NO: 386723 - DNA, 493 bp, Homo Sapiens; identical to SEQ ID NO: 358310

SEQ ID NO: 386724 - DNA, 992 bp, Homo Sapiens; identical to SEQ ID NO: 358311

SEQ ID NO: 386725 - DNA, 330 bp, Homo Sapiens; identical to SEQ ID NO: 358312
  misc_feature (205)..(272): n is a, c, g, or t

SEQ ID NO: 386726 - DNA, 615 bp, Homo Sapiens; identical to SEQ ID NO: 358315

SEQ ID NO: 386727 - DNA, 1106 bp, Homo Sapiens; identical to SEQ ID NO: 358316
  misc_feature (910)..(950): n is a, c, g, or t

SEQ ID NO: 386728 - DNA, 814 bp, Homo Sapiens; identical to SEQ ID NO: 358318
  misc_feature (786)..(786): n is a, c, g, or t
  misc_feature (802)..(802): n is a, c, g, or t

SEQ ID NO: 386729 - DNA, 1107 bp, Homo Sapiens; identical to SEQ ID NO: 358319
  misc_feature (42)..(51): n is a, c, g, or t

SEQ ID NO: 386730 - DNA, 1332 bp, Homo Sapiens; identical to SEQ ID NO: 358338
  misc_feature (18)..(18): n is a, c, g, or t

SEQ ID NO: 386731 - DNA, 586 bp, Homo Sapiens; identical to SEQ ID NO: 358339

SEQ ID NO: 386732 - DNA, 687 bp, Homo Sapiens; identical to SEQ ID NO: 358342

SEQ ID NO: 386733 - DNA, 937 bp, Homo Sapiens; identical to SEQ ID NO: 358343

SEQ ID NO: 386734 - DNA, 849 bp, Homo Sapiens; identical to SEQ ID NO: 358344

SEQ ID NO: 386735 - DNA, 1100 bp, Homo Sapiens; identical to SEQ ID NO: 358355
  misc_feature (1038)..(1038): n is a, c, g, or t
  misc_feature (1051)..(1051): n is a, c, g, or t
  misc_feature (1081)..(1081): n is a, c, g, or t

SEQ ID NO: 386736 - DNA, 841 bp, Homo Sapiens; identical to SEQ ID NO: 358356
  misc_feature (699)..(699): n is a, c, g, or t

SEQ ID NO: 386737 - DNA, 1328 bp, Homo Sapiens; identical to SEQ ID NO: 358368
  misc_feature (264)..(264): n is a, c, g, or t

SEQ ID NO: 386738 - DNA, 2248 bp, Homo Sapiens; identical to SEQ ID NO: 358369
  misc_feature (1496)..(1540): n is a, c, g, or t

SEQ ID NO: 386739 - DNA, 940 bp, Homo Sapiens; identical to SEQ ID NO: 358370

SEQ ID NO: 386740 - DNA, 1409 bp, Homo Sapiens; identical to SEQ ID NO: 358373
  misc_feature (1063)..(1112): n is a, c, g, or t
  misc_feature (1184)..(1192): n is a, c, g, or t

SEQ ID NO: 386741 - DNA, 1486 bp, Homo Sapiens; identical to SEQ ID NO: 358374
  misc_feature (43)..(79): n is a, c, g, or t
  misc_feature (1025)..(1025): n is a, c, g, or t
  misc_feature (1340)..(1340): n is a, c, g, or t

SEQ ID NO: 386742 - DNA, 1468 bp, Homo Sapiens; identical to SEQ ID NO: 358375
  misc_feature (52)..(88): n is a, c, g, or t
  misc_feature (927)..(936): n is a, c, g, or t
  misc_feature (1177)..(1301): n is a, c, g, or t
  misc_feature (1303)..(1305): n is a, c, g, or t
  misc_feature (1319)..(1334): n is a, c, g, or t

SEQ ID NO: 386743 - DNA, 2699 bp, Homo Sapiens; identical to SEQ ID NO: 358385
  misc_feature (280)..(280): n is a, c, g, or t
  misc_feature (1273)..(1273): n is a, c, g, or t
  misc_feature (1923)..(1993): n is a, c, g, or t
  misc_feature (2412)..(2412): n is a, c, g, or t

SEQ ID NO: 386744 - DNA, 786 bp, Homo Sapiens; identical to SEQ ID NO: 358386
  misc_feature (331)..(343): n is a, c, g, or t

SEQ ID NO: 386745 - DNA, 1512 bp, Homo Sapiens; identical to SEQ ID NO: 358400

SEQ ID NO: 386746 - DNA, 491 bp, Homo Sapiens; identical to SEQ ID NO: 358401

SEQ ID NO: 386747 - DNA, 471 bp, Homo Sapiens; identical to SEQ ID NO: 358402

SEQ ID NO: 386748 - DNA, 640 bp, Homo Sapiens; identical to SEQ ID NO: 358408

SEQ ID NO: 386749 - DNA, 421 bp, Homo Sapiens; identical to SEQ ID NO: 358409
  misc_feature (384)..(384): n is a, c, g, or t

SEQ ID NO: 386750 - DNA, 1846 bp, Homo Sapiens; identical to SEQ ID NO: 358417
  misc_feature (43)..(43): n is a, c, g, or t

SEQ ID NO: 386751 - DNA, 606 bp, Homo Sapiens; identical to SEQ ID NO: 358418

SEQ ID NO: 386752 - DNA, 1065 bp, Homo Sapiens; identical to SEQ ID NO: 358419
  misc_feature (409)..(476): n is a, c, g, or t
  misc_feature (497)..(575): n is a, c, g, or t

SEQ ID NO: 386753 - DNA, 1214 bp, Homo Sapiens; identical to SEQ ID NO: 358429
  misc_feature (1110)..(1113): n is a, c, g, or t
  misc_feature (1116)..(1116): n is a, c, g, or t
  misc_feature (1118)..(1119): n is a, c, g, or t

SEQ ID NO: 386754 - DNA, 995 bp, Homo Sapiens; identical to SEQ ID NO: 358430

SEQ ID NO: 386755 - DNA, 456 bp, Homo Sapiens; identical to SEQ ID NO: 358431
  misc_feature (30)..(30): n is a, c, g, or t
  misc_feature (44)..(44): n is a, c, g, or t

SEQ ID NO: 386756 - DNA, 1880 bp, Homo Sapiens; identical to SEQ ID NO: 358435

SEQ ID NO: 386757 - DNA, 949 bp, Homo Sapiens; identical to SEQ ID NO: 358436

SEQ ID NO: 386758 - DNA, 968 bp, Homo Sapiens; identical to SEQ ID NO: 358440
  misc_feature (48)..(87): n is a, c, g, or t
  misc_feature (318)..(370): n is a, c, g, or t
  misc_feature (394)..(425): n is a, c, g, or t
  misc_feature (441)..(452): n is a, c, g, or t
  misc_feature (473)..(473): n is a, c, g, or t
  misc_feature (493)..(493): n is a, c, g, or t
  misc_feature (506)..(510): n is a, c, g, or t
  misc_feature (516)..(557): n is a, c, g, or t
  misc_feature (561)..(563): n is a, c, g, or t
  misc_feature (565)..(567): n is a, c, g, or t

SEQ ID NO: 386759 - DNA, 1331 bp, Homo Sapiens; identical to SEQ ID NO: 358441

SEQ ID NO: 386760 - DNA, 1862 bp, Homo Sapiens; identical to SEQ ID NO: 358450
  misc_feature (1411)..(1809): n is a, c, g, or t

SEQ ID NO: 386761 - DNA, 844 bp, Homo Sapiens; identical to SEQ ID NO: 358451
  misc_feature (479)..(479): n is a, c, g, or t
  misc_feature (703)..(711): n is a, c, g, or t

SEQ ID NO: 386762 - DNA, 1286 bp, Homo Sapiens; identical to SEQ ID NO: 358452
  misc_feature (1145)..(1153): n is a, c, g, or t

SEQ ID NO: 386763 - DNA, 1152 bp, Homo Sapiens; identical to SEQ ID NO: 358453

SEQ ID NO: 386764 - DNA, 2529 bp, Homo Sapiens; identical to SEQ ID NO: 358454
  misc_feature (420)..(420): n is a, c, g, or t
  misc_feature (2452)..(2463): n is a, c, g, or t

SEQ ID NO: 386765 - DNA, 587 bp, Homo Sapiens; identical to SEQ ID NO: 358455
  misc_feature (45)..(45): n is a, c, g, or t

SEQ ID NO: 386766 - DNA, 1131 bp, Homo Sapiens; identical to SEQ ID NO: 358466
  misc_feature (196)..(217): n is a, c, g, or t
  misc_feature (909)..(909): n is a, c, g, or t
  misc_feature (932)..(932): n is a, c, g, or t

SEQ ID NO: 386767 - DNA, 519 bp, Homo Sapiens; identical to SEQ ID NO: 358467

SEQ ID NO: 386768 - DNA, 1205 bp, Homo Sapiens; identical to SEQ ID NO: 358469
  misc_feature (891)..(891): n is a, c, g, or t
  misc_feature (1143)..(1153): n is a, c, g, or t

SEQ ID NO: 386769 - DNA, 845 bp, Homo Sapiens; identical to SEQ ID NO: 358470
  misc_feature (657)..(657): n is a, c, g, or t
  misc_feature (659)..(664): n is a, c, g, or t

SEQ ID NO: 386770 - DNA, 797 bp, Homo Sapiens; identical to SEQ ID NO: 358471
  misc_feature (732)..(733): n is a, c, g, or t

SEQ ID NO: 386771 - DNA, 880 bp, Homo Sapiens; identical to SEQ ID NO: 358472

SEQ ID NO: 386772 - DNA, 858 bp, Homo Sapiens; identical to SEQ ID NO: 358475

SEQ ID NO: 386773 - DNA, 506 bp, Homo Sapiens; identical to SEQ ID NO: 358476

SEQ ID NO: 386774 - DNA, 1133 bp, Homo Sapiens; identical to SEQ ID NO: 358498
  misc_feature (947)..(955): n is a, c, g, or t

SEQ ID NO: 386775 - DNA, 859 bp, Homo Sapiens; identical to SEQ ID NO: 358499
  misc_feature (734)..(734): n is a, c, g, or t
  misc_feature (738)..(738): n is a, c, g, or t
  misc_feature (741)..(742): n is a, c, g, or t
  misc_feature (745)..(745): n is a, c, g, or t
  misc_feature (758)..(760): n is a, c, g, or t
  misc_feature (763)..(765): n is a, c, g, or t
  misc_feature (844)..(844): n is a, c, g, or t

SEQ ID NO: 386776 - DNA, 858 bp, Homo Sapiens; identical to SEQ ID NO: 358508
  misc_feature (818)..(818): n is a, c, g, or t

SEQ ID NO: 386777 - DNA, 652 bp, Homo Sapiens; identical to SEQ ID NO: 358509

SEQ ID NO: 386778 - DNA, 800 bp, Homo Sapiens; identical to SEQ ID NO: 358512

SEQ ID NO: 386779 - DNA, 745 bp, Homo Sapiens; identical to SEQ ID NO: 358513

SEQ ID NO: 386780 - DNA, 826 bp, Homo Sapiens; identical to SEQ ID NO: 358514

SEQ ID NO: 386781 - DNA, 1185 bp, Homo Sapiens; identical to SEQ ID NO: 358525

SEQ ID NO: 386782 - DNA, 680 bp, Homo Sapiens; identical to SEQ ID NO: 358526
  misc_feature (144)..(144): n is a, c, g, or t
  misc_feature (178)..(324): n is a, c, g, or t

SEQ ID NO: 386783 - DNA, 1031 bp, Homo Sapiens; identical to SEQ ID NO: 358544
  misc_feature (923)..(923): n is a, c, g, or t

SEQ ID NO: 386784 - DNA, 1012 bp, Homo Sapiens; identical to SEQ ID NO: 358545

SEQ ID NO: 386785 - DNA, 657 bp, Homo Sapiens; identical to SEQ ID NO: 358555
  misc_feature (14)..(14): n is a, c, g, or t
  misc_feature (22)..(22): n is a, c, g, or t
  misc_feature (38)..(38): n is a, c, g, or t
  misc_feature (43)..(43): n is a, c, g, or t
  misc_feature (56)..(56): n is a, c, g, or t
  misc_feature (61)..(61): n is a, c, g, or t
  misc_feature (79)..(79): n is a, c, g, or t
  misc_feature (101)..(101): n is a, c, g, or t
  misc_feature (191)..(191): n is a, c, g, or t

SEQ ID NO: 386786 - DNA, 793 bp, Homo Sapiens; identical to SEQ ID NO: 358556
  misc_feature (749)..(749): n is a, c, g, or t
  misc_feature (757)..(757): n is a, c, g, or t
  misc_feature (765)..(765): n is a, c, g, or t
  misc_feature (781)..(781): n is a, c, g, or t

SEQ ID NO: 386787 - DNA, 1436 bp, Homo Sapiens; identical to SEQ ID NO: 358557

SEQ ID NO: 386788 - DNA, 457 bp, Homo Sapiens; identical to SEQ ID NO: 358558
  misc_feature (278)..(278): n is a, c, g, or t

SEQ ID NO: 386789 - DNA, 608 bp, Homo Sapiens; identical to SEQ ID NO: 358562
  misc_feature (111)..(111): n is a, c, g, or t
  misc_feature (144)..(144): n is a, c, g, or t

SEQ ID NO: 386790 - DNA, 1045 bp, Homo Sapiens; identical to SEQ ID NO: 358563
  misc_feature (352)..(352): n is a, c, g, or t
  misc_feature (1026)..(1026): n is a, c, g, or t

SEQ ID NO: 386791 - DNA, 829 bp, Homo Sapiens; identical to SEQ ID NO: 5615
  misc_feature (578)..(578): n is a, c, g, or t
  misc_feature (758)..(758): n is a, c, g, or t

SEQ ID NO: 386792 - DNA, 531 bp, Homo Sapiens; identical to SEQ ID NO: 358587
  misc_feature (223)..(223): n is a, c, g, or t

SEQ ID NO: 386793 - DNA, 900 bp, Homo Sapiens; identical to SEQ ID NO: 358588

SEQ ID NO: 386794 - DNA, 719 bp, Homo Sapiens; identical to SEQ ID NO: 358589
  misc_feature (633)..(633): n is a, c, g, or t
  misc_feature (647)..(647): n is a, c, g, or t

SEQ ID NO: 386795 - DNA, 1688 bp, Homo Sapiens; identical to SEQ ID NO: 358592

SEQ ID NO: 386796 - DNA, 861 bp, Homo Sapiens; identical to SEQ ID NO: 358593

SEQ ID NO: 386797 - DNA, 1003 bp, Homo Sapiens; identical to SEQ ID NO: 358600

SEQ ID NO: 386798 - DNA, 503 bp, Homo Sapiens; identical to SEQ ID NO: 358601

SEQ ID NO: 386799 - DNA, 872 bp, Homo Sapiens; identical to SEQ ID NO: 358603
  misc_feature (181)..(231): n is a, c, g, or t

SEQ ID NO: 386800 - DNA, 846 bp, Homo Sapiens; identical to SEQ ID NO: 358604
  misc_feature (45)..(45): n is a, c, g, or t
  misc_feature (154)..(204): n is a, c, g, or t

SEQ ID NO: 386801 - DNA, 631 bp, Homo Sapiens; identical to SEQ ID NO: 358606
  misc_feature (273)..(285): n is a, c, g, or t

SEQ ID NO: 386802 - DNA, 943 bp, Homo Sapiens; identical to SEQ ID NO: 358607
  misc_feature (243)..(262): n is a, c, g, or t
  misc_feature (851)..(899): n is a, c, g, or t

SEQ ID NO: 386803 - DNA, 917 bp, Homo Sapiens; identical to SEQ ID NO: 358610

SEQ ID NO: 386804 - DNA, 816 bp, Homo Sapiens; identical to SEQ ID NO: 358611

SEQ ID NO: 386805 - DNA, 515 bp, Homo Sapiens; identical to SEQ ID NO: 358612
  misc_feature (11)..(11): n is a, c, g, or t
  misc_feature (43)..(43): n is a, c, g, or t
  misc_feature (48)..(48): n is a, c, g, or t
  misc_feature (70)..(70): n is a, c, g, or t
  misc_feature (83)..(83): n is a, c, g, or t
  misc_feature (157)..(157): n is a, c, g, or t

SEQ ID NO: 386806 - DNA, 1199 bp, Homo Sapiens; identical to SEQ ID NO: 358616
  misc_feature (1046)..(1072): n is a, c, g, or t

SEQ ID NO: 386807 - DNA, 472 bp, Homo Sapiens; identical to SEQ ID NO: 358617
  misc_feature (14)..(14): n is a, c, g, or t
  misc_feature (122)..(122): n is a, c, g, or t
  misc_feature (298)..(324): n is a, c, g, or t

SEQ ID NO: 386808 - DNA, 439 bp, Homo Sapiens; identical to SEQ ID NO: 358619
  misc_feature (426)..(426): n is a, c, g, or t

SEQ ID NO: 386809 - DNA, 1158 bp, Homo Sapiens; identical to SEQ ID NO: 358620
  misc_feature (460)..(473): n is a, c, g, or t

SEQ ID NO: 386810 - DNA, 1351 bp, Homo Sapiens; identical to SEQ ID NO: 358629

SEQ ID NO: 386811 - DNA, 752 bp, Homo Sapiens; identical to SEQ ID NO: 358630

SEQ ID NO: 386812 - DNA, 824 bp, Homo Sapiens; identical to SEQ ID NO: 358631
  misc_feature (389)..(442): n is a, c, g, or t

SEQ ID NO: 386813 - DNA, 661 bp, Homo Sapiens; identical to SEQ ID NO: 358635
  misc_feature (98)..(98): n is a, c, g, or t
  misc_feature (144)..(144): n is a, c, g, or t
  misc_feature (160)..(160): n is a, c, g, or t

SEQ ID NO: 386814 - DNA, 487 bp, Homo Sapiens; identical to SEQ ID NO: 358636
  misc_feature (98)..(98): n is a, c, g, or t

SEQ ID NO: 386815 - DNA, 1154 bp, Homo Sapiens; identical to SEQ ID NO: 358638
  misc_feature (182)..(208): n is a, c, g, or t
  misc_feature (774)..(775): n is a, c, g, or t
  misc_feature (784)..(784): n is a, c, g, or t
  misc_feature (860)..(860): n is a, c, g, or t
  misc_feature (908)..(908): n is a, c, g, or t

SEQ ID NO: 386816 - DNA, 1021 bp, Homo Sapiens; identical to SEQ ID NO: 358639
  misc_feature (50)..(86): n is a, c, g, or t
  misc_feature (399)..(413): n is a, c, g, or t

SEQ ID NO: 386817 - DNA, 463 bp, Homo Sapiens; identical to SEQ ID NO: 358643

SEQ ID NO: 386818 - DNA, 793 bp, Homo Sapiens; identical to SEQ ID NO: 358644

SEQ ID NO: 386819 - DNA, 649 bp, Homo Sapiens; identical to SEQ ID NO: 358649

SEQ ID NO: 386820 - DNA, 426 bp, Homo Sapiens; identical to SEQ ID NO: 358650

SEQ ID NO: 386821 - DNA, 774 bp, Homo Sapiens; identical to SEQ ID NO: 358657

SEQ ID NO: 386822 - DNA, 1367 bp, Homo Sapiens; identical to SEQ ID NO: 358658
  misc_feature (406)..(406): n is a, c, g, or t
  misc_feature (1204)..(1204): n is a, c, g, or t
  misc_feature (1208)..(1208): n is a, c, g, or t
  misc_feature (1277)..(1277): n is a, c, g, or t
  misc_feature (1290)..(1290): n is a, c, g, or t

SEQ ID NO: 386823 - DNA, 1877 bp, Homo Sapiens; identical to SEQ ID NO: 358662
  misc_feature (433)..(602): n is a, c, g, or t
  misc_feature (1414)..(1472): n is a, c, g, or t

SEQ ID NO: 386824 - DNA, 396 bp, Homo Sapiens; identical to SEQ ID NO: 358663

SEQ ID NO: 386825 - DNA, 1892 bp, Homo Sapiens; identical to SEQ ID NO: 358666

SEQ ID NO: 386826 - DNA, 1100 bp, Homo Sapiens; identical to SEQ ID NO: 358667
  misc_feature (1042)..(1042): n is a, c, g, or t

SEQ ID NO: 386827 - DNA, 902 bp, Homo Sapiens; identical to SEQ ID NO: 358679

SEQ ID NO: 386828 - DNA, 578 bp, Homo Sapiens; identical to SEQ ID NO: 358680

SEQ ID NO: 386829 - DNA, 665 bp, Homo Sapiens; identical to SEQ ID NO: 358685
  misc_feature (473)..(473): n is a, c, g, or t

SEQ ID NO: 386830 - DNA, 1728 bp, Homo Sapiens; identical to SEQ ID NO: 358686
  misc_feature (167)..(167): n is a, c, g, or t
  misc_feature (176)..(176): n is a, c, g, or t
  misc_feature (643)..(667): n is a, c, g, or t

SEQ ID NO: 386831 - DNA, 1622 bp, Homo Sapiens; identical to SEQ ID NO: 358687
  misc_feature (296)..(360): n is a, c, g, or t
  misc_feature (1474)..(1474): n is a, c, g, or t
  misc_feature (1496)..(1496): n is a, c, g, or t

SEQ ID NO: 386832 - DNA, 1294 bp, Homo Sapiens; identical to SEQ ID NO: 358688
  misc_feature (979)..(1062): n is a, c, g, or t

SEQ ID NO: 386833 - DNA, 748 bp, Homo Sapiens; identical to SEQ ID NO: 358695

SEQ ID NO: 386834 - DNA, 830 bp, Homo Sapiens; identical to SEQ ID NO: 358696

SEQ ID NO: 386835 - DNA, 489 bp, Homo Sapiens; identical to SEQ ID NO: 358704

SEQ ID NO: 386836 - DNA, 1200 bp, Homo Sapiens; identical to SEQ ID NO: 358705
  misc_feature (309)..(309): n is a, c, g, or t

SEQ ID NO: 386837 - DNA, 649 bp, Homo Sapiens; identical to SEQ ID NO: 358706
  misc_feature (533)..(564): n is a, c, g, or t
  misc_feature (637)..(637): n is a, c, g, or t

SEQ ID NO: 386838 - DNA, 1388 bp, Homo Sapiens; identical to SEQ ID NO: 358707
  misc_feature (694)..(702): n is a, c, g, or t
  misc_feature (726)..(960): n is a, c, g, or t

SEQ ID NO: 386839 - DNA, 435 bp, Homo Sapiens; identical to SEQ ID NO: 358721

SEQ ID NO: 386840 - DNA, 649 bp, Homo Sapiens; identical to SEQ ID NO: 358722
  misc_feature (472)..(505): n is a, c, g, or t
  misc_feature (520)..(520): n is a, c, g, or t

SEQ ID NO: 386841 - DNA, 800 bp, Homo Sapiens; identical to SEQ ID NO: 358726

SEQ ID NO: 386842 - DNA, 454 bp, Homo Sapiens; identical to SEQ ID NO: 358727
  misc_feature (37)..(37): n is a, c, g, or t

SEQ ID NO: 386843 - DNA, 722 bp, Homo Sapiens; identical to SEQ ID NO: 358728

SEQ ID NO: 386844 - DNA, 440 bp, Homo Sapiens; identical to SEQ ID NO: 358729

SEQ ID NO: 386845 - DNA, 1517 bp, Homo Sapiens; identical to SEQ ID NO: 358730

SEQ ID NO: 386846 - DNA, 460 bp, Homo Sapiens; identical to SEQ ID NO: 358731

SEQ ID NO: 386847 - DNA, 876 bp, Homo Sapiens; identical to SEQ ID NO: 358736
  misc_feature (13)..(13): n is a, c, g, or t
  misc_feature (39)..(39): n is a, c, g, or t
  misc_feature (42)..(42): n is a, c, g, or t
  misc_feature (97)..(97): n is a, c, g, or t
  misc_feature (100)..(100): n is a, c, g, or t
  misc_feature (117)..(117): n is a, c, g, or t

SEQ ID NO: 386848 - DNA, 2285 bp, Homo Sapiens; identical to SEQ ID NO: 358737
  misc_feature (167)..(167): n is a, c, g, or t
  misc_feature (896)..(946): n is a, c, g, or t
  misc_feature (992)..(1034): n is a, c, g, or t
  misc_feature (1107)..(1107): n is a, c, g, or t
  misc_feature (1475)..(1475): n is a, c, g, or t
  misc_feature (2187)..(2187): n is a, c, g, or t

SEQ ID NO: 386849 - DNA, 839 bp, Homo Sapiens; identical to SEQ ID NO: 358748
  misc_feature (27)..(27): n is a, c, g, or t
  misc_feature (93)..(93): n is a, c, g, or t
  misc_feature (148)..(148): n is a, c, g, or t

SEQ ID NO: 386850 - DNA, 472 bp, Homo Sapiens; identical to SEQ ID NO: 358749
  misc_feature (16)..(16): n is a, c, g, or t
  misc_feature (22)..(22): n is a, c, g, or t

SEQ ID NO: 386851 - DNA, 902 bp, Homo Sapiens; identical to SEQ ID NO: 358750
  misc_feature (65)..(66): n is a, c, g, or t
  misc_feature (106)..(106): n is a, c, g, or t
  misc_feature (130)..(130): n is a, c, g, or t
  misc_feature (150)..(150): n is a, c, g, or t
  misc_feature (189)..(189): n is a, c, g, or t
  misc_feature (252)..(252): n is a, c, g, or t

SEQ ID NO: 386852 - DNA, 549 bp, Homo Sapiens; identical to SEQ ID NO: 358751
  misc_feature (536)..(536): n is a, c, g, or t

SEQ ID NO: 386853 - DNA, 421 bp, Homo Sapiens; identical to SEQ ID NO: 358752

SEQ ID NO: 386854 - DNA, 470 bp, Homo Sapiens; identical to SEQ ID NO: 358753

SEQ ID NO: 386855 - DNA, 756 bp, Homo Sapiens; identical to SEQ ID NO: 358754
  misc_feature (320)..(469): n is a, c, g, or t

SEQ ID NO: 386856 - DNA, 352 bp, Homo Sapiens; identical to SEQ ID NO: 358755

SEQ ID NO: 386857 - DNA, 711 bp, Homo Sapiens; identical to SEQ ID NO: 358756
  misc_feature (51)..(71): n is a, c, g, or t
  misc_feature (411)..(439): n is a, c, g, or t

SEQ ID NO: 386858 - DNA, 527 bp, Homo Sapiens; identical to SEQ ID NO: 358757
  misc_feature (46)..(46): n is a, c, g, or t
  misc_feature (443)..(473): n is a, c, g, or t

SEQ ID NO: 386859 - DNA, 1407 bp, Homo Sapiens; identical to SEQ ID NO: 358761
  misc_feature (1286)..(1286): n is a, c, g, or t

SEQ ID NO: 386860 - DNA, 643 bp, Homo Sapiens; identical to SEQ ID NO: 358762
  misc_feature (55)..(55): n is a, c, g, or t

SEQ ID NO: 386861 - DNA, 1366 bp, Homo Sapiens; identical to SEQ ID NO: 358767
  misc_feature (973)..(973): n is a, c, g, or t
  misc_feature (1311)..(1311): n is a, c, g, or t

SEQ ID NO: 386862 - DNA, 1130 bp, Homo Sapiens; identical to SEQ ID NO: 358768
  misc_feature (214)..(214): n is a, c, g, or t

SEQ ID NO: 386863 - DNA, 445 bp, Homo Sapiens; identical to SEQ ID NO: 358777

SEQ ID NO: 386864 - DNA, 534 bp, Homo Sapiens; identical to SEQ ID NO: 358778
  misc_feature (23)..(23): n is a, c, g, or t
  misc_feature (37)..(37): n is a, c, g, or t
  misc_feature (82)..(82): n is a, c, g, or t

SEQ ID NO: 386865 - DNA, 793 bp, Homo Sapiens; identical to SEQ ID NO: 358780

SEQ ID NO: 386866 - DNA, 1571 bp, Homo Sapiens; identical to SEQ ID NO: 358781

SEQ ID NO: 386867 - DNA, 886 bp, Homo Sapiens; identical to SEQ ID NO: 358784

SEQ ID NO: 386868 - DNA, 896 bp, Homo Sapiens; identical to SEQ ID NO: 358785

SEQ ID NO: 386869 - DNA, 1410 bp, Homo Sapiens; identical to SEQ ID NO: 358788
  misc_feature (50)..(86): n is a, c, g, or t
  misc_feature (1105)..(1117): n is a, c, g, or t

SEQ ID NO: 386870 - DNA, 1100 bp, Homo Sapiens; identical to SEQ ID NO: 358789

SEQ ID NO: 386871 - DNA, 712 bp, Homo Sapiens; identical to SEQ ID NO: 358790

SEQ ID NO: 386872 - DNA, 367 bp, Homo Sapiens; identical to SEQ ID NO: 358791
  misc_feature (17)..(17): n is a, c, g, or t
  misc_feature (31)..(31): n is a, c, g, or t

SEQ ID NO: 386873 - DNA, 568 bp, Homo Sapiens; identical to SEQ ID NO: 358793
  misc_feature (131)..(131): n is a, c, g, or t

SEQ ID NO: 386874 - DNA, 435 bp, Homo Sapiens; identical to SEQ ID NO: 358794
  misc_feature (22)..(22): n is a, c, g, or t
  misc_feature (212)..(212): n is a, c, g, or t
  misc_feature (230)..(230): n is a, c, g, or t

SEQ ID NO: 386875 - DNA, 800 bp, Homo Sapiens; identical to SEQ ID NO: 358804

SEQ ID NO: 386876 - DNA, 1038 bp, Homo Sapiens; identical to SEQ ID NO: 358805
  misc_feature (957)..(966): n is a, c, g, or t

SEQ ID NO: 386877 - DNA, 672 bp, Homo Sapiens; identical to SEQ ID NO: 358813
  misc_feature (598)..(598): n is a, c, g, or t
  misc_feature (646)..(646): n is a, c, g, or t

SEQ ID NO: 386878 - DNA, 1110 bp, Homo Sapiens; identical to SEQ ID NO: 358814
  misc_feature (510)..(519): n is a, c, g, or t

SEQ ID NO: 386879 - DNA, 516 bp, Homo Sapiens; identical to SEQ ID NO: 358818
  misc_feature (20)..(20): n is a, c, g, or t
  misc_feature (31)..(31): n is a, c, g, or t
  misc_feature (45)..(45): n is a, c, g, or t

SEQ ID NO: 386880 - DNA, 406 bp, Homo Sapiens; identical to SEQ ID NO: 358819
  misc_feature (395)..(395): n is a, c, g, or t

SEQ ID NO: 386881 - DNA, 373 bp, Homo Sapiens; identical to SEQ ID NO: 358820

SEQ ID NO: 386882 - DNA, 562 bp, Homo Sapiens; identical to SEQ ID NO: 358821
  misc_feature (204)..(204): n is a, c, g, or t

SEQ ID NO: 386883 - DNA, 488 bp, Homo Sapiens; identical to SEQ ID NO: 358844
  misc_feature (45)..(45): n is a, c, g, or t

SEQ ID NO: 386884 - DNA, 594 bp, Homo Sapiens; identical to SEQ ID NO: 358845

SEQ ID NO: 386885 - DNA, 802 bp, Homo Sapiens; identical to SEQ ID NO: 358852

SEQ ID NO: 386886 - DNA, 480 bp, Homo Sapiens; identical to SEQ ID NO: 358853

SEQ ID NO: 386887 - DNA, 685 bp, Homo Sapiens; identical to SEQ ID NO: 358854
  misc_feature (23)..(23): n is a, c, g, or t
  misc_feature (165)..(165): n is a, c, g, or t
  misc_feature (168)..(168): n is a, c, g, or t
  misc_feature (173)..(173): n is a, c, g, or t
  misc_feature (182)..(182): n is a, c, g, or t
  misc_feature (410)..(410): n is a, c, g, or t

SEQ ID NO: 386888 - DNA, 759 bp, Homo Sapiens; identical to SEQ ID NO: 358858

SEQ ID NO: 386889 - DNA, 1038 bp, Homo Sapiens; identical to SEQ ID NO: 358859

SEQ ID NO: 386890 - DNA, 637 bp, Homo Sapiens; identical to SEQ ID NO: 358867
  misc_feature (23)..(23): n is a, c, g, or t
  misc_feature (61)..(61): n is a, c, g, or t
  misc_feature (82)..(82): n is a, c, g, or t

SEQ ID NO: 386891 - DNA, 431 bp, Homo Sapiens; identical to SEQ ID NO: 358868
  misc_feature (53)..(53): n is a, c, g, or t

SEQ ID NO: 386892 - DNA, 994 bp, Homo Sapiens; identical to SEQ ID NO: 358869

SEQ ID NO: 386893 - DNA, 838 bp, Homo Sapiens; identical to SEQ ID NO: 358870
  misc_feature (785)..(785): n is a, c, g, or t
  misc_feature (803)..(803): n is a, c, g, or t

SEQ ID NO: 386894 - DNA, 141 bp, Homo Sapiens; identical to SEQ ID NO: 358871

SEQ ID NO: 386895 - DNA, 1190 bp, Homo Sapiens; identical to SEQ ID NO: 358872
  misc_feature (1110)..(1110): n is a, c, g, or t

SEQ ID NO: 386896 - DNA, 1707 bp, Homo Sapiens; identical to SEQ ID NO: 358873
  misc_feature (321)..(321): n is a, c, g, or t

SEQ ID NO: 386897 - DNA, 904 bp, Homo Sapiens; identical to SEQ ID NO: 358875

SEQ ID NO: 386898 - DNA, 807 bp, Homo Sapiens; identical to SEQ ID NO: 358876

SEQ ID NO: 386899 - DNA, 588 bp, Homo Sapiens; identical to SEQ ID NO: 358880

SEQ ID NO: 386900 - DNA, 665 bp, Homo Sapiens; identical to SEQ ID NO: 358881
  misc_feature (47)..(47): n is a, c, g, or t

SEQ ID NO: 386901 - DNA, 590 bp, Homo Sapiens; identical to SEQ ID NO: 358883

SEQ ID NO: 386902 - DNA, 1198 bp, Homo Sapiens; identical to SEQ ID NO: 358884
  misc_feature (143)..(204): n is a, c, g, or t
  misc_feature (208)..(278): n is a, c, g, or t
  misc_feature (300)..(432): n is a, c, g, or t

SEQ ID NO: 386903 - DNA, 1638 bp, Homo Sapiens; identical to SEQ ID NO: 358888

SEQ ID NO: 386904 - DNA, 1028 bp, Homo Sapiens; identical to SEQ ID NO: 358889
  misc_feature (803)..(803): n is a, c, g, or t
  misc_feature (903)..(903): n is a, c, g, or t
  misc_feature (978)..(978): n is a, c, g, or t

SEQ ID NO: 386905 - DNA, 779 bp, Homo Sapiens; identical to SEQ ID NO: 358890

SEQ ID NO: 386906 - DNA, 1233 bp, Homo Sapiens; identical to SEQ ID NO: 358891
  misc_feature (445)..(445): n is a, c, g, or t

SEQ ID NO: 386907 - DNA, 748 bp, Homo Sapiens; identical to SEQ ID NO: 358892

SEQ ID NO: 386908 - DNA, 575 bp, Homo Sapiens; identical to SEQ ID NO: 358896

SEQ ID NO: 386909 - DNA, 297 bp, Homo Sapiens; identical to SEQ ID NO: 358897

SEQ ID NO: 386910 - DNA, 879 bp, Homo Sapiens; identical to SEQ ID NO: 358899

SEQ ID NO: 386911 - DNA, 1050 bp, Homo Sapiens; identical to SEQ ID NO: 172481
  misc_feature (93)..(152): n is a, c, g, or t
  misc_feature (982)..(995): n is a, c, g, or t

SEQ ID NO: 386912 - DNA, 1578 bp, Homo Sapiens; identical to SEQ ID NO: 358901
  misc_feature (1017)..(1153): n is a, c, g, or t
  misc_feature (1215)..(1296): n is a, c, g, or t
  misc_feature (1400)..(1409): n is a, c, g, or t

SEQ ID NO: 386913 - DNA, 911 bp, Homo Sapiens; identical to SEQ ID NO: 358902
  misc_feature (78)..(124): n is a, c, g, or t
  misc_feature (139)..(181): n is a, c, g, or t
  misc_feature (801)..(801): n is a, c, g, or t
  misc_feature (846)..(846): n is a, c, g, or t
  misc_feature (872)..(872): n is a, c, g, or t
  misc_feature (882)..(882): n is a, c, g, or t
  misc_feature (900)..(900): n is a, c, g, or t

SEQ ID NO: 386914 - DNA, 786 bp, Homo Sapiens; identical to SEQ ID NO: 358903
  misc_feature (43)..(43): n is a, c, g, or t
  misc_feature (124)..(166): n is a, c, g, or t
  misc_feature (181)..(227): n is a, c, g, or t

SEQ ID NO: 386915 - DNA, 1599 bp, Homo Sapiens; identical to SEQ ID NO: 358911
  misc_feature (118)..(132): n is a, c, g, or t

SEQ ID NO: 386916 - DNA, 625 bp, Homo Sapiens; identical to SEQ ID NO: 358912

SEQ ID NO: 386917 - DNA, 1176 bp, Homo Sapiens; identical to SEQ ID NO: 358917

SEQ ID NO: 386918 - DNA, 507 bp, Homo Sapiens; identical to SEQ ID NO: 358918

SEQ ID NO: 386919 - DNA, 1311 bp, Homo Sapiens; identical to SEQ ID NO: 358925
  misc_feature (747)..(763): n is a, c, g, or t
  misc_feature (864)..(897): n is a, c, g, or t

SEQ ID NO: 386920 - DNA, 774 bp, Homo Sapiens; identical to SEQ ID NO: 358926

SEQ ID NO: 386921 - DNA, 421 bp, Homo Sapiens; identical to SEQ ID NO: 358927
  misc_feature (21)..(21): n is a, c, g, or t
  misc_feature (28)..(28): n is a, c, g, or t
  misc_feature (36)..(36): n is a, c, g, or t
  misc_feature (118)..(118): n is a, c, g, or t

SEQ ID NO: 386922 - DNA, 615 bp, Homo Sapiens; identical to SEQ ID NO: 358931

SEQ ID NO: 386923 - DNA, 845 bp, Homo Sapiens; identical to SEQ ID NO: 358932
  misc_feature (716)..(716): n is a, c, g, or t
  misc_feature (721)..(721): n is a, c, g, or t
  misc_feature (737)..(737): n is a, c, g, or t
  misc_feature (743)..(743): n is a, c, g, or t
  misc_feature (752)..(752): n is a, c, g, or t
  misc_feature (756)..(756): n is a, c, g, or t
  misc_feature (765)..(765): n is a, c, g, or t
  misc_feature (790)..(790): n is a, c, g, or t
  misc_feature (794)..(794): n is a, c, g, or t
  misc_feature (798)..(798): n is a, c, g, or t

SEQ ID NO: 386924 - DNA, 1058 bp, Homo Sapiens; identical to SEQ ID NO: 358936
  misc_feature (872)..(872): n is a, c, g, or t

SEQ ID NO: 386925 - DNA, 773 bp, Homo Sapiens; identical to SEQ ID NO: 358937

SEQ ID NO: 386926 - DNA, 1226 bp, Homo Sapiens; identical to SEQ ID NO: 358950

SEQ ID NO: 386927 - DNA, 1928 bp, Homo Sapiens; identical to SEQ ID NO: 358951
  misc_feature (1597)..(1602): n is a, c, g, or t
  misc_feature (1607)..(1607): n is a, c, g, or t
  misc_feature (1609)..(1610): n is a, c, g, or t
  misc_feature (1617)..(1617): n is a, c, g, or t
  misc_feature (1847)..(1856): n is a, c, g, or t

SEQ ID NO: 386928 - DNA, 812 bp, Homo Sapiens; identical to SEQ ID NO: 358952
  misc_feature (78)..(78): n is a, c, g, or t

SEQ ID NO: 386929 - DNA, 906 bp, Homo Sapiens; identical to SEQ ID NO: 358955
  misc_feature (26)..(26): n is a, c, g, or t
  misc_feature (110)..(110): n is a, c, g, or t

SEQ ID NO: 386930 - DNA, 511 bp, Homo Sapiens; identical to SEQ ID NO: 358956
  misc_feature (101)..(101): n is a, c, g, or t
  misc_feature (268)..(268): n is a, c, g, or t

SEQ ID NO: 386931 - DNA, 531 bp, Homo Sapiens; identical to SEQ ID NO: 358962

SEQ ID NO: 386932 - DNA, 839 bp, Homo Sapiens; identical to SEQ ID NO: 3590

SEQ ID NO: 386933 - DNA, 1247 bp, Homo Sapiens; identical to SEQ ID NO: 358996

SEQ ID NO: 386934 - DNA, 1112 bp, Homo Sapiens; identical to SEQ ID NO: 358997
  misc_feature (855)..(855): n is a, c, g, or t

SEQ ID NO: 386935 - DNA, 1488 bp, Homo Sapiens; identical to SEQ ID NO: 359008
  misc_feature (95)..(95): n is a, c, g, or t
  misc_feature (242)..(245): n is a, c, g, or t
  misc_feature (1071)..(1174): n is a, c, g, or t
  misc_feature (1176)..(1187): n is a, c, g, or t
  misc_feature (1189)..(1235): n is a, c, g, or t
  misc_feature (1241)..(1244): n is a, c, g, or t
  misc_feature (1250)..(1250): n is a, c, g, or t
  misc_feature (1259)..(1259): n is a, c, g, or t
  misc_feature (1273)..(1391): n is a, c, g, or t

SEQ ID NO: 386936 - DNA, 508 bp, Homo Sapiens; identical to SEQ ID NO: 359009

SEQ ID NO: 386937 - DNA, 441 bp, Homo Sapiens; identical to SEQ ID NO: 359021

SEQ ID NO: 386938 - DNA, 697 bp, Homo Sapiens; identical to SEQ ID NO: 359022
  misc_feature (46)..(46): n is a, c, g, or t
  misc_feature (76)..(112): n is a, c, g, or t

SEQ ID NO: 386939 - DNA, 728 bp, Homo Sapiens; identical to SEQ ID NO: 359026
  misc_feature (370)..(430): n is a, c, g, or t
  misc_feature (504)..(504): n is a, c, g, or t
  misc_feature (577)..(577): n is a, c, g, or t
  misc_feature (632)..(632): n is a, c, g, or t
  misc_feature (656)..(656): n is a, c, g, or t

SEQ ID NO: 386940 - DNA, 1156 bp, Homo Sapiens; identical to SEQ ID NO: 359027
  misc_feature (1031)..(1040): n is a, c, g, or t

SEQ ID NO: 386941 - DNA, 1189 bp, Homo Sapiens; identical to SEQ ID NO: 359029
  misc_feature (594)..(606): n is a, c, g, or t

SEQ ID NO: 386942 - DNA, 734 bp, Homo Sapiens; identical to SEQ ID NO: 359030
  misc_feature (711)..(711): n is a, c, g, or t
  misc_feature (717)..(717): n is a, c, g, or t

SEQ ID NO: 386943 - DNA, 2354 bp, Homo Sapiens; identical to SEQ ID NO: 359054

SEQ ID NO: 386944 - DNA, 406 bp, Homo Sapiens; identical to SEQ ID NO: 359055
  misc_feature (310)..(330): n is a, c, g, or t

SEQ ID NO: 386945 - DNA, 458 bp, Homo Sapiens; identical to SEQ ID NO: 359056
  misc_feature (158)..(188): n is a, c, g, or t
  misc_feature (283)..(283): n is a, c, g, or t
  misc_feature (444)..(444): n is a, c, g, or t

SEQ ID NO: 386946 - DNA, 749 bp, Homo Sapiens; identical to SEQ ID NO: 359057

SEQ ID NO: 386947 - DNA, 1098 bp, Homo Sapiens; identical to SEQ ID NO: 359058
  misc_feature (35)..(35): n is a, c, g, or t

SEQ ID NO: 386948 - DNA, 1305 bp, Homo Sapiens; identical to SEQ ID NO: 359059

SEQ ID NO: 386949 - DNA, 1016 bp, Homo Sapiens; identical to SEQ ID NO: 359060

SEQ ID NO: 386950 - DNA, 414 bp, Homo Sapiens; identical to SEQ ID NO: 359061

SEQ ID NO: 386951 - DNA, 721 bp, Homo Sapiens; identical to SEQ ID NO: 359066

SEQ ID NO: 386952 - DNA, 563 bp, Homo Sapiens; identical to SEQ ID NO: 359067
  misc_feature (364)..(364): n is a, c, g, or t
  misc_feature (409)..(409): n is a, c, g, or t
  misc_feature (415)..(415): n is a, c, g, or t
  misc_feature (485)..(507): n is a, c, g, or t
  misc_feature (528)..(528): n is a, c, g, or t

SEQ ID NO: 386953 - DNA, 463 bp, Homo Sapiens; identical to SEQ ID NO: 359071
  misc_feature (438)..(438): n is a, c, g, or t

SEQ ID NO: 386954 - DNA, 445 bp, Homo Sapiens; identical to SEQ ID NO: 359072

SEQ ID NO: 386955 - DNA, 858 bp, Homo Sapiens; identical to SEQ ID NO: 359077
  misc_feature (49)..(85): n is a, c, g, or t

SEQ ID NO: 386956 - DNA, 720 bp, Homo Sapiens; identical to SEQ ID NO: 359078

SEQ ID NO: 386957 - DNA, 1313 bp, Homo Sapiens; identical to SEQ ID NO: 359087

SEQ ID NO: 386958 - DNA, 543 bp, Homo Sapiens; identical to SEQ ID NO: 359088

SEQ ID NO: 386959 - DNA, 902 bp, Homo Sapiens; identical to SEQ ID NO: 359099

SEQ ID NO: 386960 - DNA, 349 bp, Homo Sapiens; identical to SEQ ID NO: 359100

SEQ ID NO: 386961 - DNA, 500 bp, Homo Sapiens; identical to SEQ ID NO: 359108
  misc_feature (269)..(269): n is a, c, g, or t
  misc_feature (342)..(342): n is a, c, g, or t

SEQ ID NO: 386962 - DNA, 244 bp, Homo Sapiens; identical to SEQ ID NO: 359109

SEQ ID NO: 386963 - DNA, 713 bp, Homo Sapiens; identical to SEQ ID NO: 359113

SEQ ID NO: 386964 - DNA, 654 bp, Homo Sapiens; identical to SEQ ID NO: 359114

SEQ ID NO: 386965 - DNA, 840 bp, Homo Sapiens; identical to SEQ ID NO: 359118
  misc_feature (561)..(561): n is a, c, g, or t
  misc_feature (603)..(603): n is a, c, g, or t

SEQ ID NO: 386966 - DNA, 694 bp, Homo Sapiens; identical to SEQ ID NO: 359119
  misc_feature (50)..(94): n is a, c, g, or t
  misc_feature (163)..(163): n is a, c, g, or t
  misc_feature (183)..(183): n is a, c, g, or t

SEQ ID NO: 386967 - DNA, 1165 bp, Homo Sapiens; identical to SEQ ID NO: 359121
  misc_feature (54)..(54): n is a, c, g, or t
  misc_feature (111)..(150): n is a, c, g, or t
  misc_feature (522)..(530): n is a, c, g, or t

SEQ ID NO: 386968 - DNA, 388 bp, Homo Sapiens; identical to SEQ ID NO: 359122
  misc_feature (44)..(44): n is a, c, g, or t

SEQ ID NO: 386969 - DNA, 848 bp, Homo Sapiens; identical to SEQ ID NO: 359123

SEQ ID NO: 386970 - DNA, 535 bp, Homo Sapiens; identical to SEQ ID NO: 359124

SEQ ID NO: 386971 - DNA, 933 bp, Homo Sapiens; identical to SEQ ID NO: 359132

SEQ ID NO: 386972 - DNA, 492 bp, Homo Sapiens; identical to SEQ ID NO: 359133

SEQ ID NO: 386973 - DNA, 696 bp, Homo Sapiens; identical to SEQ ID NO: 359150
  misc_feature (197)..(240): n is a, c, g, or t

SEQ ID NO: 386974 - DNA, 414 bp, Homo Sapiens; identical to SEQ ID NO: 359151
  misc_feature (175)..(218): n is a, c, g, or t

SEQ ID NO: 386975 - DNA, 907 bp, Homo Sapiens; identical to SEQ ID NO: 359183

SEQ ID NO: 386976 - DNA, 478 bp, Homo Sapiens; identical to SEQ ID NO: 359184
  misc_feature (23)..(23): n is a, c, g, or t
  misc_feature (61)..(61): n is a, c, g, or t
  misc_feature (72)..(72): n is a, c, g, or t
  misc_feature (90)..(90): n is a, c, g, or t
  misc_feature (114)..(114): n is a, c, g, or t

SEQ ID NO: 386977 - DNA, 696 bp, Homo Sapiens; identical to SEQ ID NO: 359198

SEQ ID NO: 386978 - DNA, 1018 bp, Homo Sapiens; identical to SEQ ID NO: 359199
  misc_feature (763)..(826): n is a, c, g, or t
  misc_feature (828)..(860): n is a, c, g, or t
  misc_feature (862)..(866): n is a, c, g, or t
  misc_feature (879)..(891): n is a, c, g, or t

SEQ ID NO: 386979 - DNA, 518 bp, Homo Sapiens; identical to SEQ ID NO: 359342

SEQ ID NO: 386980 - DNA, 639 bp, Homo Sapiens; identical to SEQ ID NO: 250439

SEQ ID NO: 386981 - DNA, 817 bp, Homo Sapiens; identical to SEQ ID NO: 359344
  misc_feature (335)..(413): n is a, c, g, or t

SEQ ID NO: 386982 - DNA, 1542 bp, Homo Sapiens; identical to SEQ ID NO: 359345

SEQ ID NO: 386983 - DNA, 360 bp, Homo Sapiens; identical to SEQ ID NO: 359346
  misc_feature (82)..(130): n is a, c, g, or t

SEQ ID NO: 386984 - DNA, 461 bp, Homo Sapiens; identical to SEQ ID NO: 359376
  misc_feature (135)..(135): n is a, c, g, or t
  misc_feature (197)..(197): n is a, c, g, or t

SEQ ID NO: 386985 - DNA, 724 bp, Homo Sapiens; identical to SEQ ID NO: 359377

SEQ ID NO: 386986 - DNA, 1183 bp, Homo Sapiens; identical to SEQ ID NO: 359387
  misc_feature (935)..(935): n is a, c, g, or t

SEQ ID NO: 386987 - DNA, 1240 bp, Homo Sapiens; identical to SEQ ID NO: 359388

SEQ ID NO: 386988 - DNA, 464 bp, Homo Sapiens; identical to SEQ ID NO: 359396

SEQ ID NO: 386989 - DNA, 499 bp, Homo Sapiens; identical to SEQ ID NO: 359397

SEQ ID NO: 386990 - DNA, 979 bp, Homo Sapiens; identical to SEQ ID NO: 359398
  misc_feature (638)..(638): n is a, c, g, or t
  misc_feature (908)..(908): n is a, c, g, or t
  misc_feature (933)..(933): n is a, c, g, or t
  misc_feature (945)..(945): n is a, c, g, or t
  misc_feature (951)..(951): n is a, c, g, or t

SEQ ID NO: 386991 - DNA, 1059 bp, Homo Sapiens; identical to SEQ ID NO: 359414
  misc_feature (70)..(179): n is a, c, g, or t

SEQ ID NO: 386992 - DNA, 374 bp, Homo Sapiens; identical to SEQ ID NO: 359415
  misc_feature (109)..(109): n is a, c, g, or t
  misc_feature (215)..(215): n is a, c, g, or t
  misc_feature (294)..(294): n is a, c, g, or t
  misc_feature (338)..(338): n is a, c, g, or t

SEQ ID NO: 386993 - DNA, 498 bp, Homo Sapiens; identical to SEQ ID NO: 359440

SEQ ID NO: 386994 - DNA, 349 bp, Homo Sapiens; identical to SEQ ID NO: 264481

SEQ ID NO: 386995 - DNA, 519 bp, Homo Sapiens; identical to SEQ ID NO: 359451
  misc_feature (124)..(124): n is a, c, g, or t

SEQ ID NO: 386996 - DNA, 437 bp, Homo Sapiens; identical to SEQ ID NO: 359452

SEQ ID NO: 386997 - DNA, 418 bp, Homo Sapiens; identical to SEQ ID NO: 359455
  misc_feature (331)..(362): n is a, c, g, or t

SEQ ID NO: 386998 - DNA, 527 bp, Homo Sapiens; identical to SEQ ID NO: 359456
  misc_feature (162)..(192): n is a, c, g, or t
  misc_feature (392)..(405): n is a, c, g, or t
  misc_feature (411)..(411): n is a, c, g, or t
  misc_feature (516)..(516): n is a, c, g, or t

SEQ ID NO: 386999 - DNA, 975 bp, Homo Sapiens; identical to SEQ ID NO: 359463

SEQ ID NO: 387000 - DNA, 954 bp, Homo Sapiens; identical to SEQ ID NO: 359464

SEQ ID NO: 387001 - DNA, 1414 bp, Homo Sapiens; identical to SEQ ID NO: 359466

SEQ ID NO: 387002 - DNA, 1324 bp, Homo Sapiens; identical to SEQ ID NO: 359467
  misc_feature (60)..(72): n is a, c, g, or t
  misc_feature (163)..(172): n is a, c, g, or t
  misc_feature (1105)..(1121): n is a, c, g, or t

SEQ ID NO: 387003 - DNA, 937 bp, Homo Sapiens; identical to SEQ ID NO: 359468

SEQ ID NO: 387004 - DNA, 547 bp, Homo Sapiens; identical to SEQ ID NO: 359469

SEQ ID NO: 387005 - DNA, 1502 bp, Homo Sapiens; identical to SEQ ID NO: 359470
  misc_feature (1003)..(1021): n is a, c, g, or t
  misc_feature (1030)..(1068): n is a, c, g, or t
  misc_feature (1116)..(1186): n is a, c, g, or t
  misc_feature (1484)..(1484): n is a, c, g, or t

SEQ ID NO: 387006 - DNA, 1056 bp, Homo Sapiens; identical to SEQ ID NO: 359475

SEQ ID NO: 387007 - DNA, 907 bp, Homo Sapiens; identical to SEQ ID NO: 359476

SEQ ID NO: 387008 - DNA, 884 bp, Homo Sapiens; identical to SEQ ID NO: 359477

SEQ ID NO: 387009 - DNA, 840 bp, Homo Sapiens; identical to SEQ ID NO: 359478

SEQ ID NO: 387010 - DNA, 1253 bp, Homo Sapiens; identical to SEQ ID NO: 359479
  misc_feature (902)..(902): n is a, c, g, or t

SEQ ID NO: 387011 - DNA, 1248 bp, Homo Sapiens; identical to SEQ ID NO: 359480
  misc_feature (885)..(945): n is a, c, g, or t

SEQ ID NO: 387012 - DNA, 700 bp, Homo Sapiens; identical to SEQ ID NO: 359487
  misc_feature (17)..(17): n is a, c, g, or t
  misc_feature (32)..(32): n is a, c, g, or t
  misc_feature (54)..(110): n is a, c, g, or t

SEQ ID NO: 387013 - DNA, 1297 bp, Homo Sapiens; identical to SEQ ID NO: 359488
  misc_feature (355)..(432): n is a, c, g, or t
  misc_feature (1283)..(1283): n is a, c, g, or t

SEQ ID NO: 387014 - DNA, 504 bp, Homo Sapiens; identical to SEQ ID NO: 359489
  misc_feature (86)..(86): n is a, c, g, or t
  misc_feature (471)..(471): n is a, c, g, or t
  misc_feature (478)..(478): n is a, c, g, or t
  misc_feature (490)..(490): n is a, c, g, or t

SEQ ID NO: 387015 - DNA, 562 bp, Homo Sapiens; identical to SEQ ID NO: 359490
  misc_feature (48)..(48): n is a, c, g, or t
  misc_feature (94)..(95): n is a, c, g, or t
  misc_feature (398)..(398): n is a, c, g, or t
  misc_feature (477)..(477): n is a, c, g, or t
  misc_feature (482)..(482): n is a, c, g, or t
  misc_feature (493)..(493): n is a, c, g, or t
  misc_feature (509)..(509): n is a, c, g, or t
  misc_feature (531)..(531): n is a, c, g, or t

SEQ ID NO: 387016 - DNA, 357 bp, Homo Sapiens; identical to SEQ ID NO: 359491
  misc_feature (76)..(106): n is a, c, g, or t

SEQ ID NO: 387017 - DNA, 473 bp, Homo Sapiens; identical to SEQ ID NO: 359492
  misc_feature (257)..(310): n is a, c, g, or t

SEQ ID NO: 387018 - DNA, 476 bp, Homo Sapiens; identical to SEQ ID NO: 359493
  misc_feature (226)..(287): n is a, c, g, or t

SEQ ID NO: 387019 - DNA, 1340 bp, Homo Sapiens; identical to SEQ ID NO: 359508
  misc_feature (17)..(17): n is a, c, g, or t
  misc_feature (44)..(44): n is a, c, g, or t
  misc_feature (55)..(55): n is a, c, g, or t
  misc_feature (95)..(95): n is a, c, g, or t

SEQ ID NO: 387020 - DNA, 439 bp, Homo Sapiens; identical to SEQ ID NO: 359509
  misc_feature (84)..(85): n is a, c, g, or t
  misc_feature (341)..(341): n is a, c, g, or t
  misc_feature (414)..(414): n is a, c, g, or t

SEQ ID NO: 387021 - DNA, 533 bp, Homo Sapiens; identical to SEQ ID NO: 359515

SEQ ID NO: 387022 - DNA, 1502 bp, Homo Sapiens; identical to SEQ ID NO: 359516

SEQ ID NO: 387023 - DNA, 919 bp, Homo Sapiens; identical to SEQ ID NO: 359517

SEQ ID NO: 387024 - DNA, 628 bp, Homo Sapiens; identical to SEQ ID NO: 359518
  misc_feature (545)..(545): n is a, c, g, or t
  misc_feature (563)..(563): n is a, c, g, or t
  misc_feature (579)..(579): n is a, c, g, or t

SEQ ID NO: 387025 - DNA, 1724 bp, Homo Sapiens; identical to SEQ ID NO: 359523
  misc_feature (252)..(253): n is a, c, g, or t
  misc_feature (255)..(256): n is a, c, g, or t
  misc_feature (258)..(259): n is a, c, g, or t
  misc_feature (261)..(263): n is a, c, g, or t
  misc_feature (265)..(269): n is a, c, g, or t

SEQ ID NO: 387026 - DNA, 476 bp, Homo Sapiens; identical to SEQ ID NO: 359524
  misc_feature (72)..(72): n is a, c, g, or t
  misc_feature (95)..(95): n is a, c, g, or t
  misc_feature (139)..(139): n is a, c, g, or t
  misc_feature (147)..(147): n is a, c, g, or t

SEQ ID NO: 387027 - DNA, 696 bp, Homo Sapiens; identical to SEQ ID NO: 359530

SEQ ID NO: 387028 - DNA, 456 bp, Homo Sapiens; identical to SEQ ID NO: 359531
  misc_feature (12)..(12): n is a, c, g, or t
  misc_feature (25)..(25): n is a, c, g, or t
  misc_feature (42)..(42): n is a, c, g, or t
  misc_feature (96)..(96): n is a, c, g, or t
  misc_feature (116)..(116): n is a, c, g, or t

SEQ ID NO: 387029 - DNA, 774 bp, Homo Sapiens; identical to SEQ ID NO: 359535

SEQ ID NO: 387030 - DNA, 2385 bp, Homo Sapiens; identical to SEQ ID NO: 359536
  misc_feature (2363)..(2363): n is a, c, g, or t
  misc_feature (2369)..(2369): n is a, c, g, or t

SEQ ID NO: 387031 - DNA, 465 bp, Homo Sapiens; identical to SEQ ID NO: 359540
  misc_feature (44)..(44): n is a, c, g, or t

SEQ ID NO: 387032 - DNA, 465 bp, Homo Sapiens; identical to SEQ ID NO: 359541
  misc_feature (308)..(308): n is a, c, g, or t

SEQ ID NO: 387033 - DNA, 521 bp, Homo Sapiens; identical to SEQ ID NO: 359544
  misc_feature (58)..(58): n is a, c, g, or t
  misc_feature (108)..(108): n is a, c, g, or t
  misc_feature (188)..(188): n is a, c, g, or t

SEQ ID NO: 387034 - DNA, 1350 bp, Homo Sapiens; identical to SEQ ID NO: 359545
  misc_feature (1300)..(1300): n is a, c, g, or t
  misc_feature (1310)..(1310): n is a, c, g, or t
  misc_feature (1319)..(1319): n is a, c, g, or t
  misc_feature (1325)..(1325): n is a, c, g, or t
  misc_feature (1330)..(1330): n is a, c, g, or t

SEQ ID NO: 387035 - DNA, 1012 bp, Homo Sapiens; identical to SEQ ID NO: 359546

SEQ ID NO: 387036 - DNA, 679 bp, Homo Sapiens; identical to SEQ ID NO: 359548

SEQ ID NO: 387037 - DNA, 1442 bp, Homo Sapiens; identical to SEQ ID NO: 359549

SEQ ID NO: 387038 - DNA, 490 bp, Homo Sapiens; identical to SEQ ID NO: 359553

SEQ ID NO: 387039 - DNA, 460 bp, Homo Sapiens; identical to SEQ ID NO: 359554

SEQ ID NO: 387040 - DNA, 418 bp, Homo Sapiens; identical to SEQ ID NO: 359560

SEQ ID NO: 387041 - DNA, 840 bp, Homo Sapiens; identical to SEQ ID NO: 359561
  misc_feature (743)..(743): n is a, c, g, or t
  misc_feature (802)..(802): n is a, c, g, or t

SEQ ID NO: 387042 - DNA, 563 bp, Homo Sapiens; identical to SEQ ID NO: 359565

SEQ ID NO: 387043 - DNA, 395 bp, Homo Sapiens; identical to SEQ ID NO: 359566
  misc_feature (27)..(27): n is a, c, g, or t
  misc_feature (101)..(101): n is a, c, g, or t
  misc_feature (139)..(139): n is a, c, g, or t
  misc_feature (203)..(203): n is a, c, g, or t

SEQ ID NO: 387044 - DNA, 989 bp, Homo Sapiens; identical to SEQ ID NO: 359571
  misc_feature (933)..(933): n is a, c, g, or t
  misc_feature (951)..(951): n is a, c, g, or t

SEQ ID NO: 387045 - DNA, 386 bp, Homo Sapiens; identical to SEQ ID NO: 359572

SEQ ID NO: 387046 - DNA, 3438 bp, Homo Sapiens; identical to SEQ ID NO: 359573
  misc_feature (130)..(130): n is a, c, g, or t
  misc_feature (196)..(196): n is a, c, g, or t

SEQ ID NO: 387047 - DNA, 450 bp, Homo Sapiens; identical to SEQ ID NO: 359574
  misc_feature (22)..(22): n is a, c, g, or t
  misc_feature (57)..(57): n is a, c, g, or t
  misc_feature (246)..(246): n is a, c, g, or t

SEQ ID NO: 387048 - DNA, 1438 bp, Homo Sapiens; identical to SEQ ID NO: 359575
  misc_feature (1182)..(1182): n is a, c, g, or t

SEQ ID NO: 387049 - DNA, 968 bp, Homo Sapiens; identical to SEQ ID NO: 359576

SEQ ID NO: 387050 - DNA, 588 bp, Homo Sapiens; identical to SEQ ID NO: 359577

SEQ ID NO: 387051 - DNA, 427 bp, Homo Sapiens; identical to SEQ ID NO: 359578

SEQ ID NO: 387052 - DNA, 702 bp, Homo Sapiens; identical to SEQ ID NO: 359579

SEQ ID NO: 387053 - DNA, 456 bp, Homo Sapiens; identical to SEQ ID NO: 359580
  misc_feature (20)..(20): n is a, c, g, or t
  misc_feature (33)..(33): n is a, c, g, or t
  misc_feature (249)..(249): n is a, c, g, or t

SEQ ID NO: 387054 - DNA, 1584 bp, Homo Sapiens; identical to SEQ ID NO: 359586

SEQ ID NO: 387055 - DNA, 469 bp, Homo Sapiens; identical to SEQ ID NO: 359587
  misc_feature (44)..(44): n is a, c, g, or t

SEQ ID NO: 387056 - DNA, 383 bp, Homo Sapiens; identical to SEQ ID NO: 359592

SEQ ID NO: 387057 - DNA, 421 bp, Homo Sapiens; identical to SEQ ID NO: 359593

SEQ ID NO: 387058 - DNA, 540 bp, Homo Sapiens; identical to SEQ ID NO: 359602

SEQ ID NO: 387059 - DNA, 433 bp, Homo Sapiens; identical to SEQ ID NO: 359603
  misc_feature (14)..(14): n is a, c, g, or t
  misc_feature (42)..(42): n is a, c, g, or t
  misc_feature (73)..(73): n is a, c, g, or t
  misc_feature (130)..(130): n is a, c, g, or t
  misc_feature (182)..(182): n is a, c, g, or t

SEQ ID NO: 387060 - DNA, 694 bp, Homo Sapiens; identical to SEQ ID NO: 359615
  misc_feature (568)..(568): n is a, c, g, or t
  misc_feature (578)..(578): n is a, c, g, or t
  misc_feature (611)..(612): n is a, c, g, or t
  misc_feature (624)..(624): n is a, c, g, or t
  misc_feature (643)..(643): n is a, c, g, or t

SEQ ID NO: 387061 - DNA, 478 bp, Homo Sapiens; identical to SEQ ID NO: 359616
  misc_feature (15)..(15): n is a, c, g, or t
  misc_feature (23)..(23): n is a, c, g, or t
  misc_feature (83)..(83): n is a, c, g, or t
  misc_feature (113)..(113): n is a, c, g, or t
  misc_feature (119)..(119): n is a, c, g, or t
  misc_feature (158)..(158): n is a, c, g, or t

SEQ ID NO: 387062 - DNA, 2083 bp, Homo Sapiens; identical to SEQ ID NO: 359625
  misc_feature (107)..(107): n is a, c, g, or t

SEQ ID NO: 387063 - DNA, 361 bp, Homo Sapiens; identical to SEQ ID NO: 359626
  misc_feature (39)..(39): n is a, c, g, or t

SEQ ID NO: 387064 - DNA, 472 bp, Homo Sapiens; identical to SEQ ID NO: 359630

SEQ ID NO: 387065 - DNA, 382 bp, Homo Sapiens; identical to SEQ ID NO: 359631
  misc_feature (335)..(335): n is a, c, g, or t
  misc_feature (362)..(362): n is a, c, g, or t

SEQ ID NO: 387066 - DNA, 456 bp, Homo Sapiens; identical to SEQ ID NO: 359634
  misc_feature (422)..(422): n is a, c, g, or t
  misc_feature (428)..(428): n is a, c, g, or t
  misc_feature (437)..(437): n is a, c, g, or t

SEQ ID NO: 387067 - DNA, 679 bp, Homo Sapiens; identical to SEQ ID NO: 359635

SEQ ID NO: 387068 - DNA, 377 bp, Homo Sapiens; identical to SEQ ID NO: 359637
  misc_feature (332)..(332): n is a, c, g, or t

SEQ ID NO: 387069 - DNA, 757 bp, Homo Sapiens; identical to SEQ ID NO: 359638
  misc_feature (33)..(33): n is a, c, g, or t
  misc_feature (703)..(703): n is a, c, g, or t

SEQ ID NO: 387070 - DNA, 499 bp, Homo Sapiens; identical to SEQ ID NO: 359644

SEQ ID NO: 387071 - DNA, 498 bp, Homo Sapiens; identical to SEQ ID NO: 359645
  misc_feature (16)..(16): n is a, c, g, or t
  misc_feature (27)..(27): n is a, c, g, or t
  misc_feature (60)..(60): n is a, c, g, or t
  misc_feature (67)..(67): n is a, c, g, or t
  misc_feature (74)..(74): n is a, c, g, or t
  misc_feature (93)..(93): n is a, c, g, or t

SEQ ID NO: 387072 - DNA, 1721 bp, Homo Sapiens; identical to SEQ ID NO: 359646
  misc_feature (24)..(24): n is a, c, g, or t
  misc_feature (1537)..(1537): n is a, c, g, or t

SEQ ID NO: 387073 - DNA, 556 bp, Homo Sapiens; identical to SEQ ID NO: 359647

SEQ ID NO: 387074 - DNA, 912 bp, Homo Sapiens; identical to SEQ ID NO: 359648

SEQ ID NO: 387075 - DNA, 1093 bp, Homo Sapiens; identical to SEQ ID NO: 359653
  misc_feature (876)..(876): n is a, c, g, or t
  misc_feature (1040)..(1040): n is a, c, g, or t

SEQ ID NO: 387076 - DNA, 847 bp, Homo Sapiens; identical to SEQ ID NO: 359654

SEQ ID NO: 387077 - DNA, 474 bp, Homo Sapiens; identical to SEQ ID NO: 359655

SEQ ID NO: 387078 - DNA, 2902 bp, Homo Sapiens; identical to SEQ ID NO: 359656
  misc_feature (2507)..(2507): n is a, c, g, or t
  misc_feature (2546)..(2548): n is a, c, g, or t

SEQ ID NO: 387079 - DNA, 1172 bp, Homo Sapiens; identical to SEQ ID NO: 359662
  misc_feature (50)..(50): n is a, c, g, or t

SEQ ID NO: 387080 - DNA, 1614 bp, Homo Sapiens; identical to SEQ ID NO: 359663
  misc_feature (1225)..(1225): n is a, c, g, or t

SEQ ID NO: 387081 - DNA, 583 bp, Homo Sapiens; identical to SEQ ID NO: 359665

SEQ ID NO: 387082 - DNA, 500 bp, Homo Sapiens; identical to SEQ ID NO: 359666
  misc_feature (21)..(21): n is a, c, g, or t
  misc_feature (27)..(27): n is a, c, g, or t

SEQ ID NO: 387083 - DNA, 466 bp, Homo Sapiens; identical to SEQ ID NO: 359667
  misc_feature (33)..(33): n is a, c, g, or t
  misc_feature (40)..(40): n is a, c, g, or t
  misc_feature (54)..(54): n is a, c, g, or t

SEQ ID NO: 387084 - DNA, 415 bp, Homo Sapiens; identical to SEQ ID NO: 359668
  misc_feature (391)..(391): n is a, c, g, or t

SEQ ID NO: 387085 - DNA, 692 bp, Homo Sapiens; identical to SEQ ID NO: 359670
  misc_feature (49)..(49): n is a, c, g, or t
  misc_feature (550)..(550): n is a, c, g, or t

SEQ ID NO: 387086 - DNA, 673 bp, Homo Sapiens; identical to SEQ ID NO: 359671
  misc_feature (105)..(105): n is a, c, g, or t
  misc_feature (248)..(248): n is a, c, g, or t
  misc_feature (250)..(250): n is a, c, g, or t
  misc_feature (462)..(483): n is a, c, g, or t

SEQ ID NO: 387087 - DNA, 505 bp, Homo Sapiens; identical to SEQ ID NO: 359673

SEQ ID NO: 387088 - DNA, 478 bp, Homo Sapiens; identical to SEQ ID NO: 359674
  misc_feature (11)..(11): n is a, c, g, or t

SEQ ID NO: 387089 - DNA, 533 bp, Homo Sapiens; identical to SEQ ID NO: 359676

SEQ ID NO: 387090 - DNA, 884 bp, Homo Sapiens; identical to SEQ ID NO: 359677

SEQ ID NO: 387091 - DNA, 1357 bp, Homo Sapiens; identical to SEQ ID NO: 359690
  misc_feature (796)..(796): n is a, c, g, or t

SEQ ID NO: 387092 - DNA, 485 bp, Homo Sapiens; identical to SEQ ID NO: 359691
  misc_feature (16)..(16): n is a, c, g, or t
  misc_feature (50)..(50): n is a, c, g, or t

SEQ ID NO: 387093 - DNA, 431 bp, Homo Sapiens; identical to SEQ ID NO: 359692
  misc_feature (35)..(35): n is a, c, g, or t

SEQ ID NO: 387094 - DNA, 817 bp, Homo Sapiens; identical to SEQ ID NO: 359695
  misc_feature (229)..(255): n is a, c, g, or t

SEQ ID NO: 387095 - DNA, 677 bp, Homo Sapiens; identical to SEQ ID NO: 359696
  misc_feature (21)..(21): n is a, c, g, or t
  misc_feature (48)..(92): n is a, c, g, or t

SEQ ID NO: 387096 - DNA, 454 bp, Homo Sapiens; identical to SEQ ID NO: 359697
  misc_feature (14)..(14): n is a, c, g, or t
  misc_feature (29)..(29): n is a, c, g, or t

SEQ ID NO: 387097 - DNA, 1213 bp, Homo Sapiens; identical to SEQ ID NO: 359702
  misc_feature (70)..(70): n is a, c, g, or t

SEQ ID NO: 387098 - DNA, 270 bp, Homo Sapiens; identical to SEQ ID NO: 359703

SEQ ID NO: 387099 - DNA, 350 bp, Homo Sapiens; identical to SEQ ID NO: 359709
  misc_feature (217)..(293): n is a, c, g, or t

SEQ ID NO: 387100 - DNA, 771 bp, Homo Sapiens; identical to SEQ ID NO: 359710
  misc_feature (58)..(134): n is a, c, g, or t
  misc_feature (421)..(710): n is a, c, g, or t

SEQ ID NO: 387101 - DNA, 623 bp, Homo Sapiens; identical to SEQ ID NO: 359711

SEQ ID NO: 387102 - DNA, 1030 bp, Homo Sapiens; identical to SEQ ID NO: 359712

SEQ ID NO: 387103 - DNA, 447 bp, Homo Sapiens; identical to SEQ ID NO: 359716
  misc_feature (46)..(46): n is a, c, g, or t

SEQ ID NO: 387104 - DNA, 514 bp, Homo Sapiens; identical to SEQ ID NO: 359717

SEQ ID NO: 387105 - DNA, 854 bp, Homo Sapiens; identical to SEQ ID NO: 359729

SEQ ID NO: 387106 - DNA, 406 bp, Homo Sapiens; identical to SEQ ID NO: 359730
  misc_feature (28)..(28): n is a, c, g, or t
  misc_feature (34)..(34): n is a, c, g, or t
  misc_feature (42)..(42): n is a, c, g, or t
  misc_feature (140)..(140): n is a, c, g, or t
  misc_feature (147)..(147): n is a, c, g, or t
  misc_feature (238)..(238): n is a, c, g, or t

SEQ ID NO: 387107 - DNA, 440 bp, Homo Sapiens; identical to SEQ ID NO: 359731
  misc_feature (163)..(163): n is a, c, g, or t

SEQ ID NO: 387108 - DNA, 891 bp, Homo Sapiens; identical to SEQ ID NO: 359773
  misc_feature (403)..(411): n is a, c, g, or t

SEQ ID NO: 387109 - DNA, 691 bp, Homo Sapiens; identical to SEQ ID NO: 359774
  misc_feature (631)..(632): n is a, c, g, or t

SEQ ID NO: 387110 - DNA, 466 bp, Homo Sapiens; identical to SEQ ID NO: 359775

SEQ ID NO: 387111 - DNA, 789 bp, Homo Sapiens; identical to SEQ ID NO: 359780

SEQ ID NO: 387112 - DNA, 968 bp, Homo Sapiens; identical to SEQ ID NO: 359781
  misc_feature (24)..(24): n is a, c, g, or t
  misc_feature (532)..(633): n is a, c, g, or t
  misc_feature (745)..(755): n is a, c, g, or t

SEQ ID NO: 387113 - DNA, 534 bp, Homo Sapiens; identical to SEQ ID NO: 359791

SEQ ID NO: 387114 - DNA, 531 bp, Homo Sapiens; identical to SEQ ID NO: 359792

SEQ ID NO: 387115 - DNA, 1349 bp, Homo Sapiens; identical to SEQ ID NO: 359793
  misc_feature (261)..(280): n is a, c, g, or t
  misc_feature (1061)..(1073): n is a, c, g, or t
  misc_feature (1203)..(1213): n is a, c, g, or t

SEQ ID NO: 387116 - DNA, 799 bp, Homo Sapiens; identical to SEQ ID NO: 178389
  misc_feature (129)..(148): n is a, c, g, or t
  misc_feature (724)..(725): n is a, c, g, or t
  misc_feature (732)..(732): n is a, c, g, or t
  misc_feature (735)..(736): n is a, c, g, or t
  misc_feature (740)..(742): n is a, c, g, or t
  misc_feature (744)..(750): n is a, c, g, or t

SEQ ID NO: 387117 - DNA, 713 bp, Homo Sapiens; identical to SEQ ID NO: 359795

SEQ ID NO: 387118 - DNA, 574 bp, Homo Sapiens; identical to SEQ ID NO: 359796
  misc_feature (63)..(63): n is a, c, g, or t
  misc_feature (77)..(77): n is a, c, g, or t
  misc_feature (90)..(90): n is a, c, g, or t
  misc_feature (115)..(115): n is a, c, g, or t
  misc_feature (119)..(119): n is a, c, g, or t
  misc_feature (144)..(144): n is a, c, g, or t
  misc_feature (168)..(168): n is a, c, g, or t

SEQ ID NO: 387119 - DNA, 1252 bp, Homo Sapiens; identical to SEQ ID NO: 359814
  misc_feature (99)..(111): n is a, c, g, or t

SEQ ID NO: 387120 - DNA, 859 bp, Homo Sapiens; identical to SEQ ID NO: 359815

SEQ ID NO: 387121 - DNA, 939 bp, Homo Sapiens; identical to SEQ ID NO: 359817

SEQ ID NO: 387122 - DNA, 521 bp, Homo Sapiens; identical to SEQ ID NO: 359818
  misc_feature (36)..(36): n is a, c, g, or t
  misc_feature (69)..(69): n is a, c, g, or t
  misc_feature (82)..(82): n is a, c, g, or t
  misc_feature (87)..(87): n is a, c, g, or t
  misc_feature (112)..(112): n is a, c, g, or t

SEQ ID NO: 387123 - DNA, 677 bp, Homo Sapiens; identical to SEQ ID NO: 359839
  misc_feature (28)..(28): n is a, c, g, or t
  misc_feature (80)..(80): n is a, c, g, or t
  misc_feature (156)..(156): n is a, c, g, or t

SEQ ID NO: 387124 - DNA, 473 bp, Homo Sapiens; identical to SEQ ID NO: 359840
  misc_feature (37)..(37): n is a, c, g, or t
  misc_feature (52)..(52): n is a, c, g, or t
  misc_feature (85)..(85): n is a, c, g, or t
  misc_feature (259)..(259): n is a, c, g, or t

SEQ ID NO: 387125 - DNA, 1089 bp, Homo Sapiens; identical to SEQ ID NO: 359847

SEQ ID NO: 387126 - DNA, 380 bp, Homo Sapiens; identical to SEQ ID NO: 359848

SEQ ID NO: 387127 - DNA, 987 bp, Homo Sapiens; identical to SEQ ID NO: 359851

SEQ ID NO: 387128 - DNA, 996 bp, Homo Sapiens; identical to SEQ ID NO: 359852

SEQ ID NO: 387129 - DNA, 278 bp, Homo Sapiens; identical to SEQ ID NO: 359853

SEQ ID NO: 387130 - DNA, 673 bp, Homo Sapiens; identical to SEQ ID NO: 359863
  misc_feature (465)..(500): n is a, c, g, or t

SEQ ID NO: 387131 - DNA, 577 bp, Homo Sapiens; identical to SEQ ID NO: 800
  misc_feature (367)..(402): n is a, c, g, or t

SEQ ID NO: 387132 - DNA, 1384 bp, Homo Sapiens; identical to SEQ ID NO: 359871

SEQ ID NO: 387133 - DNA, 1017 bp, Homo Sapiens; identical to SEQ ID NO: 359872
  misc_feature (957)..(957): n is a, c, g, or t
  misc_feature (962)..(962): n is a, c, g, or t
  misc_feature (972)..(972): n is a, c, g, or t

SEQ ID NO: 387134 - DNA, 539 bp, Homo Sapiens; identical to SEQ ID NO: 359873
  misc_feature (36)..(36): n is a, c, g, or t
  misc_feature (56)..(56): n is a, c, g, or t
  misc_feature (67)..(67): n is a, c, g, or t
  misc_feature (83)..(83): n is a, c, g, or t
  misc_feature (236)..(236): n is a, c, g, or t
  misc_feature (285)..(285): n is a, c, g, or t

SEQ ID NO: 387135 - DNA, 699 bp, Homo Sapiens; identical to SEQ ID NO: 359902
  misc_feature (52)..(52): n is a, c, g, or t
  misc_feature (54)..(54): n is a, c, g, or t
  misc_feature (65)..(65): n is a, c, g, or t
  misc_feature (76)..(76): n is a, c, g, or t

SEQ ID NO: 387136 - DNA, 237 bp, Homo Sapiens; identical to SEQ ID NO: 359903
  misc_feature (225)..(225): n is a, c, g, or t

SEQ ID NO: 387137 - DNA, 638 bp, Homo Sapiens; identical to SEQ ID NO: 359904
  misc_feature (509)..(509): n is a, c, g, or t
  misc_feature (572)..(572): n is a, c, g, or t
  misc_feature (607)..(607): n is a, c, g, or t

SEQ ID NO: 387138 - DNA, 504 bp, Homo Sapiens; identical to SEQ ID NO: 359905
  misc_feature (360)..(360): n is a, c, g, or t
  misc_feature (417)..(417): n is a, c, g, or t
  misc_feature (476)..(476): n is a, c, g, or t

SEQ ID NO: 387139 - DNA, 1809 bp, Homo Sapiens; identical to SEQ ID NO: 359908
  misc_feature (936)..(936): n is a, c, g, or t
  misc_feature (1014)..(1014): n is a, c, g, or t

SEQ ID NO: 387140 - DNA, 443 bp, Homo Sapiens; identical to SEQ ID NO: 359909
  misc_feature (51)..(51): n is a, c, g, or t
  misc_feature (216)..(216): n is a, c, g, or t
  misc_feature (229)..(229): n is a, c, g, or t

SEQ ID NO: 387141 - DNA, 1302 bp, Homo Sapiens; identical to SEQ ID NO: 359914
  misc_feature (127)..(127): n is a, c, g, or t
  misc_feature (371)..(371): n is a, c, g, or t
  misc_feature (385)..(385): n is a, c, g, or t
  misc_feature (452)..(452): n is a, c, g, or t
  misc_feature (1149)..(1173): n is a, c, g, or t
  misc_feature (1227)..(1227): n is a, c, g, or t

SEQ ID NO: 387142 - DNA, 809 bp, Homo Sapiens; identical to SEQ ID NO: 359915
  misc_feature (677)..(677): n is a, c, g, or t

SEQ ID NO: 387143 - DNA, 1099 bp, Homo Sapiens; identical to SEQ ID NO: 359916

SEQ ID NO: 387144 - DNA, 1878 bp, Homo Sapiens; identical to SEQ ID NO: 359917
  misc_feature (494)..(552): n is a, c, g, or t

SEQ ID NO: 387145 - DNA, 314 bp, Homo Sapiens; identical to SEQ ID NO: 359918
  misc_feature (128)..(128): n is a, c, g, or t
  misc_feature (197)..(197): n is a, c, g, or t
  misc_feature (212)..(212): n is a, c, g, or t
  misc_feature (219)..(219): n is a, c, g, or t
  misc_feature (262)..(262): n is a, c, g, or t

SEQ ID NO: 387146 - DNA, 791 bp, Homo Sapiens; identical to SEQ ID NO: 359920
  misc_feature (12)..(12): n is a, c, g, or t
  misc_feature (54)..(54): n is a, c, g, or t
  misc_feature (106)..(106): n is a, c, g, or t
  misc_feature (149)..(149): n is a, c, g, or t
  misc_feature (291)..(291): n is a, c, g, or t
  misc_feature (305)..(322): n is a, c, g, or t
  misc_feature (343)..(343): n is a, c, g, or t
  misc_feature (385)..(385): n is a, c, g, or t
  misc_feature (407)..(407): n is a, c, g, or t
  misc_feature (444)..(444): n is a, c, g, or t
  misc_feature (618)..(618): n is a, c, g, or t

SEQ ID NO: 387147 - DNA, 919 bp, Homo Sapiens; identical to SEQ ID NO: 359921
  misc_feature (176)..(211): n is a, c, g, or t
  misc_feature (790)..(790): n is a, c, g, or t

SEQ ID NO: 387148 - DNA, 750 bp, Homo Sapiens; identical to SEQ ID NO: 359929
  misc_feature (36)..(36): n is a, c, g, or t
  misc_feature (66)..(66): n is a, c, g, or t
  misc_feature (82)..(82): n is a, c, g, or t
  misc_feature (198)..(198): n is a, c, g, or t
  misc_feature (221)..(221): n is a, c, g, or t
  misc_feature (483)..(505): n is a, c, g, or t

SEQ ID NO: 387149 - DNA, 938 bp, Homo Sapiens; identical to SEQ ID NO: 359930
  misc_feature (138)..(138): n is a, c, g, or t
  misc_feature (668)..(690): n is a, c, g, or t

SEQ ID NO: 387150 - DNA, 751 bp, Homo Sapiens; identical to SEQ ID NO: 359938
  misc_feature (678)..(678): n is a, c, g, or t
  misc_feature (716)..(716): n is a, c, g, or t

SEQ ID NO: 387151 - DNA, 1047 bp, Homo Sapiens; identical to SEQ ID NO: 359939

SEQ ID NO: 387152 - DNA, 1369 bp, Homo Sapiens; identical to SEQ ID NO: 359941

SEQ ID NO: 387153 - DNA, 818 bp, Homo Sapiens; identical to SEQ ID NO: 359942

SEQ ID NO: 387154 - DNA, 688 bp, Homo Sapiens; identical to SEQ ID NO: 359943

SEQ ID NO: 387155 - DNA, 596 bp, Homo Sapiens; identical to SEQ ID NO: 359948
  misc_feature (169)..(220): n is a, c, g, or t
  misc_feature (329)..(329): n is a, c, g, or t

SEQ ID NO: 387156 - DNA, 673 bp, Homo Sapiens; identical to SEQ ID NO: 359949
  misc_feature (229)..(273): n is a, c, g, or t

SEQ ID NO: 387157 - DNA, 1279 bp, Homo Sapiens; identical to SEQ ID NO: 359989

SEQ ID NO: 387158 - DNA, 590 bp, Homo Sapiens; identical to SEQ ID NO: 359990
  misc_feature (470)..(470): n is a, c, g, or t
  misc_feature (508)..(508): n is a, c, g, or t
  misc_feature (521)..(521): n is a, c, g, or t
  misc_feature (535)..(535): n is a, c, g, or t

SEQ ID NO: 387159 - DNA, 485 bp, Homo Sapiens; identical to SEQ ID NO: 360007
  misc_feature (2)..(2): n is a, c, g, or t
  misc_feature (56)..(56): n is a, c, g, or t
  misc_feature (69)..(69): n is a, c, g, or t
  misc_feature (92)..(92): n is a, c, g, or t

SEQ ID NO: 387160 - DNA, 1152 bp, Homo Sapiens; identical to SEQ ID NO: 360008

SEQ ID NO: 387161 - DNA, 445 bp, Homo Sapiens; identical to SEQ ID NO: 360016
  misc_feature (231)..(231): n is a, c, g, or t
  misc_feature (351)..(353): n is a, c, g, or t
  misc_feature (444)..(444): n is a, c, g, or t

SEQ ID NO: 387162 - DNA, 231 bp, Homo Sapiens; identical to SEQ ID NO: 360017

SEQ ID NO: 387163 - DNA, 2413 bp, Homo Sapiens; identical to SEQ ID NO: 360040
  misc_feature (219)..(265): n is a, c, g, or t
  misc_feature (471)..(518): n is a, c, g, or t

SEQ ID NO: 387164 - DNA, 490 bp, Homo Sapiens; identical to SEQ ID NO: 360041
  misc_feature (341)..(355): n is a, c, g, or t

SEQ ID NO: 387165 - DNA, 604 bp, Homo Sapiens; identical to SEQ ID NO: 360056

SEQ ID NO: 387166 - DNA, 1117 bp, Homo Sapiens; identical to SEQ ID NO: 360057
  misc_feature (104)..(112): n is a, c, g, or t
  misc_feature (584)..(649): n is a, c, g, or t

SEQ ID NO: 387167 - DNA, 474 bp, Homo Sapiens; identical to SEQ ID NO: 360059
  misc_feature (261)..(318): n is a, c, g, or t

SEQ ID NO: 387168 - DNA, 834 bp, Homo Sapiens; identical to SEQ ID NO: 360060

SEQ ID NO: 387169 - DNA, 1271 bp, Homo Sapiens; identical to SEQ ID NO: 360080
  misc_feature (47)..(83): n is a, c, g, or t

SEQ ID NO: 387170 - DNA, 976 bp, Homo Sapiens; identical to SEQ ID NO: 360081

SEQ ID NO: 387171 - DNA, 929 bp, Homo Sapiens; identical to SEQ ID NO: 360082
  misc_feature (51)..(82): n is a, c, g, or t

SEQ ID NO: 387172 - DNA, 695 bp, Homo Sapiens; identical to SEQ ID NO: 360086

SEQ ID NO: 387173 - DNA, 1740 bp, Homo Sapiens; identical to SEQ ID NO: 360087
  misc_feature (77)..(78): n is a, c, g, or t

SEQ ID NO: 387174 - DNA, 652 bp, Homo Sapiens; identical to SEQ ID NO: 360093

SEQ ID NO: 387175 - DNA, 930 bp, Homo Sapiens; identical to SEQ ID NO: 360094

SEQ ID NO: 387176 - DNA, 638 bp, Homo Sapiens; identical to SEQ ID NO: 360095
  misc_feature (299)..(331): n is a, c, g, or t

SEQ ID NO: 387177 - DNA, 502 bp, Homo Sapiens; identical to SEQ ID NO: 360096
  misc_feature (237)..(237): n is a, c, g, or t

SEQ ID NO: 387178 - DNA, 835 bp, Homo Sapiens; identical to SEQ ID NO: 360103

SEQ ID NO: 387179 - DNA, 1743 bp, Homo Sapiens; identical to SEQ ID NO: 360104
  misc_feature (1529)..(1543): n is a, c, g, or t
  misc_feature (1626)..(1662): n is a, c, g, or t

SEQ ID NO: 387180 - DNA, 421 bp, Homo Sapiens; identical to SEQ ID NO: 360106
  misc_feature (200)..(228): n is a, c, g, or t
  misc_feature (392)..(392): n is a, c, g, or t

SEQ ID NO: 387181 - DNA, 1260 bp, Homo Sapiens; identical to SEQ ID NO: 360107
  misc_feature (807)..(835): n is a, c, g, or t

SEQ ID NO: 387182 - DNA, 1768 bp, Homo Sapiens; identical to SEQ ID NO: 360118
  misc_feature (239)..(282): n is a, c, g, or t

SEQ ID NO: 387183 - DNA, 901 bp, Homo Sapiens; identical to SEQ ID NO: 360119
  misc_feature (397)..(440): n is a, c, g, or t

SEQ ID NO: 387184 - DNA, 1330 bp, Homo Sapiens; identical to SEQ ID NO: 360122

SEQ ID NO: 387185 - DNA, 444 bp, Homo Sapiens; identical to SEQ ID NO: 360123
  misc_feature (40)..(40): n is a, c, g, or t
  misc_feature (49)..(49): n is a, c, g, or t
  misc_feature (77)..(77): n is a, c, g, or t
  misc_feature (92)..(92): n is a, c, g, or t
  misc_feature (99)..(99): n is a, c, g, or t
  misc_feature (109)..(109): n is a, c, g, or t
  misc_feature (133)..(133): n is a, c, g, or t
  misc_feature (172)..(172): n is a, c, g, or t

SEQ ID NO: 387186 - DNA, 800 bp, Homo Sapiens; identical to SEQ ID NO: 360126
  misc_feature (176)..(195): n is a, c, g, or t
  misc_feature (329)..(366): n is a, c, g, or t
  misc_feature (691)..(691): n is a, c, g, or t
  misc_feature (738)..(738): n is a, c, g, or t
  misc_feature (756)..(756): n is a, c, g, or t
  misc_feature (769)..(769): n is a, c, g, or t
  misc_feature (776)..(776): n is a, c, g, or t

SEQ ID NO: 387187 - DNA, 337 bp, Homo Sapiens; identical to SEQ ID NO: 360127
  misc_feature (165)..(201): n is a, c, g, or t

SEQ ID NO: 387188 - DNA, 779 bp, Homo Sapiens; identical to SEQ ID NO: 360128
  misc_feature (17)..(17): n is a, c, g, or t
  misc_feature (44)..(44): n is a, c, g, or t
  misc_feature (84)..(84): n is a, c, g, or t
  misc_feature (183)..(183): n is a, c, g, or t

SEQ ID NO: 387189 - DNA, 422 bp, Homo Sapiens; identical to SEQ ID NO: 360129

SEQ ID NO: 387190 - DNA, 933 bp, Homo Sapiens; identical to SEQ ID NO: 360138

SEQ ID NO: 387191 - DNA, 902 bp, Homo Sapiens; identical to SEQ ID NO: 360139

SEQ ID NO: 387192 - DNA, 2248 bp, Homo Sapiens; identical to SEQ ID NO: 360156
  misc_feature (1897)..(1988): n is a, c, g, or t

SEQ ID NO: 387193 - DNA, 461 bp, Homo Sapiens; identical to SEQ ID NO: 360157
  misc_feature (107)..(168): n is a, c, g, or t

SEQ ID NO: 387194 - DNA, 556 bp, Homo Sapiens; identical to SEQ ID NO: 360158

SEQ ID NO: 387195 - DNA, 1419 bp, Homo Sapiens; identical to SEQ ID NO: 360163
  misc_feature (160)..(160): n is a, c, g, or t
  misc_feature (565)..(624): n is a, c, g, or t
  misc_feature (764)..(811): n is a, c, g, or t

SEQ ID NO: 387196 - DNA, 823 bp, Homo Sapiens; identical to SEQ ID NO: 360164
  misc_feature (139)..(198): n is a, c, g, or t

SEQ ID NO: 387197 - DNA, 2063 bp, Homo Sapiens; identical to SEQ ID NO: 360170

SEQ ID NO: 387198 - DNA, 860 bp, Homo Sapiens; identical to SEQ ID NO: 360171

SEQ ID NO: 387199 - DNA, 1193 bp, Homo Sapiens; identical to SEQ ID NO: 360181

SEQ ID NO: 387200 - DNA, 855 bp, Homo Sapiens; identical to SEQ ID NO: 360182

SEQ ID NO: 387201 - DNA, 1469 bp, Homo Sapiens; identical to SEQ ID NO: 360187
  misc_feature (454)..(462): n is a, c, g, or t

SEQ ID NO: 387202 - DNA, 504 bp, Homo Sapiens; identical to SEQ ID NO: 360188
  misc_feature (181)..(181): n is a, c, g, or t
  misc_feature (418)..(418): n is a, c, g, or t
  misc_feature (444)..(444): n is a, c, g, or t
  misc_feature (485)..(485): n is a, c, g, or t

SEQ ID NO: 387203 - DNA, 1398 bp, Homo Sapiens; identical to SEQ ID NO: 360196
  misc_feature (40)..(40): n is a, c, g, or t
  misc_feature (1196)..(1196): n is a, c, g, or t
  misc_feature (1205)..(1205): n is a, c, g, or t
  misc_feature (1321)..(1321): n is a, c, g, or t
  misc_feature (1349)..(1349): n is a, c, g, or t

SEQ ID NO: 387204 - DNA, 783 bp, Homo Sapiens; identical to SEQ ID NO: 360197

SEQ ID NO: 387205 - DNA, 761 bp, Homo Sapiens; identical to SEQ ID NO: 94476

SEQ ID NO: 387206 - DNA, 742 bp, Homo Sapiens; identical to SEQ ID NO: 360203

SEQ ID NO: 387207 - DNA, 641 bp, Homo Sapiens; identical to SEQ ID NO: 360207
  misc_feature (589)..(589): n is a, c, g, or t

SEQ ID NO: 387208 - DNA, 1589 bp, Homo Sapiens; identical to SEQ ID NO: 360208

SEQ ID NO: 387209 - DNA, 2298 bp, Homo Sapiens; identical to SEQ ID NO: 360210
  misc_feature (1409)..(1418): n is a, c, g, or t
  misc_feature (2130)..(2130): n is a, c, g, or t
  misc_feature (2148)..(2148): n is a, c, g, or t
  misc_feature (2165)..(2165): n is a, c, g, or t
  misc_feature (2189)..(2189): n is a, c, g, or t
  misc_feature (2198)..(2198): n is a, c, g, or t
  misc_feature (2224)..(2224): n is a, c, g, or t
  misc_feature (2233)..(2233): n is a, c, g, or t
  misc_feature (2247)..(2247): n is a, c, g, or t
  misc_feature (2255)..(2255): n is a, c, g, or t
  misc_feature (2260)..(2260): n is a, c, g, or t
  misc_feature (2277)..(2277): n is a, c, g, or t
  misc_feature (2282)..(2282): n is a, c, g, or t

SEQ ID NO: 387210 - DNA, 445 bp, Homo Sapiens; identical to SEQ ID NO: 360211

SEQ ID NO: 387211 - DNA, 1428 bp, Homo Sapiens; identical to SEQ ID NO: 360218
  misc_feature (37)..(37): n is a, c, g, or t
  misc_feature (76)..(98): n is a, c, g, or t
  misc_feature (149)..(149): n is a, c, g, or t
  misc_feature (289)..(289): n is a, c, g, or t

SEQ ID NO: 387212 - DNA, 1266 bp, Homo Sapiens; identical to SEQ ID NO: 360219
  misc_feature (54)..(90): n is a, c, g, or t
  misc_feature (1135)..(1135): n is a, c, g, or t
  misc_feature (1153)..(1153): n is a, c, g, or t
  misc_feature (1170)..(1170): n is a, c, g, or t

SEQ ID NO: 387213 - DNA, 1043 bp, Homo Sapiens; identical to SEQ ID NO: 360224

SEQ ID NO: 387214 - DNA, 556 bp, Homo Sapiens; identical to SEQ ID NO: 360225
  misc_feature (43)..(43): n is a, c, g, or t
  misc_feature (46)..(46): n is a, c, g, or t
  misc_feature (167)..(167): n is a, c, g, or t

SEQ ID NO: 387215 - DNA, 894 bp, Homo Sapiens; identical to SEQ ID NO: 360226
  misc_feature (391)..(429): n is a, c, g, or t

SEQ ID NO: 387216 - DNA, 1510 bp, Homo Sapiens; identical to SEQ ID NO: 360227
  misc_feature (781)..(818): n is a, c, g, or t

SEQ ID NO: 387217 - DNA, 380 bp, Homo Sapiens; identical to SEQ ID NO: 360228

SEQ ID NO: 387218 - DNA, 567 bp, Homo Sapiens; identical to SEQ ID NO: 360230

SEQ ID NO: 387219 - DNA, 1683 bp, Homo Sapiens; identical to SEQ ID NO: 360231

SEQ ID NO: 387220 - DNA, 886 bp, Homo Sapiens; identical to SEQ ID NO: 360232

SEQ ID NO: 387221 - DNA, 781 bp, Homo Sapiens; identical to SEQ ID NO: 360233
  misc_feature (14)..(14): n is a, c, g, or t
  misc_feature (33)..(33): n is a, c, g, or t
  misc_feature (40)..(40): n is a, c, g, or t
  misc_feature (57)..(57): n is a, c, g, or t
  misc_feature (316)..(362): n is a, c, g, or t

SEQ ID NO: 387222 - DNA, 543 bp, Homo Sapiens; identical to SEQ ID NO: 360234

SEQ ID NO: 387223 - DNA, 466 bp, Homo Sapiens; identical to SEQ ID NO: 360235
  misc_feature (33)..(33): n is a, c, g, or t
  misc_feature (45)..(45): n is a, c, g, or t

SEQ ID NO: 387224 - DNA, 383 bp, Homo Sapiens; identical to SEQ ID NO: 360236
  misc_feature (47)..(88): n is a, c, g, or t
  misc_feature (153)..(176): n is a, c, g, or t

SEQ ID NO: 387225 - DNA, 388 bp, Homo Sapiens; identical to SEQ ID NO: 360237

SEQ ID NO: 387226 - DNA, 1224 bp, Homo Sapiens; identical to SEQ ID NO: 360241
  misc_feature (1134)..(1165): n is a, c, g, or t

SEQ ID NO: 387227 - DNA, 1066 bp, Homo Sapiens; identical to SEQ ID NO: 360242

SEQ ID NO: 387228 - DNA, 520 bp, Homo Sapiens; identical to SEQ ID NO: 360249

SEQ ID NO: 387229 - DNA, 493 bp, Homo Sapiens; identical to SEQ ID NO: 360250
  misc_feature (25)..(25): n is a, c, g, or t
  misc_feature (38)..(38): n is a, c, g, or t
  misc_feature (43)..(43): n is a, c, g, or t
  misc_feature (50)..(50): n is a, c, g, or t
  misc_feature (69)..(69): n is a, c, g, or t
  misc_feature (83)..(83): n is a, c, g, or t
  misc_feature (110)..(110): n is a, c, g, or t
  misc_feature (155)..(155): n is a, c, g, or t
  misc_feature (293)..(293): n is a, c, g, or t
  misc_feature (398)..(398): n is a, c, g, or t

SEQ ID NO: 387230 - DNA, 2909 bp, Homo Sapiens; identical to SEQ ID NO: 360256
  misc_feature (2199)..(2199): n is a, c, g, or t

SEQ ID NO: 387231 - DNA, 288 bp, Homo Sapiens; identical to SEQ ID NO: 360257

SEQ ID NO: 387232 - DNA, 541 bp, Homo Sapiens; identical to SEQ ID NO: 360264
  misc_feature (25)..(25): n is a, c, g, or t
  misc_feature (490)..(490): n is a, c, g, or t

SEQ ID NO: 387233 - DNA, 378 bp, Homo Sapiens; identical to SEQ ID NO: 360265
  misc_feature (27)..(27): n is a, c, g, or t
  misc_feature (38)..(38): n is a, c, g, or t

SEQ ID NO: 387234 - DNA, 1014 bp, Homo Sapiens; identical to SEQ ID NO: 360276

SEQ ID NO: 387235 - DNA, 1312 bp, Homo Sapiens; identical to SEQ ID NO: 360277
  misc_feature (1021)..(1030): n is a, c, g, or t
  misc_feature (1044)..(1044): n is a, c, g, or t

SEQ ID NO: 387236 - DNA, 2088 bp, Homo Sapiens; identical to SEQ ID NO: 360293
  misc_feature (868)..(868): n is a, c, g, or t

SEQ ID NO: 387237 - DNA, 846 bp, Homo Sapiens; identical to SEQ ID NO: 360294

SEQ ID NO: 387238 - DNA, 902 bp, Homo Sapiens; identical to SEQ ID NO: 360297
  misc_feature (838)..(838): n is a, c, g, or t

SEQ ID NO: 387239 - DNA, 1005 bp, Homo Sapiens; identical to SEQ ID NO: 360298
  misc_feature (170)..(317): n is a, c, g, or t
  misc_feature (507)..(628): n is a, c, g, or t

SEQ ID NO: 387240 - DNA, 470 bp, Homo Sapiens; identical to SEQ ID NO: 360313

SEQ ID NO: 387241 - DNA, 547 bp, Homo Sapiens; identical to SEQ ID NO: 360314
  misc_feature (328)..(328): n is a, c, g, or t
  misc_feature (437)..(437): n is a, c, g, or t
  misc_feature (442)..(442): n is a, c, g, or t
  misc_feature (527)..(527): n is a, c, g, or t

SEQ ID NO: 387242 - DNA, 825 bp, Homo Sapiens; identical to SEQ ID NO: 360321
  misc_feature (708)..(708): n is a, c, g, or t
  misc_feature (749)..(749): n is a, c, g, or t
  misc_feature (754)..(754): n is a, c, g, or t
  misc_feature (776)..(776): n is a, c, g, or t
  misc_feature (785)..(785): n is a, c, g, or t
  misc_feature (811)..(811): n is a, c, g, or t

SEQ ID NO: 387243 - DNA, 1157 bp, Homo Sapiens; identical to SEQ ID NO: 360322
  misc_feature (134)..(148): n is a, c, g, or t

SEQ ID NO: 387244 - DNA, 726 bp, Homo Sapiens; identical to SEQ ID NO: 360323
  misc_feature (136)..(148): n is a, c, g, or t
  misc_feature (455)..(456): n is a, c, g, or t
  misc_feature (460)..(461): n is a, c, g, or t
  misc_feature (464)..(491): n is a, c, g, or t

SEQ ID NO: 387245 - DNA, 344 bp, Homo Sapiens; identical to SEQ ID NO: 360324
  misc_feature (33)..(33): n is a, c, g, or t
  misc_feature (64)..(64): n is a, c, g, or t
  misc_feature (73)..(100): n is a, c, g, or t

SEQ ID NO: 387246 - DNA, 352 bp, Homo Sapiens; identical to SEQ ID NO: 360325
  misc_feature (81)..(81): n is a, c, g, or t
  misc_feature (83)..(112): n is a, c, g, or t

SEQ ID NO: 387247 - DNA, 473 bp, Homo Sapiens; identical to SEQ ID NO: 360327

SEQ ID NO: 387248 - DNA, 1080 bp, Homo Sapiens; identical to SEQ ID NO: 360328

SEQ ID NO: 387249 - DNA, 1842 bp, Homo Sapiens; identical to SEQ ID NO: 360329
  misc_feature (1598)..(1617): n is a, c, g, or t
  misc_feature (1758)..(1758): n is a, c, g, or t
  misc_feature (1774)..(1774): n is a, c, g, or t

SEQ ID NO: 387250 - DNA, 1242 bp, Homo Sapiens; identical to SEQ ID NO: 360345

SEQ ID NO: 387251 - DNA, 480 bp, Homo Sapiens; identical to SEQ ID NO: 360346
  misc_feature (26)..(26): n is a, c, g, or t
  misc_feature (79)..(79): n is a, c, g, or t

SEQ ID NO: 387252 - DNA, 1132 bp, Homo Sapiens; identical to SEQ ID NO: 360355

SEQ ID NO: 387253 - DNA, 354 bp, Homo Sapiens; identical to SEQ ID NO: 360356
  misc_feature (16)..(16): n is a, c, g, or t
  misc_feature (224)..(238): n is a, c, g, or t

SEQ ID NO: 387254 - DNA, 275 bp, Homo Sapiens; identical to SEQ ID NO: 360363
  misc_feature (18)..(18): n is a, c, g, or t

SEQ ID NO: 387255 - DNA, 467 bp, Homo Sapiens; identical to SEQ ID NO: 360364

SEQ ID NO: 387256 - DNA, 1632 bp, Homo Sapiens; identical to SEQ ID NO: 360365
  misc_feature (15)..(15): n is a, c, g, or t

SEQ ID NO: 387257 - DNA, 929 bp, Homo Sapiens; identical to SEQ ID NO: 360381

SEQ ID NO: 387258 - DNA, 1026 bp, Homo Sapiens; identical to SEQ ID NO: 360382

SEQ ID NO: 387259 - DNA, 655 bp, Homo Sapiens; identical to SEQ ID NO: 360383

SEQ ID NO: 387260 - DNA, 423 bp, Homo Sapiens; identical to SEQ ID NO: 360384
  misc_feature (64)..(64): n is a, c, g, or t
  misc_feature (304)..(304): n is a, c, g, or t

SEQ ID NO: 387261 - DNA, 1216 bp, Homo Sapiens; identical to SEQ ID NO: 360387
  misc_feature (43)..(79): n is a, c, g, or t

SEQ ID NO: 387262 - DNA, 1296 bp, Homo Sapiens; identical to SEQ ID NO: 360388

SEQ ID NO: 387263 - DNA, 1714 bp, Homo Sapiens; identical to SEQ ID NO: 360389

SEQ ID NO: 387264 - DNA, 865 bp, Homo Sapiens; identical to SEQ ID NO: 360390

SEQ ID NO: 387265 - DNA, 571 bp, Homo Sapiens; identical to SEQ ID NO: 360394

SEQ ID NO: 387266 - DNA, 1024 bp, Homo Sapiens; identical to SEQ ID NO: 360395
  misc_feature (11)..(11): n is a, c, g, or t

SEQ ID NO: 387267 - DNA, 474 bp, Homo Sapiens; identical to SEQ ID NO: 360409

SEQ ID NO: 387268 - DNA, 469 bp, Homo Sapiens; identical to SEQ ID NO: 360410
  misc_feature (23)..(23): n is a, c, g, or t
  misc_feature (33)..(33): n is a, c, g, or t
  misc_feature (40)..(40): n is a, c, g, or t
  misc_feature (59)..(59): n is a, c, g, or t
  misc_feature (64)..(64): n is a, c, g, or t
  misc_feature (100)..(100): n is a, c, g, or t
  misc_feature (243)..(243): n is a, c, g, or t

SEQ ID NO: 387269 - DNA, 1190 bp, Homo Sapiens; identical to SEQ ID NO: 360413
  misc_feature (946)..(979): n is a, c, g, or t

SEQ ID NO: 387270 - DNA, 579 bp, Homo Sapiens; identical to SEQ ID NO: 360414
  misc_feature (471)..(471): n is a, c, g, or t
  misc_feature (509)..(509): n is a, c, g, or t

SEQ ID NO: 387271 - DNA, 1170 bp, Homo Sapiens; identical to SEQ ID NO: 360415
  misc_feature (918)..(958): n is a, c, g, or t

SEQ ID NO: 387272 - DNA, 342 bp, Homo Sapiens; identical to SEQ ID NO: 360416
  misc_feature (24)..(24): n is a, c, g, or t
  misc_feature (42)..(42): n is a, c, g, or t
  misc_feature (50)..(50): n is a, c, g, or t
  misc_feature (64)..(64): n is a, c, g, or t
  misc_feature (74)..(94): n is a, c, g, or t
  misc_feature (224)..(247): n is a, c, g, or t
  misc_feature (279)..(302): n is a, c, g, or t

SEQ ID NO: 387273 - DNA, 687 bp, Homo Sapiens; identical to SEQ ID NO: 360417
  misc_feature (133)..(192): n is a, c, g, or t
  misc_feature (222)..(319): n is a, c, g, or t
  misc_feature (539)..(559): n is a, c, g, or t

SEQ ID NO: 387274 - DNA, 414 bp, Homo Sapiens; identical to SEQ ID NO: 360424
  misc_feature (15)..(15): n is a, c, g, or t
  misc_feature (27)..(27): n is a, c, g, or t
  misc_feature (312)..(312): n is a, c, g, or t
  misc_feature (329)..(329): n is a, c, g, or t

SEQ ID NO: 387275 - DNA, 1019 bp, Homo Sapiens; identical to SEQ ID NO: 360425
  misc_feature (22)..(22): n is a, c, g, or t

SEQ ID NO: 387276 - DNA, 536 bp, Homo Sapiens; identical to SEQ ID NO: 360439
  misc_feature (345)..(345): n is a, c, g, or t
  misc_feature (351)..(468): n is a, c, g, or t
  misc_feature (472)..(472): n is a, c, g, or t
  misc_feature (491)..(491): n is a, c, g, or t

SEQ ID NO: 387277 - DNA, 450 bp, Homo Sapiens; identical to SEQ ID NO: 360440
  misc_feature (265)..(382): n is a, c, g, or t
  misc_feature (391)..(391): n is a, c, g, or t
  misc_feature (393)..(393): n is a, c, g, or t
  misc_feature (399)..(399): n is a, c, g, or t

SEQ ID NO: 387278 - DNA, 541 bp, Homo Sapiens; identical to SEQ ID NO: 360470

SEQ ID NO: 387279 - DNA, 457 bp, Homo Sapiens; identical to SEQ ID NO: 360471
  misc_feature (24)..(24): n is a, c, g, or t
  misc_feature (129)..(129): n is a, c, g, or t

SEQ ID NO: 387280 - DNA, 837 bp, Homo Sapiens; identical to SEQ ID NO: 360472

SEQ ID NO: 387281 - DNA, 1032 bp, Homo Sapiens; identical to SEQ ID NO: 360473
  misc_feature (949)..(985): n is a, c, g, or t

SEQ ID NO: 387282 - DNA, 957 bp, Homo Sapiens; identical to SEQ ID NO: 360474

SEQ ID NO: 387283 - DNA, 689 bp, Homo Sapiens; identical to SEQ ID NO: 360475

SEQ ID NO: 387284 - DNA, 601 bp, Homo Sapiens; identical to SEQ ID NO: 360476

SEQ ID NO: 387285 - DNA, 499 bp, Homo Sapiens; identical to SEQ ID NO: 360477
  misc_feature (46)..(46): n is a, c, g, or t

SEQ ID NO: 387286 - DNA, 452 bp, Homo Sapiens; identical to SEQ ID NO: 360492

SEQ ID NO: 387287 - DNA, 1178 bp, Homo Sapiens; identical to SEQ ID NO: 360493
  misc_feature (146)..(154): n is a, c, g, or t
  misc_feature (1155)..(1155): n is a, c, g, or t

SEQ ID NO: 387288 - DNA, 987 bp, Homo Sapiens; identical to SEQ ID NO: 360494

SEQ ID NO: 387289 - DNA, 1339 bp, Homo Sapiens; identical to SEQ ID NO: 360498

SEQ ID NO: 387290 - DNA, 880 bp, Homo Sapiens; identical to SEQ ID NO: 360499

SEQ ID NO: 387291 - DNA, 247 bp, Homo Sapiens; identical to SEQ ID NO: 360502

SEQ ID NO: 387292 - DNA, 347 bp, Homo Sapiens; identical to SEQ ID NO: 360503

SEQ ID NO: 387293 - DNA, 1522 bp, Homo Sapiens; identical to SEQ ID NO: 360506
  misc_feature (62)..(62): n is a, c, g, or t

SEQ ID NO: 387294 - DNA, 769 bp, Homo Sapiens; identical to SEQ ID NO: 360507

SEQ ID NO: 387295 - DNA, 804 bp, Homo Sapiens; identical to SEQ ID NO: 360508

SEQ ID NO: 387296 - DNA, 1332 bp, Homo Sapiens; identical to SEQ ID NO: 360509
  misc_feature (1035)..(1035): n is a, c, g, or t
  misc_feature (1187)..(1212): n is a, c, g, or t

SEQ ID NO: 387297 - DNA, 475 bp, Homo Sapiens; identical to SEQ ID NO: 360510
  misc_feature (17)..(17): n is a, c, g, or t
  misc_feature (53)..(53): n is a, c, g, or t
  misc_feature (62)..(62): n is a, c, g, or t
  misc_feature (407)..(416): n is a, c, g, or t

SEQ ID NO: 387298 - DNA, 350 bp, Homo Sapiens; identical to SEQ ID NO: 360525
  misc_feature (19)..(19): n is a, c, g, or t
  misc_feature (68)..(68): n is a, c, g, or t
  misc_feature (151)..(151): n is a, c, g, or t

SEQ ID NO: 387299 - DNA, 1595 bp, Homo Sapiens; identical to SEQ ID NO: 360526

SEQ ID NO: 387300 - DNA, 734 bp, Homo Sapiens; identical to SEQ ID NO: 89179
  misc_feature (424)..(479): n is a, c, g, or t

SEQ ID NO: 387301 - DNA, 1087 bp, Homo Sapiens; identical to SEQ ID NO: 360528
  misc_feature (678)..(715): n is a, c, g, or t

SEQ ID NO: 387302 - DNA, 1427 bp, Homo Sapiens; identical to SEQ ID NO: 360529
  misc_feature (1275)..(1306): n is a, c, g, or t

SEQ ID NO: 387303 - DNA, 207 bp, Homo Sapiens; identical to SEQ ID NO: 360533
  misc_feature (38)..(38): n is a, c, g, or t
  misc_feature (101)..(101): n is a, c, g, or t

SEQ ID NO: 387304 - DNA, 798 bp, Homo Sapiens; identical to SEQ ID NO: 47592
  misc_feature (601)..(603): n is a, c, g, or t
  misc_feature (605)..(605): n is a, c, g, or t
  misc_feature (607)..(607): n is a, c, g, or t
  misc_feature (624)..(624): n is a, c, g, or t
  misc_feature (713)..(713): n is a, c, g, or t
  misc_feature (724)..(724): n is a, c, g, or t

SEQ ID NO: 387305 - DNA, 1137 bp, Homo Sapiens; identical to SEQ ID NO: 360538
  misc_feature (599)..(599): n is a, c, g, or t

SEQ ID NO: 387306 - DNA, 1128 bp, Homo Sapiens; identical to SEQ ID NO: 360539

SEQ ID NO: 387307 - DNA, 1065 bp, Homo Sapiens; identical to SEQ ID NO: 360540
  misc_feature (1026)..(1026): n is a, c, g, or t
  misc_feature (1042)..(1042): n is a, c, g, or t

SEQ ID NO: 387308 - DNA, 1018 bp, Homo Sapiens; identical to SEQ ID NO: 360546

SEQ ID NO: 387309 - DNA, 1059 bp, Homo Sapiens; identical to SEQ ID NO: 360547
  misc_feature (635)..(635): n is a, c, g, or t
  misc_feature (663)..(663): n is a, c, g, or t
  misc_feature (746)..(746): n is a, c, g, or t
  misc_feature (752)..(752): n is a, c, g, or t
  misc_feature (754)..(754): n is a, c, g, or t
  misc_feature (761)..(761): n is a, c, g, or t
  misc_feature (834)..(834): n is a, c, g, or t
  misc_feature (1003)..(1013): n is a, c, g, or t

SEQ ID NO: 387310 - DNA, 712 bp, Homo Sapiens; identical to SEQ ID NO: 360561

SEQ ID NO: 387311 - DNA, 1653 bp, Homo Sapiens; identical to SEQ ID NO: 360562
  misc_feature (1469)..(1477): n is a, c, g, or t
  misc_feature (1527)..(1535): n is a, c, g, or t

SEQ ID NO: 387312 - DNA, 3237 bp, Homo Sapiens; identical to SEQ ID NO: 360563
  misc_feature (1069)..(1069): n is a, c, g, or t
  misc_feature (1959)..(1959): n is a, c, g, or t

SEQ ID NO: 387313 - DNA, 1754 bp, Homo Sapiens; identical to SEQ ID NO: 360574

SEQ ID NO: 387314 - DNA, 823 bp, Homo Sapiens; identical to SEQ ID NO: 360575
  misc_feature (35)..(35): n is a, c, g, or t
  misc_feature (44)..(44): n is a, c, g, or t
  misc_feature (51)..(51): n is a, c, g, or t
  misc_feature (62)..(62): n is a, c, g, or t
  misc_feature (123)..(123): n is a, c, g, or t

SEQ ID NO: 387315 - DNA, 742 bp, Homo Sapiens; identical to SEQ ID NO: 360581

SEQ ID NO: 387316 - DNA, 497 bp, Homo Sapiens; identical to SEQ ID NO: 360582

SEQ ID NO: 387317 - DNA, 1140 bp, Homo Sapiens; identical to SEQ ID NO: 360584
  misc_feature (13)..(13): n is a, c, g, or t
  misc_feature (28)..(28): n is a, c, g, or t
  misc_feature (42)..(42): n is a, c, g, or t
  misc_feature (64)..(64): n is a, c, g, or t

SEQ ID NO: 387318 - DNA, 510 bp, Homo Sapiens; identical to SEQ ID NO: 360585
  misc_feature (111)..(130): n is a, c, g, or t

SEQ ID NO: 387319 - DNA, 903 bp, Homo Sapiens; identical to SEQ ID NO: 360601
  misc_feature (584)..(584): n is a, c, g, or t

SEQ ID NO: 387320 - DNA, 1770 bp, Homo Sapiens; identical to SEQ ID NO: 360602

SEQ ID NO: 387321 - DNA, 605 bp, Homo Sapiens; identical to SEQ ID NO: 360604

SEQ ID NO: 387322 - DNA, 475 bp, Homo Sapiens; identical to SEQ ID NO: 360605
  misc_feature (15)..(15): n is a, c, g, or t
  misc_feature (102)..(102): n is a, c, g, or t
  misc_feature (422)..(430): n is a, c, g, or t

SEQ ID NO: 387323 - DNA, 490 bp, Homo Sapiens; identical to SEQ ID NO: 360611
  misc_feature (22)..(22): n is a, c, g, or t
  misc_feature (34)..(34): n is a, c, g, or t

SEQ ID NO: 387324 - DNA, 478 bp, Homo Sapiens; identical to SEQ ID NO: 360612
  misc_feature (12)..(12): n is a, c, g, or t
  misc_feature (35)..(35): n is a, c, g, or t
  misc_feature (58)..(58): n is a, c, g, or t
  misc_feature (70)..(70): n is a, c, g, or t
  misc_feature (83)..(83): n is a, c, g, or t
  misc_feature (91)..(91): n is a, c, g, or t
  misc_feature (97)..(105): n is a, c, g, or t

SEQ ID NO: 387325 - DNA, 444 bp, Homo Sapiens; identical to SEQ ID NO: 360613

SEQ ID NO: 387326 - DNA, 347 bp, Homo Sapiens; identical to SEQ ID NO: 360614
  misc_feature (128)..(128): n is a, c, g, or t

SEQ ID NO: 387327 - DNA, 330 bp, Homo Sapiens; identical to SEQ ID NO: 360615
  misc_feature (111)..(157): n is a, c, g, or t

SEQ ID NO: 387328 - DNA, 435 bp, Homo Sapiens; identical to SEQ ID NO: 360618
  misc_feature (64)..(64): n is a, c, g, or t
  misc_feature (108)..(199): n is a, c, g, or t

SEQ ID NO: 387329 - DNA, 522 bp, Homo Sapiens; identical to SEQ ID NO: 360619
  misc_feature (229)..(339): n is a, c, g, or t
  misc_feature (397)..(397): n is a, c, g, or t
  misc_feature (408)..(408): n is a, c, g, or t
  misc_feature (415)..(415): n is a, c, g, or t
  misc_feature (444)..(444): n is a, c, g, or t
  misc_feature (474)..(474): n is a, c, g, or t
  misc_feature (508)..(508): n is a, c, g, or t

SEQ ID NO: 387330 - DNA, 1254 bp, Homo Sapiens; identical to SEQ ID NO: 360626

SEQ ID NO: 387331 - DNA, 1001 bp, Homo Sapiens; identical to SEQ ID NO: 360627

SEQ ID NO: 387332 - DNA, 1323 bp, Homo Sapiens; identical to SEQ ID NO: 360635
  misc_feature (1052)..(1052): n is a, c, g, or t
  misc_feature (1064)..(1065): n is a, c, g, or t

SEQ ID NO: 387333 - DNA, 2933 bp, Homo Sapiens; identical to SEQ ID NO: 360636
  misc_feature (2333)..(2397): n is a, c, g, or t
  misc_feature (2433)..(2476): n is a, c, g, or t

SEQ ID NO: 387334 - DNA, 1069 bp, Homo Sapiens; identical to SEQ ID NO: 360637
  misc_feature (64)..(73): n is a, c, g, or t
  misc_feature (91)..(118): n is a, c, g, or t

SEQ ID NO: 387335 - DNA, 460 bp, Homo Sapiens; identical to SEQ ID NO: 360638
  misc_feature (11)..(11): n is a, c, g, or t

SEQ ID NO: 387336 - DNA, 510 bp, Homo Sapiens; identical to SEQ ID NO: 360639
  misc_feature (78)..(78): n is a, c, g, or t
  misc_feature (109)..(109): n is a, c, g, or t

SEQ ID NO: 387337 - DNA, 528 bp, Homo Sapiens; identical to SEQ ID NO: 360676
  misc_feature (37)..(37): n is a, c, g, or t

SEQ ID NO: 387338 - DNA, 452 bp, Homo Sapiens; identical to SEQ ID NO: 360677
  misc_feature (23)..(23): n is a, c, g, or t
  misc_feature (31)..(31): n is a, c, g, or t
  misc_feature (48)..(48): n is a, c, g, or t
  misc_feature (239)..(239): n is a, c, g, or t
  misc_feature (271)..(271): n is a, c, g, or t

SEQ ID NO: 387339 - DNA, 434 bp, Homo Sapiens; identical to SEQ ID NO: 360678
  misc_feature (65)..(65): n is a, c, g, or t

SEQ ID NO: 387340 - DNA, 734 bp, Homo Sapiens; identical to SEQ ID NO: 360679
  misc_feature (19)..(19): n is a, c, g, or t
  misc_feature (43)..(43): n is a, c, g, or t
  misc_feature (83)..(83): n is a, c, g, or t

SEQ ID NO: 387341 - DNA, 525 bp, Homo Sapiens; identical to SEQ ID NO: 360681
  misc_feature (56)..(56): n is a, c, g, or t
  misc_feature (63)..(63): n is a, c, g, or t

SEQ ID NO: 387342 - DNA, 464 bp, Homo Sapiens; identical to SEQ ID NO: 360682

SEQ ID NO: 387343 - DNA, 1045 bp, Homo Sapiens; identical to SEQ ID NO: 360696
  misc_feature (542)..(577): n is a, c, g, or t

SEQ ID NO: 387344 - DNA, 1530 bp, Homo Sapiens; identical to SEQ ID NO: 360697
  misc_feature (269)..(269): n is a, c, g, or t

SEQ ID NO: 387345 - DNA, 413 bp, Homo Sapiens; identical to SEQ ID NO: 360704
  misc_feature (100)..(126): n is a, c, g, or t

SEQ ID NO: 387346 - DNA, 379 bp, Homo Sapiens; identical to SEQ ID NO: 360705
  misc_feature (49)..(74): n is a, c, g, or t

SEQ ID NO: 387347 - DNA, 510 bp, Homo Sapiens; identical to SEQ ID NO: 360706
  misc_feature (38)..(38): n is a, c, g, or t
  misc_feature (89)..(89): n is a, c, g, or t
  misc_feature (173)..(173): n is a, c, g, or t
  misc_feature (183)..(183): n is a, c, g, or t
  misc_feature (190)..(190): n is a, c, g, or t

SEQ ID NO: 387348 - DNA, 668 bp, Homo Sapiens; identical to SEQ ID NO: 360711

SEQ ID NO: 387349 - DNA, 467 bp, Homo Sapiens; identical to SEQ ID NO: 360712

SEQ ID NO: 387350 - DNA, 559 bp, Homo Sapiens; identical to SEQ ID NO: 360727
  misc_feature (82)..(82): n is a, c, g, or t
  misc_feature (116)..(116): n is a, c, g, or t

SEQ ID NO: 387351 - DNA, 584 bp, Homo Sapiens; identical to SEQ ID NO: 360728
  misc_feature (12)..(12): n is a, c, g, or t
  misc_feature (25)..(25): n is a, c, g, or t
  misc_feature (35)..(35): n is a, c, g, or t
  misc_feature (107)..(107): n is a, c, g, or t

SEQ ID NO: 387352 - DNA, 813 bp, Homo Sapiens; identical to SEQ ID NO: 360740
  misc_feature (784)..(784): n is a, c, g, or t

SEQ ID NO: 387353 - DNA, 2050 bp, Homo Sapiens; identical to SEQ ID NO: 360741
  misc_feature (862)..(862): n is a, c, g, or t

SEQ ID NO: 387354 - DNA, 441 bp, Homo Sapiens; identical to SEQ ID NO: 360742
  misc_feature (341)..(341): n is a, c, g, or t
  misc_feature (360)..(360): n is a, c, g, or t

SEQ ID NO: 387355 - DNA, 446 bp, Homo Sapiens; identical to SEQ ID NO: 360746

SEQ ID NO: 387356 - DNA, 925 bp, Homo Sapiens; identical to SEQ ID NO: 360747
  misc_feature (785)..(816): n is a, c, g, or t

SEQ ID NO: 387357 - DNA, 1101 bp, Homo Sapiens; identical to SEQ ID NO: 360763
  misc_feature (831)..(975): n is a, c, g, or t

SEQ ID NO: 387358 - DNA, 1165 bp, Homo Sapiens; identical to SEQ ID NO: 360764

SEQ ID NO: 387359 - DNA, 993 bp, Homo Sapiens; identical to SEQ ID NO: 360766
  misc_feature (884)..(884): n is a, c, g, or t
  misc_feature (902)..(902): n is a, c, g, or t

SEQ ID NO: 387360 - DNA, 1050 bp, Homo Sapiens; identical to SEQ ID NO: 360767
  misc_feature (74)..(74): n is a, c, g, or t
  misc_feature (868)..(868): n is a, c, g, or t
  misc_feature (962)..(962): n is a, c, g, or t
  misc_feature (967)..(967): n is a, c, g, or t

SEQ ID NO: 387361 - DNA, 426 bp, Homo Sapiens; identical to SEQ ID NO: 360772
  misc_feature (333)..(333): n is a, c, g, or t
  misc_feature (354)..(354): n is a, c, g, or t
  misc_feature (362)..(362): n is a, c, g, or t
  misc_feature (384)..(384): n is a, c, g, or t

SEQ ID NO: 387362 - DNA, 849 bp, Homo Sapiens; identical to SEQ ID NO: 360773

SEQ ID NO: 387363 - DNA, 541 bp, Homo Sapiens; identical to SEQ ID NO: 360774
  misc_feature (427)..(427): n is a, c, g, or t
  misc_feature (448)..(448): n is a, c, g, or t
  misc_feature (466)..(466): n is a, c, g, or t
  misc_feature (471)..(471): n is a, c, g, or t
  misc_feature (487)..(487): n is a, c, g, or t
  misc_feature (515)..(515): n is a, c, g, or t
  misc_feature (526)..(526): n is a, c, g, or t

SEQ ID NO: 387364 - DNA, 410 bp, Homo Sapiens; identical to SEQ ID NO: 360775
  misc_feature (313)..(313): n is a, c, g, or t

SEQ ID NO: 387365 - DNA, 1399 bp, Homo Sapiens; identical to SEQ ID NO: 360787
  misc_feature (176)..(233): n is a, c, g, or t

SEQ ID NO: 387366 - DNA, 208 bp, Homo Sapiens; identical to SEQ ID NO: 360788

SEQ ID NO: 387367 - DNA, 443 bp, Homo Sapiens; identical to SEQ ID NO: 360791
  misc_feature (12)..(12): n is a, c, g, or t

SEQ ID NO: 387368 - DNA, 1085 bp, Homo Sapiens; identical to SEQ ID NO: 360792

SEQ ID NO: 387369 - DNA, 880 bp, Homo Sapiens; identical to SEQ ID NO: 360796
  misc_feature (39)..(39): n is a, c, g, or t
  misc_feature (55)..(55): n is a, c, g, or t
  misc_feature (269)..(269): n is a, c, g, or t

SEQ ID NO: 387370 - DNA, 494 bp, Homo Sapiens; identical to SEQ ID NO: 360797
  misc_feature (379)..(379): n is a, c, g, or t
  misc_feature (384)..(384): n is a, c, g, or t
  misc_feature (405)..(405): n is a, c, g, or t
  misc_feature (419)..(419): n is a, c, g, or t
  misc_feature (442)..(442): n is a, c, g, or t
  misc_feature (479)..(479): n is a, c, g, or t

SEQ ID NO: 387371 - DNA, 1370 bp, Homo Sapiens; identical to SEQ ID NO: 360806
  misc_feature (373)..(471): n is a, c, g, or t

SEQ ID NO: 387372 - DNA, 1084 bp, Homo Sapiens; identical to SEQ ID NO: 360807

SEQ ID NO: 387373 - DNA, 1130 bp, Homo Sapiens; identical to SEQ ID NO: 360808

SEQ ID NO: 387374 - DNA, 687 bp, Homo Sapiens; identical to SEQ ID NO: 360809

SEQ ID NO: 387375 - DNA, 1019 bp, Homo Sapiens; identical to SEQ ID NO: 360820

SEQ ID NO: 387376 - DNA, 495 bp, Homo Sapiens; identical to SEQ ID NO: 360821

SEQ ID NO: 387377 - DNA, 556 bp, Homo Sapiens; identical to SEQ ID NO: 360830
  misc_feature (365)..(365): n is a, c, g, or t
  misc_feature (418)..(418): n is a, c, g, or t
  misc_feature (450)..(450): n is a, c, g, or t
  misc_feature (490)..(490): n is a, c, g, or t
  misc_feature (510)..(510): n is a, c, g, or t
  misc_feature (518)..(518): n is a, c, g, or t
  misc_feature (542)..(542): n is a, c, g, or t

SEQ ID NO: 387378 - DNA, 1676 bp, Homo Sapiens; identical to SEQ ID NO: 360831

SEQ ID NO: 387379 - DNA, 816 bp, Homo Sapiens; identical to SEQ ID NO: 360832

SEQ ID NO: 387380 - DNA, 476 bp, Homo Sapiens; identical to SEQ ID NO: 360833
  misc_feature (17)..(17): n is a, c, g, or t
  misc_feature (34)..(34): n is a, c, g, or t
  misc_feature (40)..(40): n is a, c, g, or t
  misc_feature (153)..(153): n is a, c, g, or t

SEQ ID NO: 387381 - DNA, 850 bp, Homo Sapiens; identical to SEQ ID NO: 360843

SEQ ID NO: 387382 - DNA, 462 bp, Homo Sapiens; identical to SEQ ID NO: 360844
  misc_feature (98)..(98): n is a, c, g, or t
  misc_feature (445)..(445): n is a, c, g, or t

SEQ ID NO: 387383 - DNA, 2558 bp, Homo Sapiens; identical to SEQ ID NO: 360848

SEQ ID NO: 387384 - DNA, 349 bp, Homo Sapiens; identical to SEQ ID NO: 360849

SEQ ID NO: 387385 - DNA, 772 bp, Homo Sapiens; identical to SEQ ID NO: 360875

SEQ ID NO: 387386 - DNA, 523 bp, Homo Sapiens; identical to SEQ ID NO: 360876
  misc_feature (383)..(383): n is a, c, g, or t
  misc_feature (420)..(420): n is a, c, g, or t
  misc_feature (433)..(433): n is a, c, g, or t
  misc_feature (440)..(440): n is a, c, g, or t
  misc_feature (447)..(447): n is a, c, g, or t
  misc_feature (469)..(469): n is a, c, g, or t
  misc_feature (475)..(475): n is a, c, g, or t
  misc_feature (502)..(502): n is a, c, g, or t

SEQ ID NO: 387387 - DNA, 919 bp, Homo Sapiens; identical to SEQ ID NO: 360882

SEQ ID NO: 387388 - DNA, 509 bp, Homo Sapiens; identical to SEQ ID NO: 360883

SEQ ID NO: 387389 - DNA, 911 bp, Homo Sapiens; identical to SEQ ID NO: 360889

SEQ ID NO: 387390 - DNA, 795 bp, Homo Sapiens; identical to SEQ ID NO: 360890

SEQ ID NO: 387391 - DNA, 370 bp, Homo Sapiens; identical to SEQ ID NO: 360891

SEQ ID NO: 387392 - DNA, 420 bp, Homo Sapiens; identical to SEQ ID NO: 360892
  misc_feature (371)..(371): n is a, c, g, or t
  misc_feature (388)..(388): n is a, c, g, or t
  misc_feature (394)..(394): n is a, c, g, or t

SEQ ID NO: 387393 - DNA, 1105 bp, Homo Sapiens; identical to SEQ ID NO: 360896
  misc_feature (919)..(919): n is a, c, g, or t
  misc_feature (992)..(992): n is a, c, g, or t

SEQ ID NO: 387394 - DNA, 848 bp, Homo Sapiens; identical to SEQ ID NO: 360897
  misc_feature (28)..(28): n is a, c, g, or t
  misc_feature (42)..(78): n is a, c, g, or t

SEQ ID NO: 387395 - DNA, 919 bp, Homo Sapiens; identical to SEQ ID NO: 360899
  misc_feature (89)..(122): n is a, c, g, or t

SEQ ID NO: 387396 - DNA, 487 bp, Homo Sapiens; identical to SEQ ID NO: 360900
  misc_feature (66)..(74): n is a, c, g, or t
  misc_feature (99)..(182): n is a, c, g, or t
  misc_feature (273)..(306): n is a, c, g, or t

SEQ ID NO: 387397 - DNA, 489 bp, Homo Sapiens; identical to SEQ ID NO: 360933

SEQ ID NO: 387398 - DNA, 438 bp, Homo Sapiens; identical to SEQ ID NO: 360934
  misc_feature (13)..(13): n is a, c, g, or t
  misc_feature (28)..(28): n is a, c, g, or t
  misc_feature (33)..(33): n is a, c, g, or t
  misc_feature (98)..(98): n is a, c, g, or t

SEQ ID NO: 387399 - DNA, 880 bp, Homo Sapiens; identical to SEQ ID NO: 360944

SEQ ID NO: 387400 - DNA, 479 bp, Homo Sapiens; identical to SEQ ID NO: 360945
  misc_feature (18)..(18): n is a, c, g, or t
  misc_feature (28)..(28): n is a, c, g, or t

SEQ ID NO: 387401 - DNA, 2035 bp, Homo Sapiens; identical to SEQ ID NO: 360946

SEQ ID NO: 387402 - DNA, 606 bp, Homo Sapiens; identical to SEQ ID NO: 360947
  misc_feature (15)..(15): n is a, c, g, or t
  misc_feature (62)..(62): n is a, c, g, or t
  misc_feature (67)..(67): n is a, c, g, or t
  misc_feature (123)..(123): n is a, c, g, or t
  misc_feature (157)..(157): n is a, c, g, or t

SEQ ID NO: 387403 - DNA, 1012 bp, Homo Sapiens; identical to SEQ ID NO: 360955
  misc_feature (562)..(866): n is a, c, g, or t
  misc_feature (904)..(939): n is a, c, g, or t

SEQ ID NO: 387404 - DNA, 424 bp, Homo Sapiens; identical to SEQ ID NO: 360956
  misc_feature (237)..(237): n is a, c, g, or t
  misc_feature (293)..(293): n is a, c, g, or t
  misc_feature (329)..(329): n is a, c, g, or t
  misc_feature (352)..(352): n is a, c, g, or t
  misc_feature (375)..(375): n is a, c, g, or t
  misc_feature (383)..(383): n is a, c, g, or t
  misc_feature (398)..(398): n is a, c, g, or t

SEQ ID NO: 387405 - DNA, 976 bp, Homo Sapiens; identical to SEQ ID NO: 360970
  misc_feature (573)..(581): n is a, c, g, or t
  misc_feature (618)..(648): n is a, c, g, or t
  misc_feature (676)..(687): n is a, c, g, or t
  misc_feature (689)..(698): n is a, c, g, or t
  misc_feature (710)..(748): n is a, c, g, or t
  misc_feature (795)..(869): n is a, c, g, or t
  misc_feature (908)..(916): n is a, c, g, or t

SEQ ID NO: 387406 - DNA, 1249 bp, Homo Sapiens; identical to SEQ ID NO: 360971
  misc_feature (232)..(241): n is a, c, g, or t
  misc_feature (421)..(422): n is a, c, g, or t

SEQ ID NO: 387407 - DNA, 996 bp, Homo Sapiens; identical to SEQ ID NO: 360988

SEQ ID NO: 387408 - DNA, 1060 bp, Homo Sapiens; identical to SEQ ID NO: 360989

SEQ ID NO: 387409 - DNA, 1145 bp, Homo Sapiens; identical to SEQ ID NO: 360990
  misc_feature (825)..(825): n is a, c, g, or t
  misc_feature (923)..(923): n is a, c, g, or t

SEQ ID NO: 387410 - DNA, 353 bp, Homo Sapiens; identical to SEQ ID NO: 360997
  misc_feature (46)..(46): n is a, c, g, or t

SEQ ID NO: 387411 - DNA, 460 bp, Homo Sapiens; identical to SEQ ID NO: 360998
  misc_feature (16)..(16): n is a, c, g, or t
  misc_feature (28)..(28): n is a, c, g, or t
  misc_feature (90)..(90): n is a, c, g, or t
  misc_feature (100)..(100): n is a, c, g, or t
  misc_feature (104)..(202): n is a, c, g, or t
  misc_feature (434)..(434): n is a, c, g, or t

SEQ ID NO: 387412 - DNA, 1248 bp, Homo Sapiens; identical to SEQ ID NO: 361013

SEQ ID NO: 387413 - DNA, 1382 bp, Homo Sapiens; identical to SEQ ID NO: 361014
  misc_feature (1204)..(1204): n is a, c, g, or t
  misc_feature (1351)..(1351): n is a, c, g, or t

SEQ ID NO: 387414 - DNA, 1904 bp, Homo Sapiens; identical to SEQ ID NO: 361018
  misc_feature (1305)..(1305): n is a, c, g, or t
  misc_feature (1481)..(1481): n is a, c, g, or t

SEQ ID NO: 387415 - DNA, 436 bp, Homo Sapiens; identical to SEQ ID NO: 361019
  misc_feature (50)..(50): n is a, c, g, or t
  misc_feature (72)..(72): n is a, c, g, or t
  misc_feature (154)..(154): n is a, c, g, or t
  misc_feature (262)..(271): n is a, c, g, or t

SEQ ID NO: 387416 - DNA, 586 bp, Homo Sapiens; identical to SEQ ID NO: 361021

SEQ ID NO: 387417 - DNA, 982 bp, Homo Sapiens; identical to SEQ ID NO: 361022

SEQ ID NO: 387418 - DNA, 1238 bp, Homo Sapiens; identical to SEQ ID NO: 361025

SEQ ID NO: 387419 - DNA, 421 bp, Homo Sapiens; identical to SEQ ID NO: 361026
  misc_feature (36)..(36): n is a, c, g, or t

SEQ ID NO: 387420 - DNA, 422 bp, Homo Sapiens; identical to SEQ ID NO: 361035

SEQ ID NO: 387421 - DNA, 496 bp, Homo Sapiens; identical to SEQ ID NO: 361036
  misc_feature (23)..(23): n is a, c, g, or t

SEQ ID NO: 387422 - DNA, 1296 bp, Homo Sapiens; identical to SEQ ID NO: 361066

SEQ ID NO: 387423 - DNA, 931 bp, Homo Sapiens; identical to SEQ ID NO: 361067

SEQ ID NO: 387424 - DNA, 833 bp, Homo Sapiens; identical to SEQ ID NO: 361070
  misc_feature (603)..(616): n is a, c, g, or t

SEQ ID NO: 387425 - DNA, 723 bp, Homo Sapiens; identical to SEQ ID NO: 361071
  misc_feature (364)..(378): n is a, c, g, or t
  misc_feature (646)..(664): n is a, c, g, or t

SEQ ID NO: 387426 - DNA, 868 bp, Homo Sapiens; identical to SEQ ID NO: 361072
  misc_feature (625)..(643): n is a, c, g, or t

SEQ ID NO: 387427 - DNA, 669 bp, Homo Sapiens; identical to SEQ ID NO: 361073
  misc_feature (606)..(616): n is a, c, g, or t

SEQ ID NO: 387428 - DNA, 1356 bp, Homo Sapiens; identical to SEQ ID NO: 361074
  misc_feature (406)..(419): n is a, c, g, or t
  misc_feature (676)..(691): n is a, c, g, or t

SEQ ID NO: 387429 - DNA, 948 bp, Homo Sapiens; identical to SEQ ID NO: 361075
  misc_feature (755)..(768): n is a, c, g, or t

SEQ ID NO: 387430 - DNA, 845 bp, Homo Sapiens; identical to SEQ ID NO: 361076
  misc_feature (478)..(492): n is a, c, g, or t
  misc_feature (714)..(715): n is a, c, g, or t
  misc_feature (751)..(767): n is a, c, g, or t

SEQ ID NO: 387431 - DNA, 2175 bp, Homo Sapiens; identical to SEQ ID NO: 361089

SEQ ID NO: 387432 - DNA, 548 bp, Homo Sapiens; identical to SEQ ID NO: 361090

SEQ ID NO: 387433 - DNA, 424 bp, Homo Sapiens; identical to SEQ ID NO: 361091

SEQ ID NO: 387434 - DNA, 958 bp, Homo Sapiens; identical to SEQ ID NO: 361099
  misc_feature (851)..(888): n is a, c, g, or t
  misc_feature (936)..(936): n is a, c, g, or t

SEQ ID NO: 387435 - DNA, 539 bp, Homo Sapiens; identical to SEQ ID NO: 361100

SEQ ID NO: 387436 - DNA, 1171 bp, Homo Sapiens; identical to SEQ ID NO: 361105
  misc_feature (950)..(968): n is a, c, g, or t

SEQ ID NO: 387437 - DNA, 1241 bp, Homo Sapiens; identical to SEQ ID NO: 361106
  misc_feature (53)..(89): n is a, c, g, or t

SEQ ID NO: 387438 - DNA, 389 bp, Homo Sapiens; identical to SEQ ID NO: 361107

SEQ ID NO: 387439 - DNA, 418 bp, Homo Sapiens; identical to SEQ ID NO: 361108
  misc_feature (70)..(70): n is a, c, g, or t
  misc_feature (205)..(280): n is a, c, g, or t
  misc_feature (286)..(286): n is a, c, g, or t
  misc_feature (302)..(302): n is a, c, g, or t
  misc_feature (377)..(377): n is a, c, g, or t

SEQ ID NO: 387440 - DNA, 3092 bp, Homo Sapiens; identical to SEQ ID NO: 361110
  misc_feature (2791)..(2791): n is a, c, g, or t
  misc_feature (2941)..(2941): n is a, c, g, or t
  misc_feature (2947)..(2956): n is a, c, g, or t
  misc_feature (3078)..(3078): n is a, c, g, or t

SEQ ID NO: 387441 - DNA, 252 bp, Homo Sapiens; identical to SEQ ID NO: 361111

SEQ ID NO: 387442 - DNA, 1618 bp, Homo Sapiens; identical to SEQ ID NO: 361112
  misc_feature (1135)..(1135): n is a, c, g, or t

SEQ ID NO: 387443 - DNA, 2195 bp, Homo Sapiens; identical to SEQ ID NO: 361113

SEQ ID NO: 387444 - DNA, 1932 bp, Homo Sapiens; identical to SEQ ID NO: 361115
  misc_feature (1267)..(1267): n is a, c, g, or t
  misc_feature (1271)..(1271): n is a, c, g, or t
  misc_feature (1304)..(1304): n is a, c, g, or t

SEQ ID NO: 387445 - DNA, 491 bp, Homo Sapiens; identical to SEQ ID NO: 361116
  misc_feature (435)..(435): n is a, c, g, or t

SEQ ID NO: 387446 - DNA, 920 bp, Homo Sapiens; identical to SEQ ID NO: 361118
  misc_feature (203)..(203): n is a, c, g, or t
  misc_feature (209)..(209): n is a, c, g, or t

SEQ ID NO: 387447 - DNA, 1122 bp, Homo Sapiens; identical to SEQ ID NO: 361119
  misc_feature (960)..(960): n is a, c, g, or t

SEQ ID NO: 387448 - DNA, 1561 bp, Homo Sapiens; identical to SEQ ID NO: 361120
  misc_feature (1123)..(1356): n is a, c, g, or t
  misc_feature (1372)..(1380): n is a, c, g, or t
  misc_feature (1416)..(1428): n is a, c, g, or t

SEQ ID NO: 387449 - DNA, 1531 bp, Homo Sapiens; identical to SEQ ID NO: 361123
  misc_feature (155)..(163): n is a, c, g, or t
  misc_feature (468)..(495): n is a, c, g, or t

SEQ ID NO: 387450 - DNA, 1003 bp, Homo Sapiens; identical to SEQ ID NO: 361124
  misc_feature (316)..(324): n is a, c, g, or t
  misc_feature (629)..(656): n is a, c, g, or t
  misc_feature (789)..(789): n is a, c, g, or t
  misc_feature (947)..(957): n is a, c, g, or t

SEQ ID NO: 387451 - DNA, 1200 bp, Homo Sapiens; identical to SEQ ID NO: 361126
  misc_feature (914)..(914): n is a, c, g, or t
  misc_feature (942)..(942): n is a, c, g, or t
  misc_feature (956)..(956): n is a, c, g, or t

SEQ ID NO: 387452 - DNA, 1067 bp, Homo Sapiens; identical to SEQ ID NO: 361127
  misc_feature (940)..(940): n is a, c, g, or t

SEQ ID NO: 387453 - DNA, 1743 bp, Homo Sapiens; identical to SEQ ID NO: 361128

SEQ ID NO: 387454 - DNA, 481 bp, Homo Sapiens; identical to SEQ ID NO: 361129
  misc_feature (365)..(405): n is a, c, g, or t

SEQ ID NO: 387455 - DNA, 1019 bp, Homo Sapiens; identical to SEQ ID NO: 361130
  misc_feature (804)..(804): n is a, c, g, or t
  misc_feature (843)..(843): n is a, c, g, or t

SEQ ID NO: 387456 - DNA, 1126 bp, Homo Sapiens; identical to SEQ ID NO: 361131

SEQ ID NO: 387457 - DNA, 945 bp, Homo Sapiens; identical to SEQ ID NO: 361132

SEQ ID NO: 387458 - DNA, 982 bp, Homo Sapiens; identical to SEQ ID NO: 361133

SEQ ID NO: 387459 - DNA, 1021 bp, Homo Sapiens; identical to SEQ ID NO: 361134

SEQ ID NO: 387460 - DNA, 900 bp, Homo Sapiens; identical to SEQ ID NO: 361135

SEQ ID NO: 387461 - DNA, 968 bp, Homo Sapiens; identical to SEQ ID NO: 361142

SEQ ID NO: 387462 - DNA, 1290 bp, Homo Sapiens; identical to SEQ ID NO: 123656
  misc_feature (964)..(1002): n is a, c, g, or t
  misc_feature (1028)..(1028): n is a, c, g, or t
  misc_feature (1042)..(1042): n is a, c, g, or t
  misc_feature (1126)..(1128): n is a, c, g, or t
  misc_feature (1137)..(1137): n is a, c, g, or t
  misc_feature (1220)..(1230): n is a, c, g, or t

SEQ ID NO: 387463 - DNA, 1916 bp, Homo Sapiens; identical to SEQ ID NO: 251968
  misc_feature (607)..(607): n is a, c, g, or t
  misc_feature (1770)..(1770): n is a, c, g, or t

SEQ ID NO: 387464 - DNA, 1066 bp, Homo Sapiens; identical to SEQ ID NO: 251969
  misc_feature (849)..(849): n is a, c, g, or t

SEQ ID NO: 387465 - DNA, 963 bp, Homo Sapiens; identical to SEQ ID NO: 361146
  misc_feature (384)..(384): n is a, c, g, or t

SEQ ID NO: 387466 - DNA, 1144 bp, Homo Sapiens; identical to SEQ ID NO: 361147

SEQ ID NO: 387467 - DNA, 922 bp, Homo Sapiens; identical to SEQ ID NO: 361148

SEQ ID NO: 387468 - DNA, 946 bp, Homo Sapiens; identical to SEQ ID NO: 361149

SEQ ID NO: 387469 - DNA, 1417 bp, Homo Sapiens; identical to SEQ ID NO: 361150
  misc_feature (1290)..(1290): n is a, c, g, or t
  misc_feature (1348)..(1348): n is a, c, g, or t

SEQ ID NO: 387470 - DNA, 1075 bp, Homo Sapiens; identical to SEQ ID NO: 361151
  misc_feature (90)..(116): n is a, c, g, or t

SEQ ID NO: 387471 - DNA, 1258 bp, Homo Sapiens; identical to SEQ ID NO: 361155

SEQ ID NO: 387472 - DNA, 1300 bp, Homo Sapiens; identical to SEQ ID NO: 361156

SEQ ID NO: 387473 - DNA, 1131 bp, Homo Sapiens; identical to SEQ ID NO: 361157

SEQ ID NO: 387474 - DNA, 1187 bp, Homo Sapiens; identical to SEQ ID NO: 361159
  misc_feature (87)..(87): n is a, c, g, or t
  misc_feature (263)..(263): n is a, c, g, or t
  misc_feature (345)..(345): n is a, c, g, or t

SEQ ID NO: 387475 - DNA, 1135 bp, Homo Sapiens; identical to SEQ ID NO: 361160

SEQ ID NO: 387476 - DNA, 1134 bp, Homo Sapiens; identical to SEQ ID NO: 361161
  misc_feature (710)..(710): n is a, c, g, or t
  misc_feature (883)..(901): n is a, c, g, or t

SEQ ID NO: 387477 - DNA, 1266 bp, Homo Sapiens; identical to SEQ ID NO: 361162
  misc_feature (164)..(177): n is a, c, g, or t

SEQ ID NO: 387478 - DNA, 943 bp, Homo Sapiens; identical to SEQ ID NO: 99413

SEQ ID NO: 387479 - DNA, 1224 bp, Homo Sapiens; identical to SEQ ID NO: 361164
  misc_feature (1107)..(1115): n is a, c, g, or t
  misc_feature (1123)..(1124): n is a, c, g, or t
  misc_feature (1129)..(1129): n is a, c, g, or t
  misc_feature (1131)..(1131): n is a, c, g, or t

SEQ ID NO: 387480 - DNA, 948 bp, Homo Sapiens; identical to SEQ ID NO: 99416

SEQ ID NO: 387481 - DNA, 905 bp, Homo Sapiens; identical to SEQ ID NO: 262247

SEQ ID NO: 387482 - DNA, 905 bp, Homo Sapiens; identical to SEQ ID NO: 99417

SEQ ID NO: 387483 - DNA, 865 bp, Homo Sapiens; identical to SEQ ID NO: 99418

SEQ ID NO: 387484 - DNA, 967 bp, Homo Sapiens; identical to SEQ ID NO: 72871
  misc_feature (206)..(206): n is a, c, g, or t

SEQ ID NO: 387485 - DNA, 1350 bp, Homo Sapiens; identical to SEQ ID NO: 361170

SEQ ID NO: 387486 - DNA, 916 bp, Homo Sapiens; identical to SEQ ID NO: 361172

SEQ ID NO: 387487 - DNA, 2177 bp, Homo Sapiens; identical to SEQ ID NO: 361173
  misc_feature (2167)..(2167): n is a, c, g, or t

SEQ ID NO: 387488 - DNA, 441 bp, Homo Sapiens; identical to SEQ ID NO: 361174

SEQ ID NO: 387489 - DNA, 437 bp, Homo Sapiens; identical to SEQ ID NO: 361175

SEQ ID NO: 387490 - DNA, 1093 bp, Homo Sapiens; identical to SEQ ID NO: 361176

SEQ ID NO: 387491 - DNA, 902 bp, Homo Sapiens; identical to SEQ ID NO: 361186
  misc_feature (113)..(113): n is a, c, g, or t

SEQ ID NO: 387492 - DNA, 1110 bp, Homo Sapiens; identical to SEQ ID NO: 361187

SEQ ID NO: 387493 - DNA, 800 bp, Homo Sapiens; identical to SEQ ID NO: 361188

SEQ ID NO: 387494 - DNA, 1189 bp, Homo Sapiens; identical to SEQ ID NO: 361194
  misc_feature (1090)..(1099): n is a, c, g, or t

SEQ ID NO: 387495 - DNA, 1473 bp, Homo Sapiens; identical to SEQ ID NO: 69989

SEQ ID NO: 387496 - DNA, 1170 bp, Homo Sapiens; identical to SEQ ID NO: 361197
  misc_feature (702)..(710): n is a, c, g, or t
  misc_feature (1066)..(1066): n is a, c, g, or t
  misc_feature (1080)..(1081): n is a, c, g, or t
  misc_feature (1089)..(1089): n is a, c, g, or t
  misc_feature (1112)..(1112): n is a, c, g, or t

SEQ ID NO: 387497 - DNA, 1162 bp, Homo Sapiens; identical to SEQ ID NO: 361198
  misc_feature (326)..(326): n is a, c, g, or t
  misc_feature (390)..(390): n is a, c, g, or t
  misc_feature (961)..(961): n is a, c, g, or t

SEQ ID NO: 387498 - DNA, 1086 bp, Homo Sapiens; identical to SEQ ID NO: 361199

SEQ ID NO: 387499 - DNA, 1639 bp, Homo Sapiens; identical to SEQ ID NO: 361200

SEQ ID NO: 387500 - DNA, 906 bp, Homo Sapiens; identical to SEQ ID NO: 361201

SEQ ID NO: 387501 - DNA, 2181 bp, Homo Sapiens; identical to SEQ ID NO: 361202

SEQ ID NO: 387502 - DNA, 903 bp, Homo Sapiens; identical to SEQ ID NO: 98869

SEQ ID NO: 387503 - DNA, 718 bp, Homo Sapiens; identical to SEQ ID NO: 361204

SEQ ID NO: 387504 - DNA, 1009 bp, Homo Sapiens; identical to SEQ ID NO: 361205

SEQ ID NO: 387505 - DNA, 859 bp, Homo Sapiens; identical to SEQ ID NO: 361206

SEQ ID NO: 387506 - DNA, 890 bp, Homo Sapiens; identical to SEQ ID NO: 361209
  misc_feature (236)..(236): n is a, c, g, or t

SEQ ID NO: 387507 - DNA, 2497 bp, Homo Sapiens; identical to SEQ ID NO: 361210
  misc_feature (2341)..(2341): n is a, c, g, or t
  misc_feature (2347)..(2347): n is a, c, g, or t
  misc_feature (2356)..(2357): n is a, c, g, or t
  misc_feature (2359)..(2361): n is a, c, g, or t

SEQ ID NO: 387508 - DNA, 857 bp, Homo Sapiens; identical to SEQ ID NO: 361212
  misc_feature (696)..(696): n is a, c, g, or t
  misc_feature (836)..(836): n is a, c, g, or t

SEQ ID NO: 387509 - DNA, 1832 bp, Homo Sapiens; identical to SEQ ID NO: 361213

SEQ ID NO: 387510 - DNA, 1747 bp, Homo Sapiens; identical to SEQ ID NO: 361222
  misc_feature (1660)..(1661): n is a, c, g, or t

SEQ ID NO: 387511 - DNA, 629 bp, Homo Sapiens; identical to SEQ ID NO: 178247

SEQ ID NO: 387512 - DNA, 1227 bp, Homo Sapiens; identical to SEQ ID NO: 361227
  misc_feature (48)..(84): n is a, c, g, or t

SEQ ID NO: 387513 - DNA, 1933 bp, Homo Sapiens; identical to SEQ ID NO: 361228
  misc_feature (1200)..(1345): n is a, c, g, or t
  misc_feature (1354)..(1354): n is a, c, g, or t
  misc_feature (1375)..(1388): n is a, c, g, or t

SEQ ID NO: 387514 - DNA, 1442 bp, Homo Sapiens; identical to SEQ ID NO: 361229
  misc_feature (1250)..(1250): n is a, c, g, or t

SEQ ID NO: 387515 - DNA, 889 bp, Homo Sapiens; identical to SEQ ID NO: 73043
  misc_feature (707)..(707): n is a, c, g, or t
  misc_feature (741)..(741): n is a, c, g, or t
  misc_feature (781)..(781): n is a, c, g, or t

SEQ ID NO: 387516 - DNA, 1087 bp, Homo Sapiens; identical to SEQ ID NO: 361232
  misc_feature (26)..(26): n is a, c, g, or t

SEQ ID NO: 387517 - DNA, 1953 bp, Homo Sapiens; identical to SEQ ID NO: 361233
  misc_feature (1650)..(1684): n is a, c, g, or t

SEQ ID NO: 387518 - DNA, 1333 bp, Homo Sapiens; identical to SEQ ID NO: 361251
  misc_feature (1160)..(1160): n is a, c, g, or t
  misc_feature (1272)..(1280): n is a, c, g, or t

SEQ ID NO: 387519 - DNA, 582 bp, Homo Sapiens; identical to SEQ ID NO: 361252
  misc_feature (64)..(64): n is a, c, g, or t

SEQ ID NO: 387520 - DNA, 1435 bp, Homo Sapiens; identical to SEQ ID NO: 361253
  misc_feature (1380)..(1380): n is a, c, g, or t
  misc_feature (1406)..(1406): n is a, c, g, or t

SEQ ID NO: 387521 - DNA, 541 bp, Homo Sapiens; identical to SEQ ID NO: 361254
  misc_feature (36)..(36): n is a, c, g, or t
  misc_feature (75)..(75): n is a, c, g, or t
  misc_feature (524)..(524): n is a, c, g, or t

SEQ ID NO: 387522 - DNA, 2007 bp, Homo Sapiens; identical to SEQ ID NO: 361258
  misc_feature (1264)..(1360): n is a, c, g, or t
  misc_feature (1500)..(1508): n is a, c, g, or t
  misc_feature (1782)..(1791): n is a, c, g, or t

SEQ ID NO: 387523 - DNA, 943 bp, Homo Sapiens; identical to SEQ ID NO: 361259

SEQ ID NO: 387524 - DNA, 2261 bp, Homo Sapiens; identical to SEQ ID NO: 361261

SEQ ID NO: 387525 - DNA, 1546 bp, Homo Sapiens; identical to SEQ ID NO: 361262
  misc_feature (1055)..(1055): n is a, c, g, or t
  misc_feature (1084)..(1084): n is a, c, g, or t

SEQ ID NO: 387526 - DNA, 900 bp, Homo Sapiens; identical to SEQ ID NO: 361268

SEQ ID NO: 387527 - DNA, 1218 bp, Homo Sapiens; identical to SEQ ID NO: 361269
  misc_feature (12)..(12): n is a, c, g, or t
  misc_feature (60)..(60): n is a, c, g, or t
  misc_feature (76)..(76): n is a, c, g, or t
  misc_feature (93)..(93): n is a, c, g, or t
  misc_feature (100)..(100): n is a, c, g, or t

SEQ ID NO: 387528 - DNA, 485 bp, Homo Sapiens; identical to SEQ ID NO: 361270

SEQ ID NO: 387529 - DNA, 1275 bp, Homo Sapiens; identical to SEQ ID NO: 361274

SEQ ID NO: 387530 - DNA, 972 bp, Homo Sapiens; identical to SEQ ID NO: 361275
  misc_feature (26)..(26): n is a, c, g, or t
  misc_feature (448)..(448): n is a, c, g, or t

SEQ ID NO: 387531 - DNA, 1839 bp, Homo Sapiens; identical to SEQ ID NO: 361276
  misc_feature (1371)..(1371): n is a, c, g, or t

SEQ ID NO: 387532 - DNA, 408 bp, Homo Sapiens; identical to SEQ ID NO: 361277
  misc_feature (69)..(69): n is a, c, g, or t
  misc_feature (106)..(106): n is a, c, g, or t
  misc_feature (175)..(175): n is a, c, g, or t

SEQ ID NO: 387533 - DNA, 1167 bp, Homo Sapiens; identical to SEQ ID NO: 361279
  misc_feature (44)..(44): n is a, c, g, or t

SEQ ID NO: 387534 - DNA, 446 bp, Homo Sapiens; identical to SEQ ID NO: 361280
  misc_feature (39)..(39): n is a, c, g, or t
  misc_feature (72)..(72): n is a, c, g, or t

SEQ ID NO: 387535 - DNA, 538 bp, Homo Sapiens; identical to SEQ ID NO: 361281

SEQ ID NO: 387536 - DNA, 454 bp, Homo Sapiens; identical to SEQ ID NO: 361287
  misc_feature (230)..(285): n is a, c, g, or t

SEQ ID NO: 387537 - DNA, 1102 bp, Homo Sapiens; identical to SEQ ID NO: 361288
  misc_feature (875)..(930): n is a, c, g, or t

SEQ ID NO: 387538 - DNA, 1569 bp, Homo Sapiens; identical to SEQ ID NO: 361289
  misc_feature (86)..(142): n is a, c, g, or t
  misc_feature (1297)..(1305): n is a, c, g, or t

SEQ ID NO: 387539 - DNA, 618 bp, Homo Sapiens; identical to SEQ ID NO: 361290
  misc_feature (225)..(225): n is a, c, g, or t
  misc_feature (228)..(228): n is a, c, g, or t
  misc_feature (251)..(251): n is a, c, g, or t
  misc_feature (398)..(398): n is a, c, g, or t
  misc_feature (564)..(564): n is a, c, g, or t

SEQ ID NO: 387540 - DNA, 581 bp, Homo Sapiens; identical to SEQ ID NO: 361292
  misc_feature (57)..(57): n is a, c, g, or t

SEQ ID NO: 387541 - DNA, 1103 bp, Homo Sapiens; identical to SEQ ID NO: 361293
  misc_feature (1047)..(1047): n is a, c, g, or t
  misc_feature (1055)..(1055): n is a, c, g, or t
  misc_feature (1060)..(1060): n is a, c, g, or t
  misc_feature (1074)..(1074): n is a, c, g, or t

SEQ ID NO: 387542 - DNA, 1926 bp, Homo Sapiens; identical to SEQ ID NO: 361296

SEQ ID NO: 387543 - DNA, 456 bp, Homo Sapiens; identical to SEQ ID NO: 361297

SEQ ID NO: 387544 - DNA, 1006 bp, Homo Sapiens; identical to SEQ ID NO: 361299
  misc_feature (13)..(13): n is a, c, g, or t
  misc_feature (143)..(143): n is a, c, g, or t
  misc_feature (182)..(182): n is a, c, g, or t
  misc_feature (184)..(184): n is a, c, g, or t
  misc_feature (204)..(204): n is a, c, g, or t
  misc_feature (218)..(218): n is a, c, g, or t

SEQ ID NO: 387545 - DNA, 791 bp, Homo Sapiens; identical to SEQ ID NO: 361300
  misc_feature (772)..(772): n is a, c, g, or t

SEQ ID NO: 387546 - DNA, 1647 bp, Homo Sapiens; identical to SEQ ID NO: 361306

SEQ ID NO: 387547 - DNA, 706 bp, Homo Sapiens; identical to SEQ ID NO: 361307

SEQ ID NO: 387548 - DNA, 920 bp, Homo Sapiens; identical to SEQ ID NO: 361308

SEQ ID NO: 387549 - DNA, 1330 bp, Homo Sapiens; identical to SEQ ID NO: 361309

SEQ ID NO: 387550 - DNA, 343 bp, Homo Sapiens; identical to SEQ ID NO: 361310
  misc_feature (314)..(314): n is a, c, g, or t

SEQ ID NO: 387551 - DNA, 662 bp, Homo Sapiens; identical to SEQ ID NO: 361311
  misc_feature (167)..(221): n is a, c, g, or t
  misc_feature (514)..(514): n is a, c, g, or t

SEQ ID NO: 387552 - DNA, 1077 bp, Homo Sapiens; identical to SEQ ID NO: 361312

SEQ ID NO: 387553 - DNA, 885 bp, Homo Sapiens; identical to SEQ ID NO: 361313

SEQ ID NO: 387554 - DNA, 1061 bp, Homo Sapiens; identical to SEQ ID NO: 361314
  misc_feature (152)..(160): n is a, c, g, or t

SEQ ID NO: 387555 - DNA, 1144 bp, Homo Sapiens; identical to SEQ ID NO: 361315
  misc_feature (184)..(191): n is a, c, g, or t

SEQ ID NO: 387556 - DNA, 1166 bp, Homo Sapiens; identical to SEQ ID NO: 361317
  misc_feature (43)..(43): n is a, c, g, or t

SEQ ID NO: 387557 - DNA, 1435 bp, Homo Sapiens; identical to SEQ ID NO: 361318
  misc_feature (955)..(963): n is a, c, g, or t
  misc_feature (1032)..(1098): n is a, c, g, or t
  misc_feature (1204)..(1225): n is a, c, g, or t

SEQ ID NO: 387558 - DNA, 475 bp, Homo Sapiens; identical to SEQ ID NO: 361319

SEQ ID NO: 387559 - DNA, 1467 bp, Homo Sapiens; identical to SEQ ID NO: 361322
  misc_feature (1214)..(1214): n is a, c, g, or t

SEQ ID NO: 387560 - DNA, 1133 bp, Homo Sapiens; identical to SEQ ID NO: 361323

SEQ ID NO: 387561 - DNA, 1014 bp, Homo Sapiens; identical to SEQ ID NO: 361324

SEQ ID NO: 387562 - DNA, 1212 bp, Homo Sapiens; identical to SEQ ID NO: 361325
  misc_feature (951)..(989): n is a, c, g, or t
  misc_feature (1004)..(1013): n is a, c, g, or t

SEQ ID NO: 387563 - DNA, 1131 bp, Homo Sapiens; identical to SEQ ID NO: 361326
  misc_feature (898)..(898): n is a, c, g, or t
  misc_feature (900)..(901): n is a, c, g, or t
  misc_feature (910)..(911): n is a, c, g, or t
  misc_feature (919)..(919): n is a, c, g, or t
  misc_feature (925)..(925): n is a, c, g, or t
  misc_feature (927)..(927): n is a, c, g, or t
  misc_feature (965)..(965): n is a, c, g, or t

SEQ ID NO: 387564 - DNA, 1512 bp, Homo Sapiens; identical to SEQ ID NO: 361328

SEQ ID NO: 387565 - DNA, 962 bp, Homo Sapiens; identical to SEQ ID NO: 361329
  misc_feature (115)..(115): n is a, c, g, or t
  misc_feature (345)..(381): n is a, c, g, or t

SEQ ID NO: 387566 - DNA, 2189 bp, Homo Sapiens; identical to SEQ ID NO: 361331
  misc_feature (1204)..(1237): n is a, c, g, or t
  misc_feature (1847)..(1871): n is a, c, g, or t

SEQ ID NO: 387567 - DNA, 373 bp, Homo Sapiens; identical to SEQ ID NO: 361332

SEQ ID NO: 387568 - DNA, 1037 bp, Homo Sapiens; identical to SEQ ID NO: 361335
  misc_feature (825)..(860): n is a, c, g, or t
  misc_feature (924)..(950): n is a, c, g, or t

SEQ ID NO: 387569 - DNA, 1651 bp, Homo Sapiens; identical to SEQ ID NO: 361336
  misc_feature (1339)..(1347): n is a, c, g, or t

SEQ ID NO: 387570 - DNA, 1019 bp, Homo Sapiens; identical to SEQ ID NO: 361344
  misc_feature (26)..(26): n is a, c, g, or t
  misc_feature (66)..(66): n is a, c, g, or t
  misc_feature (104)..(104): n is a, c, g, or t
  misc_feature (132)..(132): n is a, c, g, or t

SEQ ID NO: 387571 - DNA, 1164 bp, Homo Sapiens; identical to SEQ ID NO: 361345

SEQ ID NO: 387572 - DNA, 2327 bp, Homo Sapiens; identical to SEQ ID NO: 361349

SEQ ID NO: 387573 - DNA, 1005 bp, Homo Sapiens; identical to SEQ ID NO: 361350

SEQ ID NO: 387574 - DNA, 957 bp, Homo Sapiens; identical to SEQ ID NO: 361353
  misc_feature (839)..(839): n is a, c, g, or t

SEQ ID NO: 387575 - DNA, 1118 bp, Homo Sapiens; identical to SEQ ID NO: 361354
  misc_feature (828)..(828): n is a, c, g, or t

SEQ ID NO: 387576 - DNA, 897 bp, Homo Sapiens; identical to SEQ ID NO: 361359

SEQ ID NO: 387577 - DNA, 469 bp, Homo Sapiens; identical to SEQ ID NO: 361360

SEQ ID NO: 387578 - DNA, 776 bp, Homo Sapiens; identical to SEQ ID NO: 361362

SEQ ID NO: 387579 - DNA, 1803 bp, Homo Sapiens; identical to SEQ ID NO: 361363

SEQ ID NO: 387580 - DNA, 741 bp, Homo Sapiens; identical to SEQ ID NO: 361364

SEQ ID NO: 387581 - DNA, 1516 bp, Homo Sapiens; identical to SEQ ID NO: 361366
  misc_feature (1343)..(1343): n is a, c, g, or t

SEQ ID NO: 387582 - DNA, 1392 bp, Homo Sapiens; identical to SEQ ID NO: 361367

SEQ ID NO: 387583 - DNA, 839 bp, Homo Sapiens; identical to SEQ ID NO: 361369
  misc_feature (742)..(742): n is a, c, g, or t
  misc_feature (751)..(751): n is a, c, g, or t
  misc_feature (793)..(793): n is a, c, g, or t

SEQ ID NO: 387584 - DNA, 1413 bp, Homo Sapiens; identical to SEQ ID NO: 361370
  misc_feature (1065)..(1133): n is a, c, g, or t
  misc_feature (1137)..(1137): n is a, c, g, or t
  misc_feature (1149)..(1227): n is a, c, g, or t
  misc_feature (1229)..(1230): n is a, c, g, or t
  misc_feature (1235)..(1235): n is a, c, g, or t
  misc_feature (1237)..(1237): n is a, c, g, or t
  misc_feature (1243)..(1280): n is a, c, g, or t
  misc_feature (1306)..(1348): n is a, c, g, or t

SEQ ID NO: 387585 - DNA, 1563 bp, Homo Sapiens; identical to SEQ ID NO: 361371
  misc_feature (331)..(435): n is a, c, g, or t
  misc_feature (740)..(740): n is a, c, g, or t

SEQ ID NO: 387586 - DNA, 307 bp, Homo Sapiens; identical to SEQ ID NO: 361372

SEQ ID NO: 387587 - DNA, 1036 bp, Homo Sapiens; identical to SEQ ID NO: 361375
  misc_feature (352)..(352): n is a, c, g, or t

SEQ ID NO: 387588 - DNA, 1211 bp, Homo Sapiens; identical to SEQ ID NO: 361376
  misc_feature (44)..(80): n is a, c, g, or t

SEQ ID NO: 387589 - DNA, 1129 bp, Homo Sapiens; identical to SEQ ID NO: 361377
  misc_feature (965)..(965): n is a, c, g, or t
  misc_feature (1006)..(1006): n is a, c, g, or t

SEQ ID NO: 387590 - DNA, 980 bp, Homo Sapiens; identical to SEQ ID NO: 361378
  misc_feature (54)..(54): n is a, c, g, or t

SEQ ID NO: 387591 - DNA, 2753 bp, Homo Sapiens; identical to SEQ ID NO: 361379
  misc_feature (1954)..(1990): n is a, c, g, or t

SEQ ID NO: 387592 - DNA, 1064 bp, Homo Sapiens; identical to SEQ ID NO: 361380

SEQ ID NO: 387593 - DNA, 1062 bp, Homo Sapiens; identical to SEQ ID NO: 361381

SEQ ID NO: 387594 - DNA, 717 bp, Homo Sapiens; identical to SEQ ID NO: 361382

SEQ ID NO: 387595 - DNA, 2141 bp, Homo Sapiens; identical to SEQ ID NO: 361384
  misc_feature (25)..(25): n is a, c, g, or t

SEQ ID NO: 387596 - DNA, 1146 bp, Homo Sapiens; identical to SEQ ID NO: 361385
  misc_feature (959)..(959): n is a, c, g, or t

SEQ ID NO: 387597 - DNA, 902 bp, Homo Sapiens; identical to SEQ ID NO: 361387
  misc_feature (749)..(749): n is a, c, g, or t

SEQ ID NO: 387598 - DNA, 1004 bp, Homo Sapiens; identical to SEQ ID NO: 361388
  misc_feature (78)..(78): n is a, c, g, or t
  misc_feature (211)..(211): n is a, c, g, or t

SEQ ID NO: 387599 - DNA, 1077 bp, Homo Sapiens; identical to SEQ ID NO: 361390
  misc_feature (246)..(246): n is a, c, g, or t

SEQ ID NO: 387600 - DNA, 927 bp, Homo Sapiens; identical to SEQ ID NO: 361391

SEQ ID NO: 387601 - DNA, 1061 bp, Homo Sapiens; identical to SEQ ID NO: 361392
  misc_feature (917)..(918): n is a, c, g, or t
  misc_feature (931)..(931): n is a, c, g, or t
  misc_feature (947)..(947): n is a, c, g, or t
  misc_feature (1008)..(1008): n is a, c, g, or t

SEQ ID NO: 387602 - DNA, 1269 bp, Homo Sapiens; identical to SEQ ID NO: 361393

SEQ ID NO: 387603 - DNA, 472 bp, Homo Sapiens; identical to SEQ ID NO: 361394

SEQ ID NO: 387604 - DNA, 1115 bp, Homo Sapiens; identical to SEQ ID NO: 261744

SEQ ID NO: 387605 - DNA, 1146 bp, Homo Sapiens; identical to SEQ ID NO: 261745

SEQ ID NO: 387606 - DNA, 1282 bp, Homo Sapiens; identical to SEQ ID NO: 262429
  misc_feature (788)..(984): n is a, c, g, or t

SEQ ID NO: 387607 - DNA, 521 bp, Homo Sapiens; identical to SEQ ID NO: 361400
  misc_feature (233)..(233): n is a, c, g, or t

SEQ ID NO: 387608 - DNA, 2075 bp, Homo Sapiens; identical to SEQ ID NO: 361401
  misc_feature (50)..(86): n is a, c, g, or t
  misc_feature (1708)..(1782): n is a, c, g, or t

SEQ ID NO: 387609 - DNA, 475 bp, Homo Sapiens; identical to SEQ ID NO: 361402
  misc_feature (36)..(36): n is a, c, g, or t

SEQ ID NO: 387610 - DNA, 438 bp, Homo Sapiens; identical to SEQ ID NO: 361403
  misc_feature (20)..(20): n is a, c, g, or t
  misc_feature (31)..(31): n is a, c, g, or t

SEQ ID NO: 387611 - DNA, 838 bp, Homo Sapiens; identical to SEQ ID NO: 361405
  misc_feature (700)..(700): n is a, c, g, or t

SEQ ID NO: 387612 - DNA, 1159 bp, Homo Sapiens; identical to SEQ ID NO: 361406

SEQ ID NO: 387613 - DNA, 1356 bp, Homo Sapiens; identical to SEQ ID NO: 361410
  misc_feature (57)..(93): n is a, c, g, or t
  misc_feature (1148)..(1148): n is a, c, g, or t
  misc_feature (1187)..(1187): n is a, c, g, or t

SEQ ID NO: 387614 - DNA, 1015 bp, Homo Sapiens; identical to SEQ ID NO: 361411
  misc_feature (874)..(874): n is a, c, g, or t

SEQ ID NO: 387615 - DNA, 1545 bp, Homo Sapiens; identical to SEQ ID NO: 361412
  misc_feature (1516)..(1516): n is a, c, g, or t

SEQ ID NO: 387616 - DNA, 1054 bp, Homo Sapiens; identical to SEQ ID NO: 361413
  misc_feature (90)..(90): n is a, c, g, or t

SEQ ID NO: 387617 - DNA, 528 bp, Homo Sapiens; identical to SEQ ID NO: 361414

SEQ ID NO: 387618 - DNA, 956 bp, Homo Sapiens; identical to SEQ ID NO: 361424

SEQ ID NO: 387619 - DNA, 944 bp, Homo Sapiens; identical to SEQ ID NO: 361425

SEQ ID NO: 387620 - DNA, 1155 bp, Homo Sapiens; identical to SEQ ID NO: 361431

SEQ ID NO: 387621 - DNA, 732 bp, Homo Sapiens; identical to SEQ ID NO: 361432

SEQ ID NO: 387622 - DNA, 842 bp, Homo Sapiens; identical to SEQ ID NO: 361434

SEQ ID NO: 387623 - DNA, 1328 bp, Homo Sapiens; identical to SEQ ID NO: 361435

SEQ ID NO: 387624 - DNA, 500 bp, Homo Sapiens; identical to SEQ ID NO: 361436

SEQ ID NO: 387625 - DNA, 3514 bp, Homo Sapiens; identical to SEQ ID NO: 361438
  misc_feature (3429)..(3440): n is a, c, g, or t

SEQ ID NO: 387626 - DNA, 1208 bp, Homo Sapiens; identical to SEQ ID NO: 361439
  misc_feature (1022)..(1035): n is a, c, g, or t

SEQ ID NO: 387627 - DNA, 876 bp, Homo Sapiens; identical to SEQ ID NO: 361440

SEQ ID NO: 387628 - DNA, 995 bp, Homo Sapiens; identical to SEQ ID NO: 361441
  misc_feature (34)..(34): n is a, c, g, or t
  misc_feature (49)..(85): n is a, c, g, or t

SEQ ID NO: 387629 - DNA, 1173 bp, Homo Sapiens; identical to SEQ ID NO: 361443

SEQ ID NO: 387630 - DNA, 941 bp, Homo Sapiens; identical to SEQ ID NO: 361444
  misc_feature (865)..(897): n is a, c, g, or t

SEQ ID NO: 387631 - DNA, 2260 bp, Homo Sapiens; identical to SEQ ID NO: 361449
  misc_feature (2127)..(2138): n is a, c, g, or t

SEQ ID NO: 387632 - DNA, 910 bp, Homo Sapiens; identical to SEQ ID NO: 361450
  misc_feature (197)..(197): n is a, c, g, or t

SEQ ID NO: 387633 - DNA, 876 bp, Homo Sapiens; identical to SEQ ID NO: 361473
  misc_feature (723)..(723): n is a, c, g, or t
  misc_feature (733)..(733): n is a, c, g, or t
  misc_feature (817)..(817): n is a, c, g, or t

SEQ ID NO: 387634 - DNA, 1479 bp, Homo Sapiens; identical to SEQ ID NO: 361474
  misc_feature (1291)..(1299): n is a, c, g, or t

SEQ ID NO: 387635 - DNA, 1950 bp, Homo Sapiens; identical to SEQ ID NO: 361476

SEQ ID NO: 387636 - DNA, 1384 bp, Homo Sapiens; identical to SEQ ID NO: 361477

SEQ ID NO: 387637 - DNA, 1148 bp, Homo Sapiens; identical to SEQ ID NO: 361480

SEQ ID NO: 387638 - DNA, 165 bp, Homo Sapiens; identical to SEQ ID NO: 361481

SEQ ID NO: 387639 - DNA, 453 bp, Homo Sapiens; identical to SEQ ID NO: 361482
  misc_feature (388)..(388): n is a, c, g, or t
  misc_feature (400)..(400): n is a, c, g, or t
  misc_feature (410)..(410): n is a, c, g, or t
  misc_feature (436)..(436): n is a, c, g, or t

SEQ ID NO: 387640 - DNA, 899 bp, Homo Sapiens; identical to SEQ ID NO: 361484

SEQ ID NO: 387641 - DNA, 2114 bp, Homo Sapiens; identical to SEQ ID NO: 361485

SEQ ID NO: 387642 - DNA, 774 bp, Homo Sapiens; identical to SEQ ID NO: 361487

SEQ ID NO: 387643 - DNA, 2108 bp, Homo Sapiens; identical to SEQ ID NO: 361488

SEQ ID NO: 387644 - DNA, 842 bp, Homo Sapiens; identical to SEQ ID NO: 361490
  misc_feature (114)..(114): n is a, c, g, or t
  misc_feature (426)..(595): n is a, c, g, or t

SEQ ID NO: 387645 - DNA, 1038 bp, Homo Sapiens; identical to SEQ ID NO: 361491
  misc_feature (417)..(576): n is a, c, g, or t
  misc_feature (863)..(863): n is a, c, g, or t
  misc_feature (935)..(935): n is a, c, g, or t

SEQ ID NO: 387646 - DNA, 1657 bp, Homo Sapiens; identical to SEQ ID NO: 361492
  misc_feature (209)..(343): n is a, c, g, or t
  misc_feature (1099)..(1110): n is a, c, g, or t

SEQ ID NO: 387647 - DNA, 1397 bp, Homo Sapiens; identical to SEQ ID NO: 361493

SEQ ID NO: 387648 - DNA, 1060 bp, Homo Sapiens; identical to SEQ ID NO: 361494
  misc_feature (17)..(17): n is a, c, g, or t
  misc_feature (25)..(25): n is a, c, g, or t

SEQ ID NO: 387649 - DNA, 688 bp, Homo Sapiens; identical to SEQ ID NO: 361502

SEQ ID NO: 387650 - DNA, 610 bp, Homo Sapiens; identical to SEQ ID NO: 361503
  misc_feature (534)..(534): n is a, c, g, or t

SEQ ID NO: 387651 - DNA, 1037 bp, Homo Sapiens; identical to SEQ ID NO: 361516
  misc_feature (694)..(694): n is a, c, g, or t
  misc_feature (855)..(855): n is a, c, g, or t
  misc_feature (880)..(880): n is a, c, g, or t
  misc_feature (938)..(939): n is a, c, g, or t
  misc_feature (971)..(971): n is a, c, g, or t
  misc_feature (1002)..(1002): n is a, c, g, or t
  misc_feature (1007)..(1007): n is a, c, g, or t

SEQ ID NO: 387652 - DNA, 954 bp, Homo Sapiens; identical to SEQ ID NO: 361517

SEQ ID NO: 387653 - DNA, 1733 bp, Homo Sapiens; identical to SEQ ID NO: 361519

SEQ ID NO: 387654 - DNA, 982 bp, Homo Sapiens; identical to SEQ ID NO: 361520

SEQ ID NO: 387655 - DNA, 488 bp, Homo Sapiens; identical to SEQ ID NO: 361521
  misc_feature (29)..(29): n is a, c, g, or t
  misc_feature (31)..(31): n is a, c, g, or t
  misc_feature (475)..(475): n is a, c, g, or t

SEQ ID NO: 387656 - DNA, 869 bp, Homo Sapiens; identical to SEQ ID NO: 361522
  misc_feature (702)..(702): n is a, c, g, or t

SEQ ID NO: 387657 - DNA, 1811 bp, Homo Sapiens; identical to SEQ ID NO: 361523

SEQ ID NO: 387658 - DNA, 1237 bp, Homo Sapiens; identical to SEQ ID NO: 361524
  misc_feature (52)..(88): n is a, c, g, or t

SEQ ID NO: 387659 - DNA, 272 bp, Homo Sapiens; identical to SEQ ID NO: 361525
  misc_feature (150)..(150): n is a, c, g, or t

SEQ ID NO: 387660 - DNA, 285 bp, Homo Sapiens; identical to SEQ ID NO: 361526
  misc_feature (259)..(259): n is a, c, g, or t
  misc_feature (265)..(265): n is a, c, g, or t

SEQ ID NO: 387661 - DNA, 1894 bp, Homo Sapiens; identical to SEQ ID NO: 361530
  misc_feature (1185)..(1268): n is a, c, g, or t
  misc_feature (1379)..(1379): n is a, c, g, or t
  misc_feature (1437)..(1437): n is a, c, g, or t
  misc_feature (1446)..(1446): n is a, c, g, or t
  misc_feature (1634)..(1634): n is a, c, g, or t

SEQ ID NO: 387662 - DNA, 977 bp, Homo Sapiens; identical to SEQ ID NO: 361531
  misc_feature (854)..(854): n is a, c, g, or t

SEQ ID NO: 387663 - DNA, 831 bp, Homo Sapiens; identical to SEQ ID NO: 361534
  misc_feature (103)..(113): n is a, c, g, or t
  misc_feature (774)..(774): n is a, c, g, or t

SEQ ID NO: 387664 - DNA, 1100 bp, Homo Sapiens; identical to SEQ ID NO: 361535

SEQ ID NO: 387665 - DNA, 1089 bp, Homo Sapiens; identical to SEQ ID NO: 361539

SEQ ID NO: 387666 - DNA, 891 bp, Homo Sapiens; identical to SEQ ID NO: 361540

SEQ ID NO: 387667 - DNA, 919 bp, Homo Sapiens; identical to SEQ ID NO: 361541

SEQ ID NO: 387668 - DNA, 846 bp, Homo Sapiens; identical to SEQ ID NO: 361542

SEQ ID NO: 387669 - DNA, 1002 bp, Homo Sapiens; identical to SEQ ID NO: 361544

SEQ ID NO: 387670 - DNA, 1917 bp, Homo Sapiens; identical to SEQ ID NO: 361545

SEQ ID NO: 387671 - DNA, 530 bp, Homo Sapiens; identical to SEQ ID NO: 361546
  misc_feature (360)..(360): n is a, c, g, or t
  misc_feature (364)..(364): n is a, c, g, or t

SEQ ID NO: 387672 - DNA, 995 bp, Homo Sapiens; identical to SEQ ID NO: 361547

SEQ ID NO: 387673 - DNA, 1029 bp, Homo Sapiens; identical to SEQ ID NO: 361548

SEQ ID NO: 387674 - DNA, 1312 bp, Homo Sapiens; identical to SEQ ID NO: 361550
  misc_feature (665)..(737): n is a, c, g, or t

SEQ ID NO: 387675 - DNA, 212 bp, Homo Sapiens; identical to SEQ ID NO: 361551

SEQ ID NO: 387676 - DNA, 1363 bp, Homo Sapiens; identical to SEQ ID NO: 361553

SEQ ID NO: 387677 - DNA, 1121 bp, Homo Sapiens; identical to SEQ ID NO: 361554
  misc_feature (95)..(95): n is a, c, g, or t
  misc_feature (174)..(174): n is a, c, g, or t
  misc_feature (230)..(230): n is a, c, g, or t

SEQ ID NO: 387678 - DNA, 1368 bp, Homo Sapiens; identical to SEQ ID NO: 361560

SEQ ID NO: 387679 - DNA, 740 bp, Homo Sapiens; identical to SEQ ID NO: 361561

SEQ ID NO: 387680 - DNA, 1176 bp, Homo Sapiens; identical to SEQ ID NO: 361563
  misc_feature (1080)..(1080): n is a, c, g, or t
  misc_feature (1091)..(1091): n is a, c, g, or t

SEQ ID NO: 387681 - DNA, 617 bp, Homo Sapiens; identical to SEQ ID NO: 361564

SEQ ID NO: 387682 - DNA, 599 bp, Homo Sapiens; identical to SEQ ID NO: 361565

SEQ ID NO: 387683 - DNA, 1393 bp, Homo Sapiens; identical to SEQ ID NO: 361575

SEQ ID NO: 387684 - DNA, 213 bp, Homo Sapiens; identical to SEQ ID NO: 361576

SEQ ID NO: 387685 - DNA, 1879 bp, Homo Sapiens; identical to SEQ ID NO: 361579
  misc_feature (1098)..(1163): n is a, c, g, or t
  misc_feature (1180)..(1230): n is a, c, g, or t
  misc_feature (1245)..(1255): n is a, c, g, or t
  misc_feature (1678)..(1678): n is a, c, g, or t

SEQ ID NO: 387686 - DNA, 868 bp, Homo Sapiens; identical to SEQ ID NO: 361580
  misc_feature (566)..(590): n is a, c, g, or t
  misc_feature (599)..(637): n is a, c, g, or t
  misc_feature (684)..(756): n is a, c, g, or t
  misc_feature (796)..(804): n is a, c, g, or t

SEQ ID NO: 387687 - DNA, 866 bp, Homo Sapiens; identical to SEQ ID NO: 361588
  misc_feature (749)..(749): n is a, c, g, or t

SEQ ID NO: 387688 - DNA, 826 bp, Homo Sapiens; identical to SEQ ID NO: 361589
  misc_feature (552)..(552): n is a, c, g, or t
  misc_feature (565)..(565): n is a, c, g, or t
  misc_feature (622)..(622): n is a, c, g, or t
  misc_feature (664)..(664): n is a, c, g, or t
  misc_feature (669)..(670): n is a, c, g, or t
  misc_feature (672)..(672): n is a, c, g, or t
  misc_feature (761)..(761): n is a, c, g, or t
  misc_feature (787)..(787): n is a, c, g, or t

SEQ ID NO: 387689 - DNA, 1991 bp, Homo Sapiens; identical to SEQ ID NO: 361590
  misc_feature (1960)..(1960): n is a, c, g, or t
  misc_feature (1966)..(1966): n is a, c, g, or t

SEQ ID NO: 387690 - DNA, 947 bp, Homo Sapiens; identical to SEQ ID NO: 361591

SEQ ID NO: 387691 - DNA, 608 bp, Homo Sapiens; identical to SEQ ID NO: 361592

SEQ ID NO: 387692 - DNA, 1189 bp, Homo Sapiens; identical to SEQ ID NO: 361597

SEQ ID NO: 387693 - DNA, 1190 bp, Homo Sapiens; identical to SEQ ID NO: 361598
  misc_feature (925)..(925): n is a, c, g, or t
  misc_feature (1076)..(1076): n is a, c, g, or t

SEQ ID NO: 387694 - DNA, 1518 bp, Homo Sapiens; identical to SEQ ID NO: 361604
  misc_feature (243)..(320): n is a, c, g, or t
  misc_feature (1452)..(1465): n is a, c, g, or t

SEQ ID NO: 387695 - DNA, 729 bp, Homo Sapiens; identical to SEQ ID NO: 361605
  misc_feature (488)..(544): n is a, c, g, or t

SEQ ID NO: 387696 - DNA, 904 bp, Homo Sapiens; identical to SEQ ID NO: 361606

SEQ ID NO: 387697 - DNA, 975 bp, Homo Sapiens; identical to SEQ ID NO: 361607

SEQ ID NO: 387698 - DNA, 2241 bp, Homo Sapiens; identical to SEQ ID NO: 361608
  misc_feature (1753)..(1774): n is a, c, g, or t
  misc_feature (1909)..(1941): n is a, c, g, or t

SEQ ID NO: 387699 - DNA, 928 bp, Homo Sapiens; identical to SEQ ID NO: 361609

SEQ ID NO: 387700 - DNA, 1363 bp, Homo Sapiens; identical to SEQ ID NO: 361610

SEQ ID NO: 387701 - DNA, 918 bp, Homo Sapiens; identical to SEQ ID NO: 361611

SEQ ID NO: 387702 - DNA, 703 bp, Homo Sapiens; identical to SEQ ID NO: 361612
  misc_feature (565)..(565): n is a, c, g, or t
  misc_feature (568)..(568): n is a, c, g, or t

SEQ ID NO: 387703 - DNA, 461 bp, Homo Sapiens; identical to SEQ ID NO: 361613
  misc_feature (11)..(11): n is a, c, g, or t
  misc_feature (26)..(26): n is a, c, g, or t

SEQ ID NO: 387704 - DNA, 428 bp, Homo Sapiens; identical to SEQ ID NO: 361614
  misc_feature (23)..(23): n is a, c, g, or t
  misc_feature (31)..(31): n is a, c, g, or t
  misc_feature (42)..(42): n is a, c, g, or t
  misc_feature (125)..(125): n is a, c, g, or t
  misc_feature (403)..(403): n is a, c, g, or t
  misc_feature (412)..(412): n is a, c, g, or t

SEQ ID NO: 387705 - DNA, 1092 bp, Homo Sapiens; identical to SEQ ID NO: 361617

SEQ ID NO: 387706 - DNA, 1365 bp, Homo Sapiens; identical to SEQ ID NO: 361618

SEQ ID NO: 387707 - DNA, 859 bp, Homo Sapiens; identical to SEQ ID NO: 361619

SEQ ID NO: 387708 - DNA, 741 bp, Homo Sapiens; identical to SEQ ID NO: 361620

SEQ ID NO: 387709 - DNA, 1535 bp, Homo Sapiens; identical to SEQ ID NO: 361624
  misc_feature (1458)..(1467): n is a, c, g, or t

SEQ ID NO: 387710 - DNA, 1243 bp, Homo Sapiens; identical to SEQ ID NO: 361625
  misc_feature (499)..(499): n is a, c, g, or t

SEQ ID NO: 387711 - DNA, 525 bp, Homo Sapiens; identical to SEQ ID NO: 361626
  misc_feature (48)..(48): n is a, c, g, or t

SEQ ID NO: 387712 - DNA, 1469 bp, Homo Sapiens; identical to SEQ ID NO: 361632

SEQ ID NO: 387713 - DNA, 981 bp, Homo Sapiens; identical to SEQ ID NO: 361633

SEQ ID NO: 387714 - DNA, 1206 bp, Homo Sapiens; identical to SEQ ID NO: 361637

SEQ ID NO: 387715 - DNA, 1240 bp, Homo Sapiens; identical to SEQ ID NO: 361638

SEQ ID NO: 387716 - DNA, 765 bp, Homo Sapiens; identical to SEQ ID NO: 264759

SEQ ID NO: 387717 - DNA, 585 bp, Homo Sapiens; identical to SEQ ID NO: 361647

SEQ ID NO: 387718 - DNA, 735 bp, Homo Sapiens; identical to SEQ ID NO: 361648
  misc_feature (499)..(591): n is a, c, g, or t

SEQ ID NO: 387719 - DNA, 268 bp, Homo Sapiens; identical to SEQ ID NO: 361664

SEQ ID NO: 387720 - DNA, 682 bp, Homo Sapiens; identical to SEQ ID NO: 361665
  misc_feature (521)..(559): n is a, c, g, or t

SEQ ID NO: 387721 - DNA, 370 bp, Homo Sapiens; identical to SEQ ID NO: 361668
  misc_feature (174)..(286): n is a, c, g, or t

SEQ ID NO: 387722 - DNA, 1650 bp, Homo Sapiens; identical to SEQ ID NO: 361669

SEQ ID NO: 387723 - DNA, 159 bp, Homo Sapiens; identical to SEQ ID NO: 361670

SEQ ID NO: 387724 - DNA, 1141 bp, Homo Sapiens; identical to SEQ ID NO: 361671
  misc_feature (710)..(710): n is a, c, g, or t

SEQ ID NO: 387725 - DNA, 165 bp, Homo Sapiens; identical to SEQ ID NO: 361674

SEQ ID NO: 387726 - DNA, 861 bp, Homo Sapiens; identical to SEQ ID NO: 361675

SEQ ID NO: 387727 - DNA, 977 bp, Homo Sapiens; identical to SEQ ID NO: 361676

SEQ ID NO: 387728 - DNA, 1385 bp, Homo Sapiens; identical to SEQ ID NO: 361677

SEQ ID NO: 387729 - DNA, 660 bp, Homo Sapiens; identical to SEQ ID NO: 361680

SEQ ID NO: 387730 - DNA, 357 bp, Homo Sapiens; identical to SEQ ID NO: 361681

SEQ ID NO: 387731 - DNA, 214 bp, Homo Sapiens; identical to SEQ ID NO: 361685

SEQ ID NO: 387732 - DNA, 1018 bp, Homo Sapiens; identical to SEQ ID NO: 361686
  misc_feature (29)..(29): n is a, c, g, or t
  misc_feature (71)..(71): n is a, c, g, or t
  misc_feature (468)..(618): n is a, c, g, or t
  misc_feature (627)..(640): n is a, c, g, or t
  misc_feature (654)..(777): n is a, c, g, or t
  misc_feature (782)..(844): n is a, c, g, or t
  misc_feature (861)..(869): n is a, c, g, or t

SEQ ID NO: 387733 - DNA, 952 bp, Homo Sapiens; identical to SEQ ID NO: 361691
  misc_feature (45)..(81): n is a, c, g, or t

SEQ ID NO: 387734 - DNA, 643 bp, Homo Sapiens; identical to SEQ ID NO: 361692

SEQ ID NO: 387735 - DNA, 575 bp, Homo Sapiens; identical to SEQ ID NO: 361696

SEQ ID NO: 387736 - DNA, 646 bp, Homo Sapiens; identical to SEQ ID NO: 361697
  misc_feature (566)..(566): n is a, c, g, or t
  misc_feature (574)..(575): n is a, c, g, or t

SEQ ID NO: 387737 - DNA, 859 bp, Homo Sapiens; identical to SEQ ID NO: 361698
  misc_feature (490)..(530): n is a, c, g, or t

SEQ ID NO: 387738 - DNA, 804 bp, Homo Sapiens; identical to SEQ ID NO: 361705

SEQ ID NO: 387739 - DNA, 446 bp, Homo Sapiens; identical to SEQ ID NO: 361706
  misc_feature (60)..(60): n is a, c, g, or t

SEQ ID NO: 387740 - DNA, 955 bp, Homo Sapiens; identical to SEQ ID NO: 361715
  misc_feature (258)..(258): n is a, c, g, or t

SEQ ID NO: 387741 - DNA, 459 bp, Homo Sapiens; identical to SEQ ID NO: 361716
  misc_feature (59)..(59): n is a, c, g, or t

SEQ ID NO: 387742 - DNA, 1030 bp, Homo Sapiens; identical to SEQ ID NO: 361717
  misc_feature (42)..(78): n is a, c, g, or t

SEQ ID NO: 387743 - DNA, 738 bp, Homo Sapiens; identical to SEQ ID NO: 361718
  misc_feature (50)..(86): n is a, c, g, or t

SEQ ID NO: 387744 - DNA, 753 bp, Homo Sapiens; identical to SEQ ID NO: 361731
  misc_feature (33)..(33): n is a, c, g, or t

SEQ ID NO: 387745 - DNA, 654 bp, Homo Sapiens; identical to SEQ ID NO: 361732
  misc_feature (71)..(71): n is a, c, g, or t

SEQ ID NO: 387746 - DNA, 536 bp, Homo Sapiens; identical to SEQ ID NO: 361736
  misc_feature (389)..(397): n is a, c, g, or t

SEQ ID NO: 387747 - DNA, 1162 bp, Homo Sapiens; identical to SEQ ID NO: 361737
  misc_feature (972)..(972): n is a, c, g, or t
  misc_feature (1045)..(1045): n is a, c, g, or t

SEQ ID NO: 387748 - DNA, 1580 bp, Homo Sapiens; identical to SEQ ID NO: 361740
  misc_feature (1483)..(1487): n is a, c, g, or t
  misc_feature (1489)..(1492): n is a, c, g, or t
  misc_feature (1494)..(1494): n is a, c, g, or t
  misc_feature (1496)..(1497): n is a, c, g, or t
  misc_feature (1500)..(1500): n is a, c, g, or t

SEQ ID NO: 387749 - DNA, 779 bp, Homo Sapiens; identical to SEQ ID NO: 361741
  misc_feature (435)..(435): n is a, c, g, or t

SEQ ID NO: 387750 - DNA, 398 bp, Homo Sapiens; identical to SEQ ID NO: 361742

SEQ ID NO: 387751 - DNA, 615 bp, Homo Sapiens; identical to SEQ ID NO: 361743

SEQ ID NO: 387752 - DNA, 1126 bp, Homo Sapiens; identical to SEQ ID NO: 361744
  misc_feature (45)..(81): n is a, c, g, or t

SEQ ID NO: 387753 - DNA, 567 bp, Homo Sapiens; identical to SEQ ID NO: 361755

SEQ ID NO: 387754 - DNA, 1662 bp, Homo Sapiens; identical to SEQ ID NO: 361756
  misc_feature (40)..(40): n is a, c, g, or t
  misc_feature (67)..(67): n is a, c, g, or t
  misc_feature (85)..(85): n is a, c, g, or t
  misc_feature (91)..(91): n is a, c, g, or t

SEQ ID NO: 387755 - DNA, 433 bp, Homo Sapiens; identical to SEQ ID NO: 361757
  misc_feature (17)..(17): n is a, c, g, or t

SEQ ID NO: 387756 - DNA, 1169 bp, Homo Sapiens; identical to SEQ ID NO: 361764
  misc_feature (995)..(1012): n is a, c, g, or t
  misc_feature (1014)..(1014): n is a, c, g, or t
  misc_feature (1017)..(1017): n is a, c, g, or t
  misc_feature (1019)..(1019): n is a, c, g, or t

SEQ ID NO: 387757 - DNA, 869 bp, Homo Sapiens; identical to SEQ ID NO: 178069

SEQ ID NO: 387758 - DNA, 1043 bp, Homo Sapiens; identical to SEQ ID NO: 361766

SEQ ID NO: 387759 - DNA, 2294 bp, Homo Sapiens; identical to SEQ ID NO: 361770
  misc_feature (1099)..(1120): n is a, c, g, or t
  misc_feature (1369)..(1388): n is a, c, g, or t
  misc_feature (2143)..(2153): n is a, c, g, or t

SEQ ID NO: 387760 - DNA, 914 bp, Homo Sapiens; identical to SEQ ID NO: 361771
  misc_feature (30)..(30): n is a, c, g, or t
  misc_feature (52)..(52): n is a, c, g, or t
  misc_feature (76)..(76): n is a, c, g, or t
  misc_feature (103)..(103): n is a, c, g, or t
  misc_feature (117)..(117): n is a, c, g, or t
  misc_feature (130)..(130): n is a, c, g, or t
  misc_feature (140)..(140): n is a, c, g, or t

SEQ ID NO: 387761 - DNA, 312 bp, Homo Sapiens; identical to SEQ ID NO: 361772
  misc_feature (248)..(268): n is a, c, g, or t

SEQ ID NO: 387762 - DNA, 836 bp, Homo Sapiens; identical to SEQ ID NO: 361782

SEQ ID NO: 387763 - DNA, 808 bp, Homo Sapiens; identical to SEQ ID NO: 361783

SEQ ID NO: 387764 - DNA, 933 bp, Homo Sapiens; identical to SEQ ID NO: 361784

SEQ ID NO: 387765 - DNA, 694 bp, Homo Sapiens; identical to SEQ ID NO: 361790

SEQ ID NO: 387766 - DNA, 886 bp, Homo Sapiens; identical to SEQ ID NO: 361791
  misc_feature (430)..(430): n is a, c, g, or t

SEQ ID NO: 387767 - DNA, 911 bp, Homo Sapiens; identical to SEQ ID NO: 361792
  misc_feature (45)..(45): n is a, c, g, or t
  misc_feature (137)..(137): n is a, c, g, or t
  misc_feature (278)..(308): n is a, c, g, or t

SEQ ID NO: 387768 - DNA, 1681 bp, Homo Sapiens; identical to SEQ ID NO: 361793
  misc_feature (1619)..(1627): n is a, c, g, or t

SEQ ID NO: 387769 - DNA, 999 bp, Homo Sapiens; identical to SEQ ID NO: 361829

SEQ ID NO: 387770 - DNA, 1294 bp, Homo Sapiens; identical to SEQ ID NO: 361830
  misc_feature (43)..(79): n is a, c, g, or t
  misc_feature (1061)..(1091): n is a, c, g, or t
  misc_feature (1188)..(1188): n is a, c, g, or t

SEQ ID NO: 387771 - DNA, 337 bp, Homo Sapiens; identical to SEQ ID NO: 361849

SEQ ID NO: 387772 - DNA, 302 bp, Homo Sapiens; identical to SEQ ID NO: 361850

SEQ ID NO: 387773 - DNA, 509 bp, Homo Sapiens; identical to SEQ ID NO: 361851

SEQ ID NO: 387774 - DNA, 681 bp, Homo Sapiens; identical to SEQ ID NO: 361854

SEQ ID NO: 387775 - DNA, 1273 bp, Homo Sapiens; identical to SEQ ID NO: 361855
  misc_feature (21)..(21): n is a, c, g, or t
  misc_feature (98)..(219): n is a, c, g, or t

SEQ ID NO: 387776 - DNA, 838 bp, Homo Sapiens; identical to SEQ ID NO: 361856

SEQ ID NO: 387777 - DNA, 440 bp, Homo Sapiens; identical to SEQ ID NO: 361859

SEQ ID NO: 387778 - DNA, 497 bp, Homo Sapiens; identical to SEQ ID NO: 361860

SEQ ID NO: 387779 - DNA, 557 bp, Homo Sapiens; identical to SEQ ID NO: 361861

SEQ ID NO: 387780 - DNA, 456 bp, Homo Sapiens; identical to SEQ ID NO: 361867

SEQ ID NO: 387781 - DNA, 489 bp, Homo Sapiens; identical to SEQ ID NO: 361868
  misc_feature (32)..(32): n is a, c, g, or t
  misc_feature (59)..(59): n is a, c, g, or t
  misc_feature (67)..(67): n is a, c, g, or t
  misc_feature (348)..(348): n is a, c, g, or t

SEQ ID NO: 387782 - DNA, 1219 bp, Homo Sapiens; identical to SEQ ID NO: 361870
  misc_feature (937)..(952): n is a, c, g, or t

SEQ ID NO: 387783 - DNA, 813 bp, Homo Sapiens; identical to SEQ ID NO: 361871
  misc_feature (699)..(707): n is a, c, g, or t
  misc_feature (752)..(753): n is a, c, g, or t
  misc_feature (760)..(760): n is a, c, g, or t

SEQ ID NO: 387784 - DNA, 831 bp, Homo Sapiens; identical to SEQ ID NO: 361872

SEQ ID NO: 387785 - DNA, 1084 bp, Homo Sapiens; identical to SEQ ID NO: 361875

SEQ ID NO: 387786 - DNA, 2031 bp, Homo Sapiens; identical to SEQ ID NO: 361876
  misc_feature (1566)..(1574): n is a, c, g, or t

SEQ ID NO: 387787 - DNA, 1648 bp, Homo Sapiens; identical to SEQ ID NO: 361886

SEQ ID NO: 387788 - DNA, 553 bp, Homo Sapiens; identical to SEQ ID NO: 361887

SEQ ID NO: 387789 - DNA, 805 bp, Homo Sapiens; identical to SEQ ID NO: 361890
  misc_feature (609)..(609): n is a, c, g, or t

SEQ ID NO: 387790 - DNA, 1241 bp, Homo Sapiens; identical to SEQ ID NO: 361891

SEQ ID NO: 387791 - DNA, 511 bp, Homo Sapiens; identical to SEQ ID NO: 361897

SEQ ID NO: 387792 - DNA, 616 bp, Homo Sapiens; identical to SEQ ID NO: 361898

SEQ ID NO: 387793 - DNA, 748 bp, Homo Sapiens; identical to SEQ ID NO: 361905

SEQ ID NO: 387794 - DNA, 969 bp, Homo Sapiens; identical to SEQ ID NO: 361906

SEQ ID NO: 387795 - DNA, 1685 bp, Homo Sapiens; identical to SEQ ID NO: 361922
  misc_feature (582)..(602): n is a, c, g, or t

SEQ ID NO: 387796 - DNA, 441 bp, Homo Sapiens; identical to SEQ ID NO: 361923
  misc_feature (30)..(30): n is a, c, g, or t
  misc_feature (42)..(42): n is a, c, g, or t
  misc_feature (51)..(51): n is a, c, g, or t
  misc_feature (77)..(77): n is a, c, g, or t

SEQ ID NO: 387797 - DNA, 445 bp, Homo Sapiens; identical to SEQ ID NO: 361933

SEQ ID NO: 387798 - DNA, 809 bp, Homo Sapiens; identical to SEQ ID NO: 361934
  misc_feature (410)..(410): n is a, c, g, or t

SEQ ID NO: 387799 - DNA, 1106 bp, Homo Sapiens; identical to SEQ ID NO: 361940

SEQ ID NO: 387800 - DNA, 801 bp, Homo Sapiens; identical to SEQ ID NO: 361941
  misc_feature (664)..(664): n is a, c, g, or t
  misc_feature (760)..(760): n is a, c, g, or t

SEQ ID NO: 387801 - DNA, 1118 bp, Homo Sapiens; identical to SEQ ID NO: 361959

SEQ ID NO: 387802 - DNA, 706 bp, Homo Sapiens; identical to SEQ ID NO: 264492
  misc_feature (196)..(239): n is a, c, g, or t

SEQ ID NO: 387803 - DNA, 535 bp, Homo Sapiens; identical to SEQ ID NO: 361989

SEQ ID NO: 387804 - DNA, 689 bp, Homo Sapiens; identical to SEQ ID NO: 361990

SEQ ID NO: 387805 - DNA, 543 bp, Homo Sapiens; identical to SEQ ID NO: 362000

SEQ ID NO: 387806 - DNA, 943 bp, Homo Sapiens; identical to SEQ ID NO: 362001
  misc_feature (867)..(899): n is a, c, g, or t

SEQ ID NO: 387807 - DNA, 895 bp, Homo Sapiens; identical to SEQ ID NO: 362016
  misc_feature (808)..(826): n is a, c, g, or t

SEQ ID NO: 387808 - DNA, 857 bp, Homo Sapiens; identical to SEQ ID NO: 362017

SEQ ID NO: 387809 - DNA, 424 bp, Homo Sapiens; identical to SEQ ID NO: 362028

SEQ ID NO: 387810 - DNA, 451 bp, Homo Sapiens; identical to SEQ ID NO: 362029
  misc_feature (14)..(14): n is a, c, g, or t
  misc_feature (21)..(21): n is a, c, g, or t
  misc_feature (60)..(60): n is a, c, g, or t
  misc_feature (69)..(69): n is a, c, g, or t
  misc_feature (135)..(135): n is a, c, g, or t
  misc_feature (402)..(402): n is a, c, g, or t

SEQ ID NO: 387811 - DNA, 752 bp, Homo Sapiens; identical to SEQ ID NO: 362030
  misc_feature (58)..(94): n is a, c, g, or t

SEQ ID NO: 387812 - DNA, 471 bp, Homo Sapiens; identical to SEQ ID NO: 362031
  misc_feature (14)..(14): n is a, c, g, or t

SEQ ID NO: 387813 - DNA, 559 bp, Homo Sapiens; identical to SEQ ID NO: 362042
  misc_feature (34)..(34): n is a, c, g, or t
  misc_feature (40)..(40): n is a, c, g, or t
  misc_feature (520)..(520): n is a, c, g, or t

SEQ ID NO: 387814 - DNA, 866 bp, Homo Sapiens; identical to SEQ ID NO: 362043

SEQ ID NO: 387815 - DNA, 1856 bp, Homo Sapiens; identical to SEQ ID NO: 362044
  misc_feature (225)..(260): n is a, c, g, or t

SEQ ID NO: 387816 - DNA, 504 bp, Homo Sapiens; identical to SEQ ID NO: 362059
  misc_feature (136)..(188): n is a, c, g, or t

SEQ ID NO: 387817 - DNA, 421 bp, Homo Sapiens; identical to SEQ ID NO: 362060

SEQ ID NO: 387818 - DNA, 502 bp, Homo Sapiens; identical to SEQ ID NO: 362091

SEQ ID NO: 387819 - DNA, 444 bp, Homo Sapiens; identical to SEQ ID NO: 362092
  misc_feature (36)..(36): n is a, c, g, or t

SEQ ID NO: 387820 - DNA, 1464 bp, Homo Sapiens; identical to SEQ ID NO: 362095

SEQ ID NO: 387821 - DNA, 543 bp, Homo Sapiens; identical to SEQ ID NO: 362096
  misc_feature (395)..(395): n is a, c, g, or t
  misc_feature (421)..(421): n is a, c, g, or t
  misc_feature (438)..(438): n is a, c, g, or t
  misc_feature (449)..(449): n is a, c, g, or t
  misc_feature (462)..(462): n is a, c, g, or t
  misc_feature (467)..(467): n is a, c, g, or t
  misc_feature (500)..(500): n is a, c, g, or t
  misc_feature (512)..(512): n is a, c, g, or t
  misc_feature (533)..(533): n is a, c, g, or t

SEQ ID NO: 387822 - DNA, 1924 bp, Homo Sapiens; identical to SEQ ID NO: 362113
  misc_feature (324)..(364): n is a, c, g, or t

SEQ ID NO: 387823 - DNA, 1309 bp, Homo Sapiens; identical to SEQ ID NO: 362114
  misc_feature (942)..(982): n is a, c, g, or t

SEQ ID NO: 387824 - DNA, 875 bp, Homo Sapiens; identical to SEQ ID NO: 362119

SEQ ID NO: 387825 - DNA, 937 bp, Homo Sapiens; identical to SEQ ID NO: 362120

SEQ ID NO: 387826 - DNA, 777 bp, Homo Sapiens; identical to SEQ ID NO: 362129

SEQ ID NO: 387827 - DNA, 693 bp, Homo Sapiens; identical to SEQ ID NO: 362130

SEQ ID NO: 387828 - DNA, 691 bp, Homo Sapiens; identical to SEQ ID NO: 362132

SEQ ID NO: 387829 - DNA, 476 bp, Homo Sapiens; identical to SEQ ID NO: 362133
  misc_feature (35)..(35): n is a, c, g, or t
  misc_feature (48)..(48): n is a, c, g, or t
  misc_feature (178)..(178): n is a, c, g, or t

SEQ ID NO: 387830 - DNA, 1460 bp, Homo Sapiens; identical to SEQ ID NO: 362135
  misc_feature (712)..(712): n is a, c, g, or t

SEQ ID NO: 387831 - DNA, 993 bp, Homo Sapiens; identical to SEQ ID NO: 362136

SEQ ID NO: 387832 - DNA, 1046 bp, Homo Sapiens; identical to SEQ ID NO: 362137
  misc_feature (807)..(807): n is a, c, g, or t
  misc_feature (1014)..(1014): n is a, c, g, or t

SEQ ID NO: 387833 - DNA, 888 bp, Homo Sapiens; identical to SEQ ID NO: 362146

SEQ ID NO: 387834 - DNA, 487 bp, Homo Sapiens; identical to SEQ ID NO: 362147

SEQ ID NO: 387835 - DNA, 624 bp, Homo Sapiens; identical to SEQ ID NO: 362148
  misc_feature (100)..(100): n is a, c, g, or t

SEQ ID NO: 387836 - DNA, 859 bp, Homo Sapiens; identical to SEQ ID NO: 362149

SEQ ID NO: 387837 - DNA, 583 bp, Homo Sapiens; identical to SEQ ID NO: 362154

SEQ ID NO: 387838 - DNA, 1340 bp, Homo Sapiens; identical to SEQ ID NO: 362155

SEQ ID NO: 387839 - DNA, 685 bp, Homo Sapiens; identical to SEQ ID NO: 362163

SEQ ID NO: 387840 - DNA, 872 bp, Homo Sapiens; identical to SEQ ID NO: 362164
  misc_feature (51)..(131): n is a, c, g, or t
  misc_feature (685)..(685): n is a, c, g, or t

SEQ ID NO: 387841 - DNA, 1364 bp, Homo Sapiens; identical to SEQ ID NO: 362169
  misc_feature (52)..(238): n is a, c, g, or t

SEQ ID NO: 387842 - DNA, 1057 bp, Homo Sapiens; identical to SEQ ID NO: 362170
  misc_feature (53)..(68): n is a, c, g, or t
  misc_feature (681)..(867): n is a, c, g, or t

SEQ ID NO: 387843 - DNA, 551 bp, Homo Sapiens; identical to SEQ ID NO: 362171
  misc_feature (74)..(260): n is a, c, g, or t

SEQ ID NO: 387844 - DNA, 493 bp, Homo Sapiens; identical to SEQ ID NO: 362195
  misc_feature (107)..(107): n is a, c, g, or t
  misc_feature (339)..(376): n is a, c, g, or t

SEQ ID NO: 387845 - DNA, 1763 bp, Homo Sapiens; identical to SEQ ID NO: 362196
  misc_feature (1617)..(1654): n is a, c, g, or t

SEQ ID NO: 387846 - DNA, 405 bp, Homo Sapiens; identical to SEQ ID NO: 362206
  misc_feature (221)..(270): n is a, c, g, or t

SEQ ID NO: 387847 - DNA, 630 bp, Homo Sapiens; identical to SEQ ID NO: 362207
  misc_feature (32)..(32): n is a, c, g, or t
  misc_feature (47)..(47): n is a, c, g, or t
  misc_feature (54)..(54): n is a, c, g, or t
  misc_feature (82)..(82): n is a, c, g, or t
  misc_feature (401)..(443): n is a, c, g, or t

SEQ ID NO: 387848 - DNA, 404 bp, Homo Sapiens; identical to SEQ ID NO: 362208
  misc_feature (180)..(222): n is a, c, g, or t
  misc_feature (368)..(368): n is a, c, g, or t
  misc_feature (379)..(379): n is a, c, g, or t
  misc_feature (392)..(392): n is a, c, g, or t

SEQ ID NO: 387849 - DNA, 696 bp, Homo Sapiens; identical to SEQ ID NO: 362221
  misc_feature (47)..(47): n is a, c, g, or t
  misc_feature (52)..(52): n is a, c, g, or t

SEQ ID NO: 387850 - DNA, 488 bp, Homo Sapiens; identical to SEQ ID NO: 362222
  misc_feature (11)..(11): n is a, c, g, or t
  misc_feature (29)..(29): n is a, c, g, or t
  misc_feature (43)..(43): n is a, c, g, or t
  misc_feature (86)..(86): n is a, c, g, or t
  misc_feature (93)..(93): n is a, c, g, or t
  misc_feature (99)..(99): n is a, c, g, or t

SEQ ID NO: 387851 - DNA, 491 bp, Homo Sapiens; identical to SEQ ID NO: 362240
  misc_feature (167)..(188): n is a, c, g, or t

SEQ ID NO: 387852 - DNA, 413 bp, Homo Sapiens; identical to SEQ ID NO: 362241
  misc_feature (33)..(33): n is a, c, g, or t
  misc_feature (65)..(65): n is a, c, g, or t

SEQ ID NO: 387853 - DNA, 911 bp, Homo Sapiens; identical to SEQ ID NO: 362246

SEQ ID NO: 387854 - DNA, 898 bp, Homo Sapiens; identical to SEQ ID NO: 362247

SEQ ID NO: 387855 - DNA, 1941 bp, Homo Sapiens; identical to SEQ ID NO: 362248

SEQ ID NO: 387856 - DNA, 1839 bp, Homo Sapiens; identical to SEQ ID NO: 362249
  misc_feature (1105)..(1129): n is a, c, g, or t
  misc_feature (1373)..(1381): n is a, c, g, or t

SEQ ID NO: 387857 - DNA, 405 bp, Homo Sapiens; identical to SEQ ID NO: 362261

SEQ ID NO: 387858 - DNA, 485 bp, Homo Sapiens; identical to SEQ ID NO: 362262

SEQ ID NO: 387859 - DNA, 786 bp, Homo Sapiens; identical to SEQ ID NO: 362279

SEQ ID NO: 387860 - DNA, 572 bp, Homo Sapiens; identical to SEQ ID NO: 362280
  misc_feature (16)..(16): n is a, c, g, or t
  misc_feature (33)..(33): n is a, c, g, or t
  misc_feature (43)..(43): n is a, c, g, or t
  misc_feature (49)..(49): n is a, c, g, or t
  misc_feature (54)..(54): n is a, c, g, or t
  misc_feature (76)..(76): n is a, c, g, or t
  misc_feature (81)..(81): n is a, c, g, or t
  misc_feature (89)..(89): n is a, c, g, or t
  misc_feature (122)..(122): n is a, c, g, or t
  misc_feature (534)..(534): n is a, c, g, or t
  misc_feature (561)..(561): n is a, c, g, or t

SEQ ID NO: 387861 - DNA, 470 bp, Homo Sapiens; identical to SEQ ID NO: 362284

SEQ ID NO: 387862 - DNA, 759 bp, Homo Sapiens; identical to SEQ ID NO: 362285
  misc_feature (323)..(334): n is a, c, g, or t

SEQ ID NO: 387863 - DNA, 1961 bp, Homo Sapiens; identical to SEQ ID NO: 362289

SEQ ID NO: 387864 - DNA, 1168 bp, Homo Sapiens; identical to SEQ ID NO: 362290
  misc_feature (995)..(995): n is a, c, g, or t
  misc_feature (1015)..(1015): n is a, c, g, or t
  misc_feature (1019)..(1019): n is a, c, g, or t

SEQ ID NO: 387865 - DNA, 558 bp, Homo Sapiens; identical to SEQ ID NO: 362292

SEQ ID NO: 387866 - DNA, 414 bp, Homo Sapiens; identical to SEQ ID NO: 362293

SEQ ID NO: 387867 - DNA, 384 bp, Homo Sapiens; identical to SEQ ID NO: 362302

SEQ ID NO: 387868 - DNA, 1207 bp, Homo Sapiens; identical to SEQ ID NO: 362303

SEQ ID NO: 387869 - DNA, 2082 bp, Homo Sapiens; identical to SEQ ID NO: 362321

SEQ ID NO: 387870 - DNA, 482 bp, Homo Sapiens; identical to SEQ ID NO: 362322
  misc_feature (448)..(448): n is a, c, g, or t

SEQ ID NO: 387871 - DNA, 596 bp, Homo Sapiens; identical to SEQ ID NO: 362324

SEQ ID NO: 387872 - DNA, 1857 bp, Homo Sapiens; identical to SEQ ID NO: 362325
  misc_feature (873)..(883): n is a, c, g, or t
  misc_feature (1299)..(1314): n is a, c, g, or t
  misc_feature (1327)..(1383): n is a, c, g, or t
  misc_feature (1391)..(1472): n is a, c, g, or t

SEQ ID NO: 387873 - DNA, 1847 bp, Homo Sapiens; identical to SEQ ID NO: 362326

SEQ ID NO: 387874 - DNA, 377 bp, Homo Sapiens; identical to SEQ ID NO: 362327

SEQ ID NO: 387875 - DNA, 1700 bp, Homo Sapiens; identical to SEQ ID NO: 362329
  misc_feature (1046)..(1046): n is a, c, g, or t

SEQ ID NO: 387876 - DNA, 432 bp, Homo Sapiens; identical to SEQ ID NO: 362330
  misc_feature (322)..(322): n is a, c, g, or t
  misc_feature (363)..(363): n is a, c, g, or t

SEQ ID NO: 387877 - DNA, 436 bp, Homo Sapiens; identical to SEQ ID NO: 362331
  misc_feature (23)..(23): n is a, c, g, or t
  misc_feature (43)..(43): n is a, c, g, or t

SEQ ID NO: 387878 - DNA, 588 bp, Homo Sapiens; identical to SEQ ID NO: 362336

SEQ ID NO: 387879 - DNA, 589 bp, Homo Sapiens; identical to SEQ ID NO: 362337

SEQ ID NO: 387880 - DNA, 744 bp, Homo Sapiens; identical to SEQ ID NO: 362341

SEQ ID NO: 387881 - DNA, 789 bp, Homo Sapiens; identical to SEQ ID NO: 362342

SEQ ID NO: 387882 - DNA, 1547 bp, Homo Sapiens; identical to SEQ ID NO: 362343

SEQ ID NO: 387883 - DNA, 687 bp, Homo Sapiens; identical to SEQ ID NO: 362345

SEQ ID NO: 387884 - DNA, 573 bp, Homo Sapiens; identical to SEQ ID NO: 362346
  misc_feature (56)..(56): n is a, c, g, or t
  misc_feature (493)..(493): n is a, c, g, or t
  misc_feature (495)..(495): n is a, c, g, or t
  misc_feature (501)..(501): n is a, c, g, or t

SEQ ID NO: 387885 - DNA, 531 bp, Homo Sapiens; identical to SEQ ID NO: 362347

SEQ ID NO: 387886 - DNA, 474 bp, Homo Sapiens; identical to SEQ ID NO: 362348

SEQ ID NO: 387887 - DNA, 612 bp, Homo Sapiens; identical to SEQ ID NO: 362349
  misc_feature (119)..(119): n is a, c, g, or t

SEQ ID NO: 387888 - DNA, 1124 bp, Homo Sapiens; identical to SEQ ID NO: 362351

SEQ ID NO: 387889 - DNA, 1189 bp, Homo Sapiens; identical to SEQ ID NO: 362352
  misc_feature (908)..(1003): n is a, c, g, or t

SEQ ID NO: 387890 - DNA, 487 bp, Homo Sapiens; identical to SEQ ID NO: 362353
  misc_feature (193)..(256): n is a, c, g, or t

SEQ ID NO: 387891 - DNA, 341 bp, Homo Sapiens; identical to SEQ ID NO: 362354

SEQ ID NO: 387892 - DNA, 1341 bp, Homo Sapiens; identical to SEQ ID NO: 362377

SEQ ID NO: 387893 - DNA, 1296 bp, Homo Sapiens; identical to SEQ ID NO: 362378
  misc_feature (1110)..(1110): n is a, c, g, or t

SEQ ID NO: 387894 - DNA, 889 bp, Homo Sapiens; identical to SEQ ID NO: 362379

SEQ ID NO: 387895 - DNA, 1615 bp, Homo Sapiens; identical to SEQ ID NO: 362382

SEQ ID NO: 387896 - DNA, 784 bp, Homo Sapiens; identical to SEQ ID NO: 362383

SEQ ID NO: 387897 - DNA, 807 bp, Homo Sapiens; identical to SEQ ID NO: 362384

SEQ ID NO: 387898 - DNA, 647 bp, Homo Sapiens; identical to SEQ ID NO: 362386

SEQ ID NO: 387899 - DNA, 1025 bp, Homo Sapiens; identical to SEQ ID NO: 362387

SEQ ID NO: 387900 - DNA, 489 bp, Homo Sapiens; identical to SEQ ID NO: 362389
  misc_feature (49)..(122): n is a, c, g, or t

SEQ ID NO: 387901 - DNA, 935 bp, Homo Sapiens; identical to SEQ ID NO: 362390

SEQ ID NO: 387902 - DNA, 1014 bp, Homo Sapiens; identical to SEQ ID NO: 362410
  misc_feature (47)..(83): n is a, c, g, or t

SEQ ID NO: 387903 - DNA, 733 bp, Homo Sapiens; identical to SEQ ID NO: 176200

SEQ ID NO: 387904 - DNA, 776 bp, Homo Sapiens; identical to SEQ ID NO: 362416

SEQ ID NO: 387905 - DNA, 1414 bp, Homo Sapiens; identical to SEQ ID NO: 362417
  misc_feature (253)..(253): n is a, c, g, or t
  misc_feature (304)..(305): n is a, c, g, or t
  misc_feature (389)..(389): n is a, c, g, or t
  misc_feature (400)..(400): n is a, c, g, or t
  misc_feature (403)..(403): n is a, c, g, or t
  misc_feature (434)..(434): n is a, c, g, or t

SEQ ID NO: 387906 - DNA, 1152 bp, Homo Sapiens; identical to SEQ ID NO: 362435

SEQ ID NO: 387907 - DNA, 786 bp, Homo Sapiens; identical to SEQ ID NO: 362436
  misc_feature (725)..(725): n is a, c, g, or t

SEQ ID NO: 387908 - DNA, 288 bp, Homo Sapiens; identical to SEQ ID NO: 362454

SEQ ID NO: 387909 - DNA, 704 bp, Homo Sapiens; identical to SEQ ID NO: 362455

SEQ ID NO: 387910 - DNA, 758 bp, Homo Sapiens; identical to SEQ ID NO: 362456

SEQ ID NO: 387911 - DNA, 541 bp, Homo Sapiens; identical to SEQ ID NO: 362466

SEQ ID NO: 387912 - DNA, 625 bp, Homo Sapiens; identical to SEQ ID NO: 362467
  misc_feature (41)..(73): n is a, c, g, or t
  misc_feature (531)..(531): n is a, c, g, or t

SEQ ID NO: 387913 - DNA, 1799 bp, Homo Sapiens; identical to SEQ ID NO: 362471
  misc_feature (1616)..(1694): n is a, c, g, or t
  misc_feature (1720)..(1747): n is a, c, g, or t

SEQ ID NO: 387914 - DNA, 515 bp, Homo Sapiens; identical to SEQ ID NO: 362472
  misc_feature (32)..(32): n is a, c, g, or t
  misc_feature (34)..(34): n is a, c, g, or t
  misc_feature (37)..(37): n is a, c, g, or t
  misc_feature (162)..(162): n is a, c, g, or t

SEQ ID NO: 387915 - DNA, 490 bp, Homo Sapiens; identical to SEQ ID NO: 362490

SEQ ID NO: 387916 - DNA, 498 bp, Homo Sapiens; identical to SEQ ID NO: 362491
  misc_feature (14)..(14): n is a, c, g, or t

SEQ ID NO: 387917 - DNA, 780 bp, Homo Sapiens; identical to SEQ ID NO: 362495

SEQ ID NO: 387918 - DNA, 887 bp, Homo Sapiens; identical to SEQ ID NO: 362496
  misc_feature (764)..(764): n is a, c, g, or t
  misc_feature (854)..(854): n is a, c, g, or t
  misc_feature (877)..(877): n is a, c, g, or t

SEQ ID NO: 387919 - DNA, 1783 bp, Homo Sapiens; identical to SEQ ID NO: 362510
  misc_feature (698)..(715): n is a, c, g, or t

SEQ ID NO: 387920 - DNA, 488 bp, Homo Sapiens; identical to SEQ ID NO: 362511

SEQ ID NO: 387921 - DNA, 705 bp, Homo Sapiens; identical to SEQ ID NO: 362513

SEQ ID NO: 387922 - DNA, 819 bp, Homo Sapiens; identical to SEQ ID NO: 362514

SEQ ID NO: 387923 - DNA, 1140 bp, Homo Sapiens; identical to SEQ ID NO: 362515
  misc_feature (686)..(686): n is a, c, g, or t
  misc_feature (688)..(710): n is a, c, g, or t
  misc_feature (719)..(757): n is a, c, g, or t
  misc_feature (806)..(881): n is a, c, g, or t
  misc_feature (924)..(933): n is a, c, g, or t
  misc_feature (968)..(968): n is a, c, g, or t
  misc_feature (1028)..(1045): n is a, c, g, or t

SEQ ID NO: 387924 - DNA, 463 bp, Homo Sapiens; identical to SEQ ID NO: 362516

SEQ ID NO: 387925 - DNA, 647 bp, Homo Sapiens; identical to SEQ ID NO: 362517
  misc_feature (127)..(135): n is a, c, g, or t

SEQ ID NO: 387926 - DNA, 920 bp, Homo Sapiens; identical to SEQ ID NO: 362518
  misc_feature (70)..(119): n is a, c, g, or t

SEQ ID NO: 387927 - DNA, 555 bp, Homo Sapiens; identical to SEQ ID NO: 362519

SEQ ID NO: 387928 - DNA, 469 bp, Homo Sapiens; identical to SEQ ID NO: 362523

SEQ ID NO: 387929 - DNA, 629 bp, Homo Sapiens; identical to SEQ ID NO: 362524
  misc_feature (446)..(575): n is a, c, g, or t

SEQ ID NO: 387930 - DNA, 698 bp, Homo Sapiens; identical to SEQ ID NO: 362526

SEQ ID NO: 387931 - DNA, 412 bp, Homo Sapiens; identical to SEQ ID NO: 362527
  misc_feature (121)..(121): n is a, c, g, or t

SEQ ID NO: 387932 - DNA, 562 bp, Homo Sapiens; identical to SEQ ID NO: 362534

SEQ ID NO: 387933 - DNA, 752 bp, Homo Sapiens; identical to SEQ ID NO: 362535
  misc_feature (622)..(624): n is a, c, g, or t
  misc_feature (629)..(629): n is a, c, g, or t
  misc_feature (634)..(634): n is a, c, g, or t
  misc_feature (646)..(646): n is a, c, g, or t
  misc_feature (648)..(648): n is a, c, g, or t
  misc_feature (657)..(657): n is a, c, g, or t
  misc_feature (666)..(666): n is a, c, g, or t
  misc_feature (689)..(689): n is a, c, g, or t
  misc_feature (693)..(694): n is a, c, g, or t
  misc_feature (700)..(701): n is a, c, g, or t
  misc_feature (707)..(707): n is a, c, g, or t
  misc_feature (720)..(720): n is a, c, g, or t

SEQ ID NO: 387934 - DNA, 508 bp, Homo Sapiens; identical to SEQ ID NO: 362537

SEQ ID NO: 387935 - DNA, 536 bp, Homo Sapiens; identical to SEQ ID NO: 362538
  misc_feature (17)..(17): n is a, c, g, or t
  misc_feature (27)..(27): n is a, c, g, or t

SEQ ID NO: 387936 - DNA, 852 bp, Homo Sapiens; identical to SEQ ID NO: 362542
  misc_feature (80)..(150): n is a, c, g, or t
  misc_feature (180)..(180): n is a, c, g, or t

SEQ ID NO: 387937 - DNA, 1646 bp, Homo Sapiens; identical to SEQ ID NO: 362543
  misc_feature (50)..(50): n is a, c, g, or t
  misc_feature (95)..(95): n is a, c, g, or t
  misc_feature (100)..(154): n is a, c, g, or t
  misc_feature (1437)..(1507): n is a, c, g, or t

SEQ ID NO: 387938 - DNA, 431 bp, Homo Sapiens; identical to SEQ ID NO: 362544

SEQ ID NO: 387939 - DNA, 1297 bp, Homo Sapiens; identical to SEQ ID NO: 362548
  misc_feature (514)..(539): n is a, c, g, or t
  misc_feature (548)..(586): n is a, c, g, or t
  misc_feature (633)..(705): n is a, c, g, or t
  misc_feature (747)..(755): n is a, c, g, or t
  misc_feature (964)..(973): n is a, c, g, or t
  misc_feature (1226)..(1226): n is a, c, g, or t

SEQ ID NO: 387940 - DNA, 416 bp, Homo Sapiens; identical to SEQ ID NO: 362549
  misc_feature (33)..(33): n is a, c, g, or t
  misc_feature (102)..(102): n is a, c, g, or t
  misc_feature (141)..(141): n is a, c, g, or t

SEQ ID NO: 387941 - DNA, 1251 bp, Homo Sapiens; identical to SEQ ID NO: 362558

SEQ ID NO: 387942 - DNA, 935 bp, Homo Sapiens; identical to SEQ ID NO: 362559

SEQ ID NO: 387943 - DNA, 450 bp, Homo Sapiens; identical to SEQ ID NO: 362560
  misc_feature (233)..(233): n is a, c, g, or t
  misc_feature (259)..(259): n is a, c, g, or t

SEQ ID NO: 387944 - DNA, 567 bp, Homo Sapiens; identical to SEQ ID NO: 362564
  misc_feature (24)..(24): n is a, c, g, or t
  misc_feature (32)..(32): n is a, c, g, or t
  misc_feature (39)..(39): n is a, c, g, or t
  misc_feature (56)..(56): n is a, c, g, or t

SEQ ID NO: 387945 - DNA, 1382 bp, Homo Sapiens; identical to SEQ ID NO: 362565

SEQ ID NO: 387946 - DNA, 564 bp, Homo Sapiens; identical to SEQ ID NO: 362584

SEQ ID NO: 387947 - DNA, 571 bp, Homo Sapiens; identical to SEQ ID NO: 362585

SEQ ID NO: 387948 - DNA, 845 bp, Homo Sapiens; identical to SEQ ID NO: 362586

SEQ ID NO: 387949 - DNA, 702 bp, Homo Sapiens; identical to SEQ ID NO: 362607
  misc_feature (316)..(328): n is a, c, g, or t

SEQ ID NO: 387950 - DNA, 178 bp, Homo Sapiens; identical to SEQ ID NO: 362608

SEQ ID NO: 387951 - DNA, 466 bp, Homo Sapiens; identical to SEQ ID NO: 362609

SEQ ID NO: 387952 - DNA, 1219 bp, Homo Sapiens; identical to SEQ ID NO: 362610
  misc_feature (104)..(160): n is a, c, g, or t
  misc_feature (1057)..(1057): n is a, c, g, or t
  misc_feature (1108)..(1108): n is a, c, g, or t
  misc_feature (1192)..(1192): n is a, c, g, or t

SEQ ID NO: 387953 - DNA, 1527 bp, Homo Sapiens; identical to SEQ ID NO: 362627
  misc_feature (710)..(901): n is a, c, g, or t
  misc_feature (913)..(924): n is a, c, g, or t
  misc_feature (1229)..(1229): n is a, c, g, or t

SEQ ID NO: 387954 - DNA, 401 bp, Homo Sapiens; identical to SEQ ID NO: 362628
  misc_feature (36)..(36): n is a, c, g, or t
  misc_feature (67)..(67): n is a, c, g, or t
  misc_feature (72)..(72): n is a, c, g, or t
  misc_feature (132)..(132): n is a, c, g, or t

SEQ ID NO: 387955 - DNA, 624 bp, Homo Sapiens; identical to SEQ ID NO: 362629
  misc_feature (279)..(294): n is a, c, g, or t
  misc_feature (568)..(576): n is a, c, g, or t

SEQ ID NO: 387956 - DNA, 719 bp, Homo Sapiens; identical to SEQ ID NO: 362630
  misc_feature (497)..(554): n is a, c, g, or t

SEQ ID NO: 387957 - DNA, 540 bp, Homo Sapiens; identical to SEQ ID NO: 362646
  misc_feature (293)..(338): n is a, c, g, or t

SEQ ID NO: 387958 - DNA, 836 bp, Homo Sapiens; identical to SEQ ID NO: 362647

SEQ ID NO: 387959 - DNA, 559 bp, Homo Sapiens; identical to SEQ ID NO: 362656
  misc_feature (37)..(37): n is a, c, g, or t
  misc_feature (81)..(81): n is a, c, g, or t

SEQ ID NO: 387960 - DNA, 440 bp, Homo Sapiens; identical to SEQ ID NO: 362657
  misc_feature (385)..(385): n is a, c, g, or t
  misc_feature (416)..(416): n is a, c, g, or t

SEQ ID NO: 387961 - DNA, 629 bp, Homo Sapiens; identical to SEQ ID NO: 362658

SEQ ID NO: 387962 - DNA, 1095 bp, Homo Sapiens; identical to SEQ ID NO: 362659

SEQ ID NO: 387963 - DNA, 1172 bp, Homo Sapiens; identical to SEQ ID NO: 362660
  misc_feature (742)..(750): n is a, c, g, or t
  misc_feature (893)..(1051): n is a, c, g, or t

SEQ ID NO: 387964 - DNA, 774 bp, Homo Sapiens; identical to SEQ ID NO: 362661
  misc_feature (666)..(666): n is a, c, g, or t

SEQ ID NO: 387965 - DNA, 468 bp, Homo Sapiens; identical to SEQ ID NO: 362662

SEQ ID NO: 387966 - DNA, 453 bp, Homo Sapiens; identical to SEQ ID NO: 362663
  misc_feature (264)..(264): n is a, c, g, or t
  misc_feature (392)..(392): n is a, c, g, or t

SEQ ID NO: 387967 - DNA, 1054 bp, Homo Sapiens; identical to SEQ ID NO: 362668

SEQ ID NO: 387968 - DNA, 1029 bp, Homo Sapiens; identical to SEQ ID NO: 362669

SEQ ID NO: 387969 - DNA, 1630 bp, Homo Sapiens; identical to SEQ ID NO: 362685
  misc_feature (319)..(319): n is a, c, g, or t
  misc_feature (1385)..(1443): n is a, c, g, or t
  misc_feature (1475)..(1475): n is a, c, g, or t

SEQ ID NO: 387970 - DNA, 1100 bp, Homo Sapiens; identical to SEQ ID NO: 362686

SEQ ID NO: 387971 - DNA, 468 bp, Homo Sapiens; identical to SEQ ID NO: 362688
  misc_feature (110)..(141): n is a, c, g, or t

SEQ ID NO: 387972 - DNA, 1092 bp, Homo Sapiens; identical to SEQ ID NO: 362689
  misc_feature (903)..(934): n is a, c, g, or t

SEQ ID NO: 387973 - DNA, 1037 bp, Homo Sapiens; identical to SEQ ID NO: 362691
  misc_feature (47)..(47): n is a, c, g, or t
  misc_feature (691)..(856): n is a, c, g, or t
  misc_feature (859)..(957): n is a, c, g, or t

SEQ ID NO: 387974 - DNA, 465 bp, Homo Sapiens; identical to SEQ ID NO: 362692
  misc_feature (394)..(394): n is a, c, g, or t
  misc_feature (434)..(434): n is a, c, g, or t

SEQ ID NO: 387975 - DNA, 975 bp, Homo Sapiens; identical to SEQ ID NO: 362722

SEQ ID NO: 387976 - DNA, 1183 bp, Homo Sapiens; identical to SEQ ID NO: 362723
  misc_feature (950)..(950): n is a, c, g, or t
  misc_feature (1098)..(1098): n is a, c, g, or t

SEQ ID NO: 387977 - DNA, 850 bp, Homo Sapiens; identical to SEQ ID NO: 362726

SEQ ID NO: 387978 - DNA, 571 bp, Homo Sapiens; identical to SEQ ID NO: 362727
  misc_feature (233)..(287): n is a, c, g, or t

SEQ ID NO: 387979 - DNA, 818 bp, Homo Sapiens; identical to SEQ ID NO: 362740

SEQ ID NO: 387980 - DNA, 442 bp, Homo Sapiens; identical to SEQ ID NO: 362741
  misc_feature (19)..(19): n is a, c, g, or t

SEQ ID NO: 387981 - DNA, 562 bp, Homo Sapiens; identical to SEQ ID NO: 362742

SEQ ID NO: 387982 - DNA, 978 bp, Homo Sapiens; identical to SEQ ID NO: 362743
  misc_feature (887)..(923): n is a, c, g, or t

SEQ ID NO: 387983 - DNA, 916 bp, Homo Sapiens; identical to SEQ ID NO: 362744

SEQ ID NO: 387984 - DNA, 494 bp, Homo Sapiens; identical to SEQ ID NO: 362756
  misc_feature (185)..(235): n is a, c, g, or t

SEQ ID NO: 387985 - DNA, 562 bp, Homo Sapiens; identical to SEQ ID NO: 362757

SEQ ID NO: 387986 - DNA, 881 bp, Homo Sapiens; identical to SEQ ID NO: 362763

SEQ ID NO: 387987 - DNA, 405 bp, Homo Sapiens; identical to SEQ ID NO: 362764

SEQ ID NO: 387988 - DNA, 515 bp, Homo Sapiens; identical to SEQ ID NO: 362784

SEQ ID NO: 387989 - DNA, 750 bp, Homo Sapiens; identical to SEQ ID NO: 362785

SEQ ID NO: 387990 - DNA, 816 bp, Homo Sapiens; identical to SEQ ID NO: 362791

SEQ ID NO: 387991 - DNA, 880 bp, Homo Sapiens; identical to SEQ ID NO: 362792

SEQ ID NO: 387992 - DNA, 952 bp, Homo Sapiens; identical to SEQ ID NO: 15293
  misc_feature (545)..(560): n is a, c, g, or t

SEQ ID NO: 387993 - DNA, 546 bp, Homo Sapiens; identical to SEQ ID NO: 85157

SEQ ID NO: 387994 - DNA, 1229 bp, Homo Sapiens; identical to SEQ ID NO: 362816

SEQ ID NO: 387995 - DNA, 925 bp, Homo Sapiens; identical to SEQ ID NO: 362817

SEQ ID NO: 387996 - DNA, 479 bp, Homo Sapiens; identical to SEQ ID NO: 362818

SEQ ID NO: 387997 - DNA, 2515 bp, Homo Sapiens; identical to SEQ ID NO: 362820
  misc_feature (50)..(87): n is a, c, g, or t
  misc_feature (1933)..(2069): n is a, c, g, or t
  misc_feature (2077)..(2090): n is a, c, g, or t
  misc_feature (2108)..(2184): n is a, c, g, or t
  misc_feature (2195)..(2293): n is a, c, g, or t
  misc_feature (2310)..(2319): n is a, c, g, or t

SEQ ID NO: 387998 - DNA, 303 bp, Homo Sapiens; identical to SEQ ID NO: 362821

SEQ ID NO: 387999 - DNA, 485 bp, Homo Sapiens; identical to SEQ ID NO: 362845
  misc_feature (56)..(227): n is a, c, g, or t

SEQ ID NO: 388000 - DNA, 711 bp, Homo Sapiens; identical to SEQ ID NO: 362846
  misc_feature (290)..(392): n is a, c, g, or t

SEQ ID NO: 388001 - DNA, 847 bp, Homo Sapiens; identical to SEQ ID NO: 15048
  misc_feature (731)..(735): n is a, c, g, or t
  misc_feature (737)..(745): n is a, c, g, or t
  misc_feature (748)..(751): n is a, c, g, or t

SEQ ID NO: 388002 - DNA, 801 bp, Homo Sapiens; identical to SEQ ID NO: 74066

SEQ ID NO: 388003 - DNA, 1215 bp, Homo Sapiens; identical to SEQ ID NO: 362869
  misc_feature (41)..(41): n is a, c, g, or t

SEQ ID NO: 388004 - DNA, 909 bp, Homo Sapiens; identical to SEQ ID NO: 362870

SEQ ID NO: 388005 - DNA, 436 bp, Homo Sapiens; identical to SEQ ID NO: 362881

SEQ ID NO: 388006 - DNA, 462 bp, Homo Sapiens; identical to SEQ ID NO: 362882

SEQ ID NO: 388007 - DNA, 1670 bp, Homo Sapiens; identical to SEQ ID NO: 362891
  misc_feature (117)..(128): n is a, c, g, or t
  misc_feature (974)..(974): n is a, c, g, or t
  misc_feature (979)..(979): n is a, c, g, or t
  misc_feature (983)..(983): n is a, c, g, or t
  misc_feature (1086)..(1086): n is a, c, g, or t
  misc_feature (1093)..(1094): n is a, c, g, or t
  misc_feature (1111)..(1111): n is a, c, g, or t
  misc_feature (1120)..(1120): n is a, c, g, or t
  misc_feature (1146)..(1146): n is a, c, g, or t
  misc_feature (1225)..(1227): n is a, c, g, or t
  misc_feature (1318)..(1318): n is a, c, g, or t
  misc_feature (1427)..(1427): n is a, c, g, or t
  misc_feature (1458)..(1458): n is a, c, g, or t
  misc_feature (1474)..(1488): n is a, c, g, or t
  misc_feature (1569)..(1569): n is a, c, g, or t
  misc_feature (1597)..(1597): n is a, c, g, or t
  misc_feature (1610)..(1610): n is a, c, g, or t

SEQ ID NO: 388008 - DNA, 1120 bp, Homo Sapiens; identical to SEQ ID NO: 362892
  misc_feature (179)..(191): n is a, c, g, or t
  misc_feature (210)..(210): n is a, c, g, or t
  misc_feature (242)..(242): n is a, c, g, or t
  misc_feature (898)..(926): n is a, c, g, or t

SEQ ID NO: 388009 - DNA, 499 bp, Homo Sapiens; identical to SEQ ID NO: 362940
  misc_feature (100)..(148): n is a, c, g, or t
  misc_feature (410)..(410): n is a, c, g, or t
  misc_feature (447)..(447): n is a, c, g, or t
  misc_feature (482)..(482): n is a, c, g, or t

SEQ ID NO: 388010 - DNA, 865 bp, Homo Sapiens; identical to SEQ ID NO: 362941

SEQ ID NO: 388011 - DNA, 1401 bp, Homo Sapiens; identical to SEQ ID NO: 362947

SEQ ID NO: 388012 - DNA, 540 bp, Homo Sapiens; identical to SEQ ID NO: 362948
  misc_feature (25)..(25): n is a, c, g, or t
  misc_feature (36)..(36): n is a, c, g, or t
  misc_feature (44)..(44): n is a, c, g, or t
  misc_feature (54)..(54): n is a, c, g, or t
  misc_feature (60)..(60): n is a, c, g, or t
  misc_feature (118)..(118): n is a, c, g, or t

SEQ ID NO: 388013 - DNA, 525 bp, Homo Sapiens; identical to SEQ ID NO: 362949
  misc_feature (468)..(468): n is a, c, g, or t
  misc_feature (484)..(484): n is a, c, g, or t

SEQ ID NO: 388014 - DNA, 579 bp, Homo Sapiens; identical to SEQ ID NO: 362961

SEQ ID NO: 388015 - DNA, 403 bp, Homo Sapiens; identical to SEQ ID NO: 362962

SEQ ID NO: 388016 - DNA, 492 bp, Homo Sapiens; identical to SEQ ID NO: 362963
  misc_feature (23)..(23): n is a, c, g, or t
  misc_feature (29)..(29): n is a, c, g, or t
  misc_feature (39)..(39): n is a, c, g, or t
  misc_feature (83)..(83): n is a, c, g, or t
  misc_feature (189)..(189): n is a, c, g, or t
  misc_feature (329)..(329): n is a, c, g, or t

SEQ ID NO: 388017 - DNA, 358 bp, Homo Sapiens; identical to SEQ ID NO: 362969

SEQ ID NO: 388018 - DNA, 885 bp, Homo Sapiens; identical to SEQ ID NO: 84552
  misc_feature (479)..(482): n is a, c, g, or t
  misc_feature (484)..(485): n is a, c, g, or t
  misc_feature (488)..(491): n is a, c, g, or t
  misc_feature (545)..(605): n is a, c, g, or t
  misc_feature (637)..(655): n is a, c, g, or t

SEQ ID NO: 388019 - DNA, 631 bp, Homo Sapiens; identical to SEQ ID NO: 362971

SEQ ID NO: 388020 - DNA, 1558 bp, Homo Sapiens; identical to SEQ ID NO: 362972
  misc_feature (1320)..(1323): n is a, c, g, or t
  misc_feature (1325)..(1326): n is a, c, g, or t
  misc_feature (1328)..(1368): n is a, c, g, or t

SEQ ID NO: 388021 - DNA, 879 bp, Homo Sapiens; identical to SEQ ID NO: 362973
  misc_feature (46)..(78): n is a, c, g, or t

SEQ ID NO: 388022 - DNA, 540 bp, Homo Sapiens; identical to SEQ ID NO: 362974

SEQ ID NO: 388023 - DNA, 612 bp, Homo Sapiens; identical to SEQ ID NO: 362975
  misc_feature (549)..(549): n is a, c, g, or t
  misc_feature (552)..(553): n is a, c, g, or t
  misc_feature (558)..(558): n is a, c, g, or t
  misc_feature (560)..(561): n is a, c, g, or t
  misc_feature (565)..(565): n is a, c, g, or t
  misc_feature (567)..(567): n is a, c, g, or t
  misc_feature (598)..(598): n is a, c, g, or t

SEQ ID NO: 388024 - DNA, 791 bp, Homo Sapiens; identical to SEQ ID NO: 362976
  misc_feature (286)..(335): n is a, c, g, or t
  misc_feature (342)..(352): n is a, c, g, or t
  misc_feature (643)..(643): n is a, c, g, or t

SEQ ID NO: 388025 - DNA, 1063 bp, Homo Sapiens; identical to SEQ ID NO: 362980
  misc_feature (1005)..(1005): n is a, c, g, or t

SEQ ID NO: 388026 - DNA, 1514 bp, Homo Sapiens; identical to SEQ ID NO: 362981

SEQ ID NO: 388027 - DNA, 507 bp, Homo Sapiens; identical to SEQ ID NO: 362982
  misc_feature (16)..(16): n is a, c, g, or t
  misc_feature (25)..(25): n is a, c, g, or t
  misc_feature (76)..(84): n is a, c, g, or t

SEQ ID NO: 388028 - DNA, 667 bp, Homo Sapiens; identical to SEQ ID NO: 362986

SEQ ID NO: 388029 - DNA, 464 bp, Homo Sapiens; identical to SEQ ID NO: 362987

SEQ ID NO: 388030 - DNA, 539 bp, Homo Sapiens; identical to SEQ ID NO: 363019

SEQ ID NO: 388031 - DNA, 1006 bp, Homo Sapiens; identical to SEQ ID NO: 363020

SEQ ID NO: 388032 - DNA, 928 bp, Homo Sapiens; identical to SEQ ID NO: 363026

SEQ ID NO: 388033 - DNA, 1063 bp, Homo Sapiens; identical to SEQ ID NO: 363027

SEQ ID NO: 388034 - DNA, 1064 bp, Homo Sapiens; identical to SEQ ID NO: 363028
  misc_feature (793)..(793): n is a, c, g, or t
  misc_feature (887)..(887): n is a, c, g, or t

SEQ ID NO: 388035 - DNA, 920 bp, Homo Sapiens; identical to SEQ ID NO: 363030

SEQ ID NO: 388036 - DNA, 1716 bp, Homo Sapiens; identical to SEQ ID NO: 363031
  misc_feature (1457)..(1466): n is a, c, g, or t
  misc_feature (1592)..(1592): n is a, c, g, or t
  misc_feature (1615)..(1615): n is a, c, g, or t

SEQ ID NO: 388037 - DNA, 738 bp, Homo Sapiens; identical to SEQ ID NO: 363042

SEQ ID NO: 388038 - DNA, 579 bp, Homo Sapiens; identical to SEQ ID NO: 363043

SEQ ID NO: 388039 - DNA, 1393 bp, Homo Sapiens; identical to SEQ ID NO: 363064

SEQ ID NO: 388040 - DNA, 842 bp, Homo Sapiens; identical to SEQ ID NO: 363065
  misc_feature (343)..(378): n is a, c, g, or t

SEQ ID NO: 388041 - DNA, 1068 bp, Homo Sapiens; identical to SEQ ID NO: 363066

SEQ ID NO: 388042 - DNA, 1255 bp, Homo Sapiens; identical to SEQ ID NO: 363068
  misc_feature (139)..(168): n is a, c, g, or t

SEQ ID NO: 388043 - DNA, 457 bp, Homo Sapiens; identical to SEQ ID NO: 363069
  misc_feature (14)..(14): n is a, c, g, or t
  misc_feature (82)..(82): n is a, c, g, or t

SEQ ID NO: 388044 - DNA, 1381 bp, Homo Sapiens; identical to SEQ ID NO: 363075

SEQ ID NO: 388045 - DNA, 1250 bp, Homo Sapiens; identical to SEQ ID NO: 363076
  misc_feature (178)..(178): n is a, c, g, or t
  misc_feature (186)..(195): n is a, c, g, or t
  misc_feature (688)..(727): n is a, c, g, or t
  misc_feature (762)..(771): n is a, c, g, or t

SEQ ID NO: 388046 - DNA, 295 bp, Homo Sapiens; identical to SEQ ID NO: 363077

SEQ ID NO: 388047 - DNA, 514 bp, Homo Sapiens; identical to SEQ ID NO: 363091

SEQ ID NO: 388048 - DNA, 687 bp, Homo Sapiens; identical to SEQ ID NO: 363092

SEQ ID NO: 388049 - DNA, 342 bp, Homo Sapiens; identical to SEQ ID NO: 363093

SEQ ID NO: 388050 - DNA, 769 bp, Homo Sapiens; identical to SEQ ID NO: 363094
  misc_feature (97)..(117): n is a, c, g, or t
  misc_feature (494)..(494): n is a, c, g, or t

SEQ ID NO: 388051 - DNA, 534 bp, Homo Sapiens; identical to SEQ ID NO: 363098

SEQ ID NO: 388052 - DNA, 908 bp, Homo Sapiens; identical to SEQ ID NO: 363099
  misc_feature (629)..(696): n is a, c, g, or t
  misc_feature (807)..(807): n is a, c, g, or t

SEQ ID NO: 388053 - DNA, 571 bp, Homo Sapiens; identical to SEQ ID NO: 363100
  misc_feature (44)..(80): n is a, c, g, or t

SEQ ID NO: 388054 - DNA, 377 bp, Homo Sapiens; identical to SEQ ID NO: 363101

SEQ ID NO: 388055 - DNA, 750 bp, Homo Sapiens; identical to SEQ ID NO: 363102
  misc_feature (593)..(593): n is a, c, g, or t

SEQ ID NO: 388056 - DNA, 692 bp, Homo Sapiens; identical to SEQ ID NO: 363103
  misc_feature (112)..(125): n is a, c, g, or t

SEQ ID NO: 388057 - DNA, 559 bp, Homo Sapiens; identical to SEQ ID NO: 363104
  misc_feature (112)..(125): n is a, c, g, or t
  misc_feature (191)..(191): n is a, c, g, or t
  misc_feature (222)..(222): n is a, c, g, or t
  misc_feature (225)..(225): n is a, c, g, or t
  misc_feature (470)..(470): n is a, c, g, or t
  misc_feature (506)..(506): n is a, c, g, or t
  misc_feature (514)..(514): n is a, c, g, or t
  misc_feature (538)..(538): n is a, c, g, or t

SEQ ID NO: 388058 - DNA, 471 bp, Homo Sapiens; identical to SEQ ID NO: 363113

SEQ ID NO: 388059 - DNA, 2176 bp, Homo Sapiens; identical to SEQ ID NO: 363114

SEQ ID NO: 388060 - DNA, 529 bp, Homo Sapiens; identical to SEQ ID NO: 363118

SEQ ID NO: 388061 - DNA, 801 bp, Homo Sapiens; identical to SEQ ID NO: 363119

SEQ ID NO: 388062 - DNA, 800 bp, Homo Sapiens; identical to SEQ ID NO: 15479
  misc_feature (330)..(357): n is a, c, g, or t

SEQ ID NO: 388063 - DNA, 632 bp, Homo Sapiens; identical to SEQ ID NO: 363131

SEQ ID NO: 388064 - DNA, 557 bp, Homo Sapiens; identical to SEQ ID NO: 363135

SEQ ID NO: 388065 - DNA, 2105 bp, Homo Sapiens; identical to SEQ ID NO: 363136
  misc_feature (690)..(744): n is a, c, g, or t

SEQ ID NO: 388066 - DNA, 1199 bp, Homo Sapiens; identical to SEQ ID NO: 363168

SEQ ID NO: 388067 - DNA, 1190 bp, Homo Sapiens; identical to SEQ ID NO: 363169
  misc_feature (809)..(867): n is a, c, g, or t
  misc_feature (1000)..(1058): n is a, c, g, or t

SEQ ID NO: 388068 - DNA, 851 bp, Homo Sapiens; identical to SEQ ID NO: 363172

SEQ ID NO: 388069 - DNA, 560 bp, Homo Sapiens; identical to SEQ ID NO: 363173
  misc_feature (459)..(459): n is a, c, g, or t
  misc_feature (473)..(473): n is a, c, g, or t
  misc_feature (479)..(479): n is a, c, g, or t
  misc_feature (523)..(523): n is a, c, g, or t

SEQ ID NO: 388070 - DNA, 417 bp, Homo Sapiens; identical to SEQ ID NO: 363175

SEQ ID NO: 388071 - DNA, 435 bp, Homo Sapiens; identical to SEQ ID NO: 363176

SEQ ID NO: 388072 - DNA, 1004 bp, Homo Sapiens; identical to SEQ ID NO: 363209

SEQ ID NO: 388073 - DNA, 1803 bp, Homo Sapiens; identical to SEQ ID NO: 363210

SEQ ID NO: 388074 - DNA, 523 bp, Homo Sapiens; identical to SEQ ID NO: 363219

SEQ ID NO: 388075 - DNA, 923 bp, Homo Sapiens; identical to SEQ ID NO: 363220
  misc_feature (86)..(104): n is a, c, g, or t
  misc_feature (745)..(745): n is a, c, g, or t
  misc_feature (768)..(768): n is a, c, g, or t
  misc_feature (825)..(825): n is a, c, g, or t
  misc_feature (895)..(895): n is a, c, g, or t

SEQ ID NO: 388076 - DNA, 767 bp, Homo Sapiens; identical to SEQ ID NO: 363223
  misc_feature (156)..(251): n is a, c, g, or t

SEQ ID NO: 388077 - DNA, 915 bp, Homo Sapiens; identical to SEQ ID NO: 363224

SEQ ID NO: 388078 - DNA, 411 bp, Homo Sapiens; identical to SEQ ID NO: 363227

SEQ ID NO: 388079 - DNA, 478 bp, Homo Sapiens; identical to SEQ ID NO: 363228

SEQ ID NO: 388080 - DNA, 879 bp, Homo Sapiens; identical to SEQ ID NO: 363234

SEQ ID NO: 388081 - DNA, 1678 bp, Homo Sapiens; identical to SEQ ID NO: 363235

SEQ ID NO: 388082 - DNA, 462 bp, Homo Sapiens; identical to SEQ ID NO: 363236

SEQ ID NO: 388083 - DNA, 550 bp, Homo Sapiens; identical to SEQ ID NO: 363246

SEQ ID NO: 388084 - DNA, 496 bp, Homo Sapiens; identical to SEQ ID NO: 363247

SEQ ID NO: 388085 - DNA, 679 bp, Homo Sapiens; identical to SEQ ID NO: 363258

SEQ ID NO: 388086 - DNA, 921 bp, Homo Sapiens; identical to SEQ ID NO: 15841

SEQ ID NO: 388087 - DNA, 929 bp, Homo Sapiens; identical to SEQ ID NO: 363263

SEQ ID NO: 388088 - DNA, 1023 bp, Homo Sapiens; identical to SEQ ID NO: 363264

SEQ ID NO: 388089 - DNA, 726 bp, Homo Sapiens; identical to SEQ ID NO: 363267

SEQ ID NO: 388090 - DNA, 499 bp, Homo Sapiens; identical to SEQ ID NO: 363268
  misc_feature (19)..(19): n is a, c, g, or t

SEQ ID NO: 388091 - DNA, 1066 bp, Homo Sapiens; identical to SEQ ID NO: 363274

SEQ ID NO: 388092 - DNA, 1181 bp, Homo Sapiens; identical to SEQ ID NO: 363275

SEQ ID NO: 388093 - DNA, 562 bp, Homo Sapiens; identical to SEQ ID NO: 363283

SEQ ID NO: 388094 - DNA, 538 bp, Homo Sapiens; identical to SEQ ID NO: 363284
  misc_feature (15)..(15): n is a, c, g, or t
  misc_feature (52)..(52): n is a, c, g, or t

SEQ ID NO: 388095 - DNA, 756 bp, Homo Sapiens; identical to SEQ ID NO: 363286
  misc_feature (58)..(58): n is a, c, g, or t
  misc_feature (72)..(72): n is a, c, g, or t
  misc_feature (122)..(122): n is a, c, g, or t
  misc_feature (134)..(134): n is a, c, g, or t
  misc_feature (147)..(147): n is a, c, g, or t
  misc_feature (214)..(214): n is a, c, g, or t

SEQ ID NO: 388096 - DNA, 403 bp, Homo Sapiens; identical to SEQ ID NO: 363287

SEQ ID NO: 388097 - DNA, 676 bp, Homo Sapiens; identical to SEQ ID NO: 363289
  misc_feature (86)..(86): n is a, c, g, or t
  misc_feature (479)..(493): n is a, c, g, or t

SEQ ID NO: 388098 - DNA, 819 bp, Homo Sapiens; identical to SEQ ID NO: 98881

SEQ ID NO: 388099 - DNA, 715 bp, Homo Sapiens; identical to SEQ ID NO: 363307
  misc_feature (94)..(94): n is a, c, g, or t
  misc_feature (104)..(104): n is a, c, g, or t
  misc_feature (118)..(119): n is a, c, g, or t

SEQ ID NO: 388100 - DNA, 662 bp, Homo Sapiens; identical to SEQ ID NO: 363308

SEQ ID NO: 388101 - DNA, 467 bp, Homo Sapiens; identical to SEQ ID NO: 363309

SEQ ID NO: 388102 - DNA, 2095 bp, Homo Sapiens; identical to SEQ ID NO: 363313
  misc_feature (16)..(16): n is a, c, g, or t
  misc_feature (1617)..(1666): n is a, c, g, or t

SEQ ID NO: 388103 - DNA, 1211 bp, Homo Sapiens; identical to SEQ ID NO: 363314
  misc_feature (1163)..(1163): n is a, c, g, or t

SEQ ID NO: 388104 - DNA, 1179 bp, Homo Sapiens; identical to SEQ ID NO: 363339
  misc_feature (51)..(52): n is a, c, g, or t
  misc_feature (754)..(762): n is a, c, g, or t
  misc_feature (914)..(926): n is a, c, g, or t

SEQ ID NO: 388105 - DNA, 899 bp, Homo Sapiens; identical to SEQ ID NO: 363340
  misc_feature (720)..(720): n is a, c, g, or t

SEQ ID NO: 388106 - DNA, 714 bp, Homo Sapiens; identical to SEQ ID NO: 363352

SEQ ID NO: 388107 - DNA, 865 bp, Homo Sapiens; identical to SEQ ID NO: 363353
  misc_feature (686)..(687): n is a, c, g, or t

SEQ ID NO: 388108 - DNA, 615 bp, Homo Sapiens; identical to SEQ ID NO: 363375
  misc_feature (29)..(29): n is a, c, g, or t

SEQ ID NO: 388109 - DNA, 377 bp, Homo Sapiens; identical to SEQ ID NO: 363376

SEQ ID NO: 388110 - DNA, 632 bp, Homo Sapiens; identical to SEQ ID NO: 363380
  misc_feature (479)..(479): n is a, c, g, or t

SEQ ID NO: 388111 - DNA, 506 bp, Homo Sapiens; identical to SEQ ID NO: 363381

SEQ ID NO: 388112 - DNA, 1115 bp, Homo Sapiens; identical to SEQ ID NO: 363415
  misc_feature (75)..(75): n is a, c, g, or t
  misc_feature (93)..(93): n is a, c, g, or t
  misc_feature (264)..(401): n is a, c, g, or t
  misc_feature (420)..(432): n is a, c, g, or t
  misc_feature (470)..(470): n is a, c, g, or t
  misc_feature (476)..(500): n is a, c, g, or t
  misc_feature (749)..(759): n is a, c, g, or t
  misc_feature (1005)..(1005): n is a, c, g, or t

SEQ ID NO: 388113 - DNA, 576 bp, Homo Sapiens; identical to SEQ ID NO: 363416

SEQ ID NO: 388114 - DNA, 809 bp, Homo Sapiens; identical to SEQ ID NO: 363421

SEQ ID NO: 388115 - DNA, 991 bp, Homo Sapiens; identical to SEQ ID NO: 363422

SEQ ID NO: 388116 - DNA, 839 bp, Homo Sapiens; identical to SEQ ID NO: 363425

SEQ ID NO: 388117 - DNA, 833 bp, Homo Sapiens; identical to SEQ ID NO: 15021

SEQ ID NO: 388118 - DNA, 1115 bp, Homo Sapiens; identical to SEQ ID NO: 363453

SEQ ID NO: 388119 - DNA, 833 bp, Homo Sapiens; identical to SEQ ID NO: 176114

SEQ ID NO: 388120 - DNA, 810 bp, Homo Sapiens; identical to SEQ ID NO: 363457
  misc_feature (332)..(392): n is a, c, g, or t

SEQ ID NO: 388121 - DNA, 2571 bp, Homo Sapiens; identical to SEQ ID NO: 363458
  misc_feature (1364)..(1364): n is a, c, g, or t
  misc_feature (1504)..(1516): n is a, c, g, or t
  misc_feature (2047)..(2107): n is a, c, g, or t

SEQ ID NO: 388122 - DNA, 831 bp, Homo Sapiens; identical to SEQ ID NO: 363459
  misc_feature (87)..(147): n is a, c, g, or t

SEQ ID NO: 388123 - DNA, 307 bp, Homo Sapiens; identical to SEQ ID NO: 363460

SEQ ID NO: 388124 - DNA, 544 bp, Homo Sapiens; identical to SEQ ID NO: 363465

SEQ ID NO: 388125 - DNA, 781 bp, Homo Sapiens; identical to SEQ ID NO: 363466

SEQ ID NO: 388126 - DNA, 901 bp, Homo Sapiens; identical to SEQ ID NO: 363472

SEQ ID NO: 388127 - DNA, 450 bp, Homo Sapiens; identical to SEQ ID NO: 363473

SEQ ID NO: 388128 - DNA, 1586 bp, Homo Sapiens; identical to SEQ ID NO: 363484

SEQ ID NO: 388129 - DNA, 458 bp, Homo Sapiens; identical to SEQ ID NO: 363485
  misc_feature (442)..(442): n is a, c, g, or t

SEQ ID NO: 388130 - DNA, 818 bp, Homo Sapiens; identical to SEQ ID NO: 363519

SEQ ID NO: 388131 - DNA, 911 bp, Homo Sapiens; identical to SEQ ID NO: 363520
  misc_feature (44)..(80): n is a, c, g, or t

SEQ ID NO: 388132 - DNA, 445 bp, Homo Sapiens; identical to SEQ ID NO: 363524

SEQ ID NO: 388133 - DNA, 506 bp, Homo Sapiens; identical to SEQ ID NO: 363525

SEQ ID NO: 388134 - DNA, 457 bp, Homo Sapiens; identical to SEQ ID NO: 363528

SEQ ID NO: 388135 - DNA, 1115 bp, Homo Sapiens; identical to SEQ ID NO: 363529
  misc_feature (175)..(219): n is a, c, g, or t
  misc_feature (235)..(235): n is a, c, g, or t
  misc_feature (253)..(253): n is a, c, g, or t

SEQ ID NO: 388136 - DNA, 556 bp, Homo Sapiens; identical to SEQ ID NO: 363555

SEQ ID NO: 388137 - DNA, 474 bp, Homo Sapiens; identical to SEQ ID NO: 363556

SEQ ID NO: 388138 - DNA, 765 bp, Homo Sapiens; identical to SEQ ID NO: 363559

SEQ ID NO: 388139 - DNA, 398 bp, Homo Sapiens; identical to SEQ ID NO: 363560
  misc_feature (16)..(16): n is a, c, g, or t
  misc_feature (68)..(68): n is a, c, g, or t
  misc_feature (147)..(147): n is a, c, g, or t

SEQ ID NO: 388140 - DNA, 450 bp, Homo Sapiens; identical to SEQ ID NO: 363566

SEQ ID NO: 388141 - DNA, 1630 bp, Homo Sapiens; identical to SEQ ID NO: 363567
  misc_feature (705)..(705): n is a, c, g, or t

SEQ ID NO: 388142 - DNA, 722 bp, Homo Sapiens; identical to SEQ ID NO: 363599

SEQ ID NO: 388143 - DNA, 1194 bp, Homo Sapiens; identical to SEQ ID NO: 363600

SEQ ID NO: 388144 - DNA, 1618 bp, Homo Sapiens; identical to SEQ ID NO: 363601
  misc_feature (1533)..(1542): n is a, c, g, or t

SEQ ID NO: 388145 - DNA, 525 bp, Homo Sapiens; identical to SEQ ID NO: 363602
  misc_feature (28)..(28): n is a, c, g, or t
  misc_feature (383)..(383): n is a, c, g, or t
  misc_feature (405)..(405): n is a, c, g, or t
  misc_feature (410)..(410): n is a, c, g, or t
  misc_feature (455)..(455): n is a, c, g, or t
  misc_feature (492)..(492): n is a, c, g, or t
  misc_feature (504)..(504): n is a, c, g, or t

SEQ ID NO: 388146 - DNA, 926 bp, Homo Sapiens; identical to SEQ ID NO: 363623

SEQ ID NO: 388147 - DNA, 886 bp, Homo Sapiens; identical to SEQ ID NO: 363624

SEQ ID NO: 388148 - DNA, 397 bp, Homo Sapiens; identical to SEQ ID NO: 363649
  misc_feature (227)..(301): n is a, c, g, or t
  misc_feature (353)..(353): n is a, c, g, or t

SEQ ID NO: 388149 - DNA, 421 bp, Homo Sapiens; identical to SEQ ID NO: 363650
  misc_feature (274)..(354): n is a, c, g, or t

SEQ ID NO: 388150 - DNA, 1887 bp, Homo Sapiens; identical to SEQ ID NO: 363652
  misc_feature (867)..(977): n is a, c, g, or t
  misc_feature (982)..(982): n is a, c, g, or t
  misc_feature (1389)..(1397): n is a, c, g, or t
  misc_feature (1488)..(1488): n is a, c, g, or t
  misc_feature (1518)..(1518): n is a, c, g, or t

SEQ ID NO: 388151 - DNA, 415 bp, Homo Sapiens; identical to SEQ ID NO: 363653
  misc_feature (328)..(328): n is a, c, g, or t

SEQ ID NO: 388152 - DNA, 1118 bp, Homo Sapiens; identical to SEQ ID NO: 363664
  misc_feature (295)..(295): n is a, c, g, or t
  misc_feature (298)..(352): n is a, c, g, or t
  misc_feature (549)..(567): n is a, c, g, or t
  misc_feature (744)..(770): n is a, c, g, or t
  misc_feature (838)..(886): n is a, c, g, or t

SEQ ID NO: 388153 - DNA, 487 bp, Homo Sapiens; identical to SEQ ID NO: 363665
  misc_feature (284)..(390): n is a, c, g, or t

SEQ ID NO: 388154 - DNA, 1676 bp, Homo Sapiens; identical to SEQ ID NO: 363677
  misc_feature (549)..(580): n is a, c, g, or t
  misc_feature (1025)..(1041): n is a, c, g, or t
  misc_feature (1307)..(1324): n is a, c, g, or t

SEQ ID NO: 388155 - DNA, 434 bp, Homo Sapiens; identical to SEQ ID NO: 363678

SEQ ID NO: 388156 - DNA, 1459 bp, Homo Sapiens; identical to SEQ ID NO: 363683
  misc_feature (88)..(182): n is a, c, g, or t
  misc_feature (687)..(687): n is a, c, g, or t
  misc_feature (1280)..(1310): n is a, c, g, or t

SEQ ID NO: 388157 - DNA, 1731 bp, Homo Sapiens; identical to SEQ ID NO: 363684

SEQ ID NO: 388158 - DNA, 790 bp, Homo Sapiens; identical to SEQ ID NO: 363685
  misc_feature (88)..(88): n is a, c, g, or t
  misc_feature (603)..(603): n is a, c, g, or t

SEQ ID NO: 388159 - DNA, 1341 bp, Homo Sapiens; identical to SEQ ID NO: 363691
  misc_feature (44)..(52): n is a, c, g, or t

SEQ ID NO: 388160 - DNA, 375 bp, Homo Sapiens; identical to SEQ ID NO: 363692

SEQ ID NO: 388161 - DNA, 542 bp, Homo Sapiens; identical to SEQ ID NO: 363711

SEQ ID NO: 388162 - DNA, 498 bp, Homo Sapiens; identical to SEQ ID NO: 363712
  misc_feature (40)..(40): n is a, c, g, or t
  misc_feature (49)..(49): n is a, c, g, or t
  misc_feature (54)..(54): n is a, c, g, or t
  misc_feature (62)..(62): n is a, c, g, or t
  misc_feature (110)..(110): n is a, c, g, or t
  misc_feature (115)..(115): n is a, c, g, or t
  misc_feature (128)..(128): n is a, c, g, or t
  misc_feature (155)..(155): n is a, c, g, or t

SEQ ID NO: 388163 - DNA, 686 bp, Homo Sapiens; identical to SEQ ID NO: 363724

SEQ ID NO: 388164 - DNA, 412 bp, Homo Sapiens; identical to SEQ ID NO: 363725
  misc_feature (373)..(373): n is a, c, g, or t

SEQ ID NO: 388165 - DNA, 921 bp, Homo Sapiens; identical to SEQ ID NO: 363775

SEQ ID NO: 388166 - DNA, 1211 bp, Homo Sapiens; identical to SEQ ID NO: 363776

SEQ ID NO: 388167 - DNA, 412 bp, Homo Sapiens; identical to SEQ ID NO: 363787
  misc_feature (13)..(13): n is a, c, g, or t
  misc_feature (44)..(44): n is a, c, g, or t
  misc_feature (54)..(54): n is a, c, g, or t

SEQ ID NO: 388168 - DNA, 1653 bp, Homo Sapiens; identical to SEQ ID NO: 363788
  misc_feature (456)..(539): n is a, c, g, or t

SEQ ID NO: 388169 - DNA, 1045 bp, Homo Sapiens; identical to SEQ ID NO: 363793

SEQ ID NO: 388170 - DNA, 786 bp, Homo Sapiens; identical to SEQ ID NO: 363794

SEQ ID NO: 388171 - DNA, 460 bp, Homo Sapiens; identical to SEQ ID NO: 363795
  misc_feature (42)..(42): n is a, c, g, or t
  misc_feature (52)..(52): n is a, c, g, or t
  misc_feature (117)..(117): n is a, c, g, or t
  misc_feature (409)..(409): n is a, c, g, or t

SEQ ID NO: 388172 - DNA, 439 bp, Homo Sapiens; identical to SEQ ID NO: 363810

SEQ ID NO: 388173 - DNA, 428 bp, Homo Sapiens; identical to SEQ ID NO: 363811
  misc_feature (16)..(16): n is a, c, g, or t
  misc_feature (24)..(24): n is a, c, g, or t
  misc_feature (36)..(36): n is a, c, g, or t
  misc_feature (60)..(60): n is a, c, g, or t

SEQ ID NO: 388174 - DNA, 1663 bp, Homo Sapiens; identical to SEQ ID NO: 363815
  misc_feature (692)..(720): n is a, c, g, or t

SEQ ID NO: 388175 - DNA, 960 bp, Homo Sapiens; identical to SEQ ID NO: 363816
  misc_feature (379)..(436): n is a, c, g, or t
  misc_feature (626)..(634): n is a, c, g, or t

SEQ ID NO: 388176 - DNA, 1226 bp, Homo Sapiens; identical to SEQ ID NO: 363834

SEQ ID NO: 388177 - DNA, 1681 bp, Homo Sapiens; identical to SEQ ID NO: 363835
  misc_feature (15)..(15): n is a, c, g, or t
  misc_feature (869)..(877): n is a, c, g, or t

SEQ ID NO: 388178 - DNA, 1201 bp, Homo Sapiens; identical to SEQ ID NO: 363842
  misc_feature (52)..(88): n is a, c, g, or t

SEQ ID NO: 388179 - DNA, 481 bp, Homo Sapiens; identical to SEQ ID NO: 363843
  misc_feature (18)..(18): n is a, c, g, or t
  misc_feature (25)..(25): n is a, c, g, or t
  misc_feature (39)..(39): n is a, c, g, or t
  misc_feature (44)..(44): n is a, c, g, or t
  misc_feature (51)..(51): n is a, c, g, or t
  misc_feature (61)..(61): n is a, c, g, or t
  misc_feature (119)..(119): n is a, c, g, or t

SEQ ID NO: 388180 - DNA, 685 bp, Homo Sapiens; identical to SEQ ID NO: 363852

SEQ ID NO: 388181 - DNA, 446 bp, Homo Sapiens; identical to SEQ ID NO: 363853
  misc_feature (19)..(19): n is a, c, g, or t
  misc_feature (64)..(64): n is a, c, g, or t
  misc_feature (106)..(106): n is a, c, g, or t
  misc_feature (108)..(108): n is a, c, g, or t

SEQ ID NO: 388182 - DNA, 1532 bp, Homo Sapiens; identical to SEQ ID NO: 363863
  misc_feature (14)..(14): n is a, c, g, or t
  misc_feature (903)..(1007): n is a, c, g, or t

SEQ ID NO: 388183 - DNA, 349 bp, Homo Sapiens; identical to SEQ ID NO: 363864

SEQ ID NO: 388184 - DNA, 637 bp, Homo Sapiens; identical to SEQ ID NO: 264756

SEQ ID NO: 388185 - DNA, 965 bp, Homo Sapiens; identical to SEQ ID NO: 363866
  misc_feature (849)..(881): n is a, c, g, or t
  misc_feature (928)..(928): n is a, c, g, or t
  misc_feature (949)..(949): n is a, c, g, or t

SEQ ID NO: 388186 - DNA, 1252 bp, Homo Sapiens; identical to SEQ ID NO: 363867
  misc_feature (258)..(278): n is a, c, g, or t
  misc_feature (416)..(433): n is a, c, g, or t
  misc_feature (523)..(595): n is a, c, g, or t
  misc_feature (1113)..(1113): n is a, c, g, or t

SEQ ID NO: 388187 - DNA, 455 bp, Homo Sapiens; identical to SEQ ID NO: 363868
  misc_feature (85)..(97): n is a, c, g, or t
  misc_feature (284)..(284): n is a, c, g, or t
  misc_feature (380)..(381): n is a, c, g, or t
  misc_feature (383)..(403): n is a, c, g, or t
  misc_feature (426)..(426): n is a, c, g, or t

SEQ ID NO: 388188 - DNA, 518 bp, Homo Sapiens; identical to SEQ ID NO: 363878

SEQ ID NO: 388189 - DNA, 370 bp, Homo Sapiens; identical to SEQ ID NO: 363879

SEQ ID NO: 388190 - DNA, 842 bp, Homo Sapiens; identical to SEQ ID NO: 363880
  misc_feature (103)..(155): n is a, c, g, or t

SEQ ID NO: 388191 - DNA, 779 bp, Homo Sapiens; identical to SEQ ID NO: 363906

SEQ ID NO: 388192 - DNA, 766 bp, Homo Sapiens; identical to SEQ ID NO: 363907

SEQ ID NO: 388193 - DNA, 430 bp, Homo Sapiens; identical to SEQ ID NO: 363930

SEQ ID NO: 388194 - DNA, 498 bp, Homo Sapiens; identical to SEQ ID NO: 363931

SEQ ID NO: 388195 - DNA, 914 bp, Homo Sapiens; identical to SEQ ID NO: 363942
  misc_feature (90)..(187): n is a, c, g, or t

SEQ ID NO: 388196 - DNA, 870 bp, Homo Sapiens; identical to SEQ ID NO: 363943
  misc_feature (315)..(315): n is a, c, g, or t
  misc_feature (317)..(317): n is a, c, g, or t

SEQ ID NO: 388197 - DNA, 675 bp, Homo Sapiens; identical to SEQ ID NO: 363979
  misc_feature (568)..(598): n is a, c, g, or t

SEQ ID NO: 388198 - DNA, 607 bp, Homo Sapiens; identical to SEQ ID NO: 363980

SEQ ID NO: 388199 - DNA, 553 bp, Homo Sapiens; identical to SEQ ID NO: 364009

SEQ ID NO: 388200 - DNA, 523 bp, Homo Sapiens; identical to SEQ ID NO: 364010
  misc_feature (34)..(34): n is a, c, g, or t
  misc_feature (44)..(44): n is a, c, g, or t
  misc_feature (52)..(52): n is a, c, g, or t

SEQ ID NO: 388201 - DNA, 2246 bp, Homo Sapiens; identical to SEQ ID NO: 364019

SEQ ID NO: 388202 - DNA, 1131 bp, Homo Sapiens; identical to SEQ ID NO: 364020
  misc_feature (51)..(51): n is a, c, g, or t
  misc_feature (76)..(76): n is a, c, g, or t

SEQ ID NO: 388203 - DNA, 901 bp, Homo Sapiens; identical to SEQ ID NO: 364048

SEQ ID NO: 388204 - DNA, 1755 bp, Homo Sapiens; identical to SEQ ID NO: 364049

SEQ ID NO: 388205 - DNA, 742 bp, Homo Sapiens; identical to SEQ ID NO: 364055
  misc_feature (665)..(690): n is a, c, g, or t

SEQ ID NO: 388206 - DNA, 1311 bp, Homo Sapiens; identical to SEQ ID NO: 364056
  misc_feature (1241)..(1241): n is a, c, g, or t
  misc_feature (1244)..(1245): n is a, c, g, or t
  misc_feature (1256)..(1256): n is a, c, g, or t

SEQ ID NO: 388207 - DNA, 984 bp, Homo Sapiens; identical to SEQ ID NO: 364058
  misc_feature (43)..(79): n is a, c, g, or t
  misc_feature (731)..(915): n is a, c, g, or t

SEQ ID NO: 388208 - DNA, 458 bp, Homo Sapiens; identical to SEQ ID NO: 364059

SEQ ID NO: 388209 - DNA, 751 bp, Homo Sapiens; identical to SEQ ID NO: 364060
  misc_feature (53)..(89): n is a, c, g, or t

SEQ ID NO: 388210 - DNA, 748 bp, Homo Sapiens; identical to SEQ ID NO: 364063

SEQ ID NO: 388211 - DNA, 1189 bp, Homo Sapiens; identical to SEQ ID NO: 364064

SEQ ID NO: 388212 - DNA, 355 bp, Homo Sapiens; identical to SEQ ID NO: 364067

SEQ ID NO: 388213 - DNA, 448 bp, Homo Sapiens; identical to SEQ ID NO: 364068
  misc_feature (37)..(37): n is a, c, g, or t
  misc_feature (48)..(48): n is a, c, g, or t
  misc_feature (432)..(432): n is a, c, g, or t

SEQ ID NO: 388214 - DNA, 490 bp, Homo Sapiens; identical to SEQ ID NO: 364075

SEQ ID NO: 388215 - DNA, 1134 bp, Homo Sapiens; identical to SEQ ID NO: 364076

SEQ ID NO: 388216 - DNA, 708 bp, Homo Sapiens; identical to SEQ ID NO: 364098

SEQ ID NO: 388217 - DNA, 1001 bp, Homo Sapiens; identical to SEQ ID NO: 364099

SEQ ID NO: 388218 - DNA, 828 bp, Homo Sapiens; identical to SEQ ID NO: 364100

SEQ ID NO: 388219 - DNA, 1133 bp, Homo Sapiens; identical to SEQ ID NO: 364101
  misc_feature (46)..(82): n is a, c, g, or t

SEQ ID NO: 388220 - DNA, 585 bp, Homo Sapiens; identical to SEQ ID NO: 364102

SEQ ID NO: 388221 - DNA, 410 bp, Homo Sapiens; identical to SEQ ID NO: 364103
  misc_feature (301)..(301): n is a, c, g, or t
  misc_feature (304)..(304): n is a, c, g, or t
  misc_feature (355)..(355): n is a, c, g, or t

SEQ ID NO: 388222 - DNA, 1183 bp, Homo Sapiens; identical to SEQ ID NO: 364111
  misc_feature (567)..(569): n is a, c, g, or t
  misc_feature (573)..(576): n is a, c, g, or t
  misc_feature (579)..(633): n is a, c, g, or t
  misc_feature (635)..(640): n is a, c, g, or t
  misc_feature (836)..(845): n is a, c, g, or t
  misc_feature (869)..(953): n is a, c, g, or t
  misc_feature (1001)..(1024): n is a, c, g, or t

SEQ ID NO: 388223 - DNA, 454 bp, Homo Sapiens; identical to SEQ ID NO: 364112
  misc_feature (90)..(90): n is a, c, g, or t
  misc_feature (150)..(150): n is a, c, g, or t

SEQ ID NO: 388224 - DNA, 554 bp, Homo Sapiens; identical to SEQ ID NO: 364124

SEQ ID NO: 388225 - DNA, 2154 bp, Homo Sapiens; identical to SEQ ID NO: 364125
  misc_feature (263)..(263): n is a, c, g, or t
  misc_feature (1989)..(1989): n is a, c, g, or t

SEQ ID NO: 388226 - DNA, 962 bp, Homo Sapiens; identical to SEQ ID NO: 364130
  misc_feature (71)..(117): n is a, c, g, or t

SEQ ID NO: 388227 - DNA, 469 bp, Homo Sapiens; identical to SEQ ID NO: 364131

SEQ ID NO: 388228 - DNA, 548 bp, Homo Sapiens; identical to SEQ ID NO: 364146

SEQ ID NO: 388229 - DNA, 810 bp, Homo Sapiens; identical to SEQ ID NO: 364147

SEQ ID NO: 388230 - DNA, 1338 bp, Homo Sapiens; identical to SEQ ID NO: 364153

SEQ ID NO: 388231 - DNA, 893 bp, Homo Sapiens; identical to SEQ ID NO: 364154
  misc_feature (245)..(245): n is a, c, g, or t
  misc_feature (638)..(638): n is a, c, g, or t

SEQ ID NO: 388232 - DNA, 465 bp, Homo Sapiens; identical to SEQ ID NO: 364155

SEQ ID NO: 388233 - DNA, 1101 bp, Homo Sapiens; identical to SEQ ID NO: 364156
  misc_feature (1077)..(1077): n is a, c, g, or t

SEQ ID NO: 388234 - DNA, 971 bp, Homo Sapiens; identical to SEQ ID NO: 364157

SEQ ID NO: 388235 - DNA, 1044 bp, Homo Sapiens; identical to SEQ ID NO: 364159
  misc_feature (510)..(519): n is a, c, g, or t
  misc_feature (773)..(884): n is a, c, g, or t
  misc_feature (886)..(886): n is a, c, g, or t
  misc_feature (889)..(890): n is a, c, g, or t
  misc_feature (900)..(915): n is a, c, g, or t
  misc_feature (959)..(976): n is a, c, g, or t

SEQ ID NO: 388236 - DNA, 902 bp, Homo Sapiens; identical to SEQ ID NO: 364160
  misc_feature (33)..(33): n is a, c, g, or t
  misc_feature (35)..(35): n is a, c, g, or t
  misc_feature (174)..(184): n is a, c, g, or t

SEQ ID NO: 388237 - DNA, 1030 bp, Homo Sapiens; identical to SEQ ID NO: 364161
  misc_feature (49)..(85): n is a, c, g, or t
  misc_feature (770)..(780): n is a, c, g, or t

SEQ ID NO: 388238 - DNA, 841 bp, Homo Sapiens; identical to SEQ ID NO: 364162
  misc_feature (57)..(93): n is a, c, g, or t
  misc_feature (266)..(338): n is a, c, g, or t
  misc_feature (667)..(702): n is a, c, g, or t

SEQ ID NO: 388239 - DNA, 970 bp, Homo Sapiens; identical to SEQ ID NO: 364163

SEQ ID NO: 388240 - DNA, 508 bp, Homo Sapiens; identical to SEQ ID NO: 364179
  misc_feature (411)..(421): n is a, c, g, or t
  misc_feature (487)..(487): n is a, c, g, or t

SEQ ID NO: 388241 - DNA, 413 bp, Homo Sapiens; identical to SEQ ID NO: 364180
  misc_feature (23)..(23): n is a, c, g, or t
  misc_feature (293)..(303): n is a, c, g, or t

SEQ ID NO: 388242 - DNA, 1173 bp, Homo Sapiens; identical to SEQ ID NO: 364186
  misc_feature (16)..(16): n is a, c, g, or t
  misc_feature (23)..(23): n is a, c, g, or t
  misc_feature (120)..(120): n is a, c, g, or t
  misc_feature (129)..(129): n is a, c, g, or t
  misc_feature (1065)..(1097): n is a, c, g, or t

SEQ ID NO: 388243 - DNA, 633 bp, Homo Sapiens; identical to SEQ ID NO: 364187
  misc_feature (54)..(94): n is a, c, g, or t
  misc_feature (216)..(216): n is a, c, g, or t

SEQ ID NO: 388244 - DNA, 541 bp, Homo Sapiens; identical to SEQ ID NO: 364189

SEQ ID NO: 388245 - DNA, 892 bp, Homo Sapiens; identical to SEQ ID NO: 364190
  misc_feature (171)..(171): n is a, c, g, or t
  misc_feature (715)..(715): n is a, c, g, or t

SEQ ID NO: 388246 - DNA, 507 bp, Homo Sapiens; identical to SEQ ID NO: 364195
  misc_feature (91)..(132): n is a, c, g, or t

SEQ ID NO: 388247 - DNA, 586 bp, Homo Sapiens; identical to SEQ ID NO: 364196
  misc_feature (376)..(417): n is a, c, g, or t

SEQ ID NO: 388248 - DNA, 881 bp, Homo Sapiens; identical to SEQ ID NO: 364197
  misc_feature (270)..(270): n is a, c, g, or t

SEQ ID NO: 388249 - DNA, 2645 bp, Homo Sapiens; identical to SEQ ID NO: 364198
  misc_feature (51)..(87): n is a, c, g, or t
  misc_feature (2414)..(2465): n is a, c, g, or t

SEQ ID NO: 388250 - DNA, 785 bp, Homo Sapiens; identical to SEQ ID NO: 364199

SEQ ID NO: 388251 - DNA, 465 bp, Homo Sapiens; identical to SEQ ID NO: 364204

SEQ ID NO: 388252 - DNA, 1082 bp, Homo Sapiens; identical to SEQ ID NO: 364205

SEQ ID NO: 388253 - DNA, 810 bp, Homo Sapiens; identical to SEQ ID NO: 364220
  misc_feature (569)..(591): n is a, c, g, or t

SEQ ID NO: 388254 - DNA, 567 bp, Homo Sapiens; identical to SEQ ID NO: 364221

SEQ ID NO: 388255 - DNA, 760 bp, Homo Sapiens; identical to SEQ ID NO: 364222
  misc_feature (646)..(688): n is a, c, g, or t

SEQ ID NO: 388256 - DNA, 515 bp, Homo Sapiens; identical to SEQ ID NO: 364223
  misc_feature (20)..(20): n is a, c, g, or t
  misc_feature (28)..(28): n is a, c, g, or t
  misc_feature (85)..(85): n is a, c, g, or t
  misc_feature (106)..(106): n is a, c, g, or t

SEQ ID NO: 388257 - DNA, 982 bp, Homo Sapiens; identical to SEQ ID NO: 364244
  misc_feature (271)..(271): n is a, c, g, or t
  misc_feature (906)..(942): n is a, c, g, or t

SEQ ID NO: 388258 - DNA, 743 bp, Homo Sapiens; identical to SEQ ID NO: 364245
  misc_feature (96)..(96): n is a, c, g, or t

SEQ ID NO: 388259 - DNA, 1035 bp, Homo Sapiens; identical to SEQ ID NO: 364250
  misc_feature (33)..(33): n is a, c, g, or t
  misc_feature (128)..(128): n is a, c, g, or t
  misc_feature (435)..(739): n is a, c, g, or t
  misc_feature (972)..(990): n is a, c, g, or t

SEQ ID NO: 388260 - DNA, 440 bp, Homo Sapiens; identical to SEQ ID NO: 364251
  misc_feature (42)..(42): n is a, c, g, or t
  misc_feature (48)..(48): n is a, c, g, or t
  misc_feature (88)..(88): n is a, c, g, or t
  misc_feature (161)..(161): n is a, c, g, or t
  misc_feature (193)..(193): n is a, c, g, or t
  misc_feature (206)..(206): n is a, c, g, or t

SEQ ID NO: 388261 - DNA, 1905 bp, Homo Sapiens; identical to SEQ ID NO: 364318

SEQ ID NO: 388262 - DNA, 1328 bp, Homo Sapiens; identical to SEQ ID NO: 364319
  misc_feature (109)..(109): n is a, c, g, or t
  misc_feature (144)..(144): n is a, c, g, or t

SEQ ID NO: 388263 - DNA, 1160 bp, Homo Sapiens; identical to SEQ ID NO: 364320
  misc_feature (676)..(694): n is a, c, g, or t
  misc_feature (743)..(757): n is a, c, g, or t
  misc_feature (804)..(950): n is a, c, g, or t
  misc_feature (996)..(1058): n is a, c, g, or t

SEQ ID NO: 388264 - DNA, 918 bp, Homo Sapiens; identical to SEQ ID NO: 364352

SEQ ID NO: 388265 - DNA, 631 bp, Homo Sapiens; identical to SEQ ID NO: 364353

SEQ ID NO: 388266 - DNA, 1660 bp, Homo Sapiens; identical to SEQ ID NO: 364354
  misc_feature (772)..(772): n is a, c, g, or t
  misc_feature (1053)..(1053): n is a, c, g, or t
  misc_feature (1079)..(1079): n is a, c, g, or t
  misc_feature (1096)..(1096): n is a, c, g, or t
  misc_feature (1099)..(1099): n is a, c, g, or t
  misc_feature (1124)..(1124): n is a, c, g, or t
  misc_feature (1297)..(1297): n is a, c, g, or t
  misc_feature (1331)..(1331): n is a, c, g, or t
  misc_feature (1442)..(1442): n is a, c, g, or t
  misc_feature (1467)..(1467): n is a, c, g, or t

SEQ ID NO: 388267 - DNA, 442 bp, Homo Sapiens; identical to SEQ ID NO: 364362

SEQ ID NO: 388268 - DNA, 468 bp, Homo Sapiens; identical to SEQ ID NO: 364363
  misc_feature (17)..(17): n is a, c, g, or t

SEQ ID NO: 388269 - DNA, 1006 bp, Homo Sapiens; identical to SEQ ID NO: 364364

SEQ ID NO: 388270 - DNA, 2366 bp, Homo Sapiens; identical to SEQ ID NO: 364365

SEQ ID NO: 388271 - DNA, 510 bp, Homo Sapiens; identical to SEQ ID NO: 364368

SEQ ID NO: 388272 - DNA, 685 bp, Homo Sapiens; identical to SEQ ID NO: 364369
  misc_feature (593)..(593): n is a, c, g, or t

SEQ ID NO: 388273 - DNA, 439 bp, Homo Sapiens; identical to SEQ ID NO: 364373
  misc_feature (28)..(28): n is a, c, g, or t
  misc_feature (47)..(47): n is a, c, g, or t

SEQ ID NO: 388274 - DNA, 537 bp, Homo Sapiens; identical to SEQ ID NO: 364374
  misc_feature (30)..(30): n is a, c, g, or t
  misc_feature (75)..(75): n is a, c, g, or t

SEQ ID NO: 388275 - DNA, 450 bp, Homo Sapiens; identical to SEQ ID NO: 364387

SEQ ID NO: 388276 - DNA, 546 bp, Homo Sapiens; identical to SEQ ID NO: 364388

SEQ ID NO: 388277 - DNA, 471 bp, Homo Sapiens; identical to SEQ ID NO: 364391

SEQ ID NO: 388278 - DNA, 1119 bp, Homo Sapiens; identical to SEQ ID NO: 364392

SEQ ID NO: 388279 - DNA, 528 bp, Homo Sapiens; identical to SEQ ID NO: 364403

SEQ ID NO: 388280 - DNA, 779 bp, Homo Sapiens; identical to SEQ ID NO: 364404
  misc_feature (20)..(20): n is a, c, g, or t
  misc_feature (41)..(41): n is a, c, g, or t
  misc_feature (759)..(759): n is a, c, g, or t

SEQ ID NO: 388281 - DNA, 462 bp, Homo Sapiens; identical to SEQ ID NO: 364409
  misc_feature (13)..(13): n is a, c, g, or t
  misc_feature (21)..(21): n is a, c, g, or t

SEQ ID NO: 388282 - DNA, 438 bp, Homo Sapiens; identical to SEQ ID NO: 364410
  misc_feature (25)..(25): n is a, c, g, or t

SEQ ID NO: 388283 - DNA, 424 bp, Homo Sapiens; identical to SEQ ID NO: 364434
  misc_feature (32)..(32): n is a, c, g, or t
  misc_feature (78)..(79): n is a, c, g, or t
  misc_feature (93)..(93): n is a, c, g, or t
  misc_feature (138)..(138): n is a, c, g, or t
  misc_feature (149)..(149): n is a, c, g, or t
  misc_feature (239)..(247): n is a, c, g, or t

SEQ ID NO: 388284 - DNA, 1001 bp, Homo Sapiens; identical to SEQ ID NO: 364435
  misc_feature (41)..(77): n is a, c, g, or t
  misc_feature (534)..(542): n is a, c, g, or t

SEQ ID NO: 388285 - DNA, 751 bp, Homo Sapiens; identical to SEQ ID NO: 364437

SEQ ID NO: 388286 - DNA, 701 bp, Homo Sapiens; identical to SEQ ID NO: 364438

SEQ ID NO: 388287 - DNA, 783 bp, Homo Sapiens; identical to SEQ ID NO: 364439
  misc_feature (82)..(82): n is a, c, g, or t

SEQ ID NO: 388288 - DNA, 481 bp, Homo Sapiens; identical to SEQ ID NO: 364459

SEQ ID NO: 388289 - DNA, 1210 bp, Homo Sapiens; identical to SEQ ID NO: 364460

SEQ ID NO: 388290 - DNA, 595 bp, Homo Sapiens; identical to SEQ ID NO: 364472

SEQ ID NO: 388291 - DNA, 523 bp, Homo Sapiens; identical to SEQ ID NO: 364473
  misc_feature (33)..(33): n is a, c, g, or t

SEQ ID NO: 388292 - DNA, 691 bp, Homo Sapiens; identical to SEQ ID NO: 364482

SEQ ID NO: 388293 - DNA, 1272 bp, Homo Sapiens; identical to SEQ ID NO: 364483

SEQ ID NO: 388294 - DNA, 298 bp, Homo Sapiens; identical to SEQ ID NO: 364490

SEQ ID NO: 388295 - DNA, 1053 bp, Homo Sapiens; identical to SEQ ID NO: 364491
  misc_feature (115)..(147): n is a, c, g, or t

SEQ ID NO: 388296 - DNA, 476 bp, Homo Sapiens; identical to SEQ ID NO: 364492
  misc_feature (26)..(26): n is a, c, g, or t

SEQ ID NO: 388297 - DNA, 519 bp, Homo Sapiens; identical to SEQ ID NO: 364493
  misc_feature (29)..(29): n is a, c, g, or t
  misc_feature (50)..(50): n is a, c, g, or t
  misc_feature (58)..(58): n is a, c, g, or t
  misc_feature (73)..(73): n is a, c, g, or t
  misc_feature (79)..(79): n is a, c, g, or t
  misc_feature (120)..(120): n is a, c, g, or t

SEQ ID NO: 388298 - DNA, 835 bp, Homo Sapiens; identical to SEQ ID NO: 364498
  misc_feature (647)..(648): n is a, c, g, or t
  misc_feature (653)..(653): n is a, c, g, or t
  misc_feature (655)..(656): n is a, c, g, or t
  misc_feature (662)..(663): n is a, c, g, or t

SEQ ID NO: 388299 - DNA, 507 bp, Homo Sapiens; identical to SEQ ID NO: 70952
  misc_feature (477)..(477): n is a, c, g, or t

SEQ ID NO: 388300 - DNA, 448 bp, Homo Sapiens; identical to SEQ ID NO: 364503

SEQ ID NO: 388301 - DNA, 890 bp, Homo Sapiens; identical to SEQ ID NO: 364504
  misc_feature (152)..(189): n is a, c, g, or t

SEQ ID NO: 388302 - DNA, 573 bp, Homo Sapiens; identical to SEQ ID NO: 364530

SEQ ID NO: 388303 - DNA, 506 bp, Homo Sapiens; identical to SEQ ID NO: 364531

SEQ ID NO: 388304 - DNA, 475 bp, Homo Sapiens; identical to SEQ ID NO: 364536
  misc_feature (308)..(325): n is a, c, g, or t

SEQ ID NO: 388305 - DNA, 1046 bp, Homo Sapiens; identical to SEQ ID NO: 364537
  misc_feature (97)..(158): n is a, c, g, or t

SEQ ID NO: 388306 - DNA, 471 bp, Homo Sapiens; identical to SEQ ID NO: 364551

SEQ ID NO: 388307 - DNA, 436 bp, Homo Sapiens; identical to SEQ ID NO: 364552
  misc_feature (354)..(394): n is a, c, g, or t

SEQ ID NO: 388308 - DNA, 501 bp, Homo Sapiens; identical to SEQ ID NO: 364553
  misc_feature (25)..(25): n is a, c, g, or t
  misc_feature (469)..(469): n is a, c, g, or t

SEQ ID NO: 388309 - DNA, 469 bp, Homo Sapiens; identical to SEQ ID NO: 364561
  misc_feature (14)..(14): n is a, c, g, or t

SEQ ID NO: 388310 - DNA, 907 bp, Homo Sapiens; identical to SEQ ID NO: 364562

SEQ ID NO: 388311 - DNA, 448 bp, Homo Sapiens; identical to SEQ ID NO: 364568

SEQ ID NO: 388312 - DNA, 938 bp, Homo Sapiens; identical to SEQ ID NO: 364569

SEQ ID NO: 388313 - DNA, 855 bp, Homo Sapiens; identical to SEQ ID NO: 364612
  misc_feature (810)..(810): n is a, c, g, or t

SEQ ID NO: 388314 - DNA, 1074 bp, Homo Sapiens; identical to SEQ ID NO: 364613

SEQ ID NO: 388315 - DNA, 476 bp, Homo Sapiens; identical to SEQ ID NO: 364614
  misc_feature (112)..(112): n is a, c, g, or t
  misc_feature (252)..(252): n is a, c, g, or t

SEQ ID NO: 388316 - DNA, 498 bp, Homo Sapiens; identical to SEQ ID NO: 364619

SEQ ID NO: 388317 - DNA, 425 bp, Homo Sapiens; identical to SEQ ID NO: 364620
  misc_feature (26)..(26): n is a, c, g, or t
  misc_feature (57)..(57): n is a, c, g, or t

SEQ ID NO: 388318 - DNA, 1428 bp, Homo Sapiens; identical to SEQ ID NO: 364648
  misc_feature (279)..(279): n is a, c, g, or t
  misc_feature (1112)..(1120): n is a, c, g, or t
  misc_feature (1330)..(1352): n is a, c, g, or t

SEQ ID NO: 388319 - DNA, 1055 bp, Homo Sapiens; identical to SEQ ID NO: 364649
  misc_feature (597)..(605): n is a, c, g, or t
  misc_feature (815)..(837): n is a, c, g, or t
  misc_feature (955)..(955): n is a, c, g, or t

SEQ ID NO: 388320 - DNA, 862 bp, Homo Sapiens; identical to SEQ ID NO: 364657

SEQ ID NO: 388321 - DNA, 756 bp, Homo Sapiens; identical to SEQ ID NO: 364658

SEQ ID NO: 388322 - DNA, 498 bp, Homo Sapiens; identical to SEQ ID NO: 364666
  misc_feature (391)..(391): n is a, c, g, or t

SEQ ID NO: 388323 - DNA, 474 bp, Homo Sapiens; identical to SEQ ID NO: 364667
  misc_feature (32)..(32): n is a, c, g, or t

SEQ ID NO: 388324 - DNA, 1571 bp, Homo Sapiens; identical to SEQ ID NO: 364671

SEQ ID NO: 388325 - DNA, 981 bp, Homo Sapiens; identical to SEQ ID NO: 364672

SEQ ID NO: 388326 - DNA, 795 bp, Homo Sapiens; identical to SEQ ID NO: 364673

SEQ ID NO: 388327 - DNA, 491 bp, Homo Sapiens; identical to SEQ ID NO: 364687

SEQ ID NO: 388328 - DNA, 317 bp, Homo Sapiens; identical to SEQ ID NO: 364688

SEQ ID NO: 388329 - DNA, 1117 bp, Homo Sapiens; identical to SEQ ID NO: 364699
  misc_feature (996)..(1036): n is a, c, g, or t

SEQ ID NO: 388330 - DNA, 471 bp, Homo Sapiens; identical to SEQ ID NO: 364700

SEQ ID NO: 388331 - DNA, 1288 bp, Homo Sapiens; identical to SEQ ID NO: 364704
  misc_feature (145)..(161): n is a, c, g, or t

SEQ ID NO: 388332 - DNA, 803 bp, Homo Sapiens; identical to SEQ ID NO: 364705
  misc_feature (12)..(12): n is a, c, g, or t
  misc_feature (128)..(144): n is a, c, g, or t

SEQ ID NO: 388333 - DNA, 1250 bp, Homo Sapiens; identical to SEQ ID NO: 364713

SEQ ID NO: 388334 - DNA, 493 bp, Homo Sapiens; identical to SEQ ID NO: 364714

SEQ ID NO: 388335 - DNA, 1206 bp, Homo Sapiens; identical to SEQ ID NO: 364718
  misc_feature (109)..(145): n is a, c, g, or t
  misc_feature (974)..(986): n is a, c, g, or t

SEQ ID NO: 388336 - DNA, 1065 bp, Homo Sapiens; identical to SEQ ID NO: 364719
  misc_feature (48)..(96): n is a, c, g, or t
  misc_feature (1036)..(1036): n is a, c, g, or t
  misc_feature (1050)..(1050): n is a, c, g, or t

SEQ ID NO: 388337 - DNA, 334 bp, Homo Sapiens; identical to SEQ ID NO: 364729

SEQ ID NO: 388338 - DNA, 1042 bp, Homo Sapiens; identical to SEQ ID NO: 364730

SEQ ID NO: 388339 - DNA, 769 bp, Homo Sapiens; identical to SEQ ID NO: 364731

SEQ ID NO: 388340 - DNA, 396 bp, Homo Sapiens; identical to SEQ ID NO: 364732

SEQ ID NO: 388341 - DNA, 542 bp, Homo Sapiens; identical to SEQ ID NO: 364755

SEQ ID NO: 388342 - DNA, 429 bp, Homo Sapiens; identical to SEQ ID NO: 364756
  misc_feature (31)..(31): n is a, c, g, or t
  misc_feature (49)..(49): n is a, c, g, or t

SEQ ID NO: 388343 - DNA, 403 bp, Homo Sapiens; identical to SEQ ID NO: 364760

SEQ ID NO: 388344 - DNA, 569 bp, Homo Sapiens; identical to SEQ ID NO: 364761

SEQ ID NO: 388345 - DNA, 624 bp, Homo Sapiens; identical to SEQ ID NO: 364767

SEQ ID NO: 388346 - DNA, 433 bp, Homo Sapiens; identical to SEQ ID NO: 364768
  misc_feature (32)..(32): n is a, c, g, or t

SEQ ID NO: 388347 - DNA, 1695 bp, Homo Sapiens; identical to SEQ ID NO: 364784
  misc_feature (1397)..(1459): n is a, c, g, or t
  misc_feature (1478)..(1478): n is a, c, g, or t
  misc_feature (1594)..(1594): n is a, c, g, or t

SEQ ID NO: 388348 - DNA, 2114 bp, Homo Sapiens; identical to SEQ ID NO: 364785
  misc_feature (287)..(287): n is a, c, g, or t
  misc_feature (1180)..(1200): n is a, c, g, or t

SEQ ID NO: 388349 - DNA, 506 bp, Homo Sapiens; identical to SEQ ID NO: 364799

SEQ ID NO: 388350 - DNA, 1995 bp, Homo Sapiens; identical to SEQ ID NO: 364800

SEQ ID NO: 388351 - DNA, 1229 bp, Homo Sapiens; identical to SEQ ID NO: 364807
  misc_feature (593)..(593): n is a, c, g, or t
  misc_feature (704)..(704): n is a, c, g, or t
  misc_feature (893)..(920): n is a, c, g, or t
  misc_feature (1153)..(1170): n is a, c, g, or t

SEQ ID NO: 388352 - DNA, 2089 bp, Homo Sapiens; identical to SEQ ID NO: 364808
  misc_feature (187)..(211): n is a, c, g, or t
  misc_feature (920)..(937): n is a, c, g, or t
  misc_feature (1171)..(1197): n is a, c, g, or t
  misc_feature (1850)..(1850): n is a, c, g, or t

SEQ ID NO: 388353 - DNA, 2186 bp, Homo Sapiens; identical to SEQ ID NO: 364827

SEQ ID NO: 388354 - DNA, 1571 bp, Homo Sapiens; identical to SEQ ID NO: 364828
  misc_feature (894)..(894): n is a, c, g, or t
  misc_feature (1431)..(1431): n is a, c, g, or t
  misc_feature (1453)..(1453): n is a, c, g, or t

SEQ ID NO: 388355 - DNA, 400 bp, Homo Sapiens; identical to SEQ ID NO: 364829

SEQ ID NO: 388356 - DNA, 1303 bp, Homo Sapiens; identical to SEQ ID NO: 364835

SEQ ID NO: 388357 - DNA, 1727 bp, Homo Sapiens; identical to SEQ ID NO: 364836
  misc_feature (633)..(686): n is a, c, g, or t
  misc_feature (1156)..(1185): n is a, c, g, or t
  misc_feature (1702)..(1702): n is a, c, g, or t

SEQ ID NO: 388358 - DNA, 915 bp, Homo Sapiens; identical to SEQ ID NO: 364852
  misc_feature (63)..(63): n is a, c, g, or t
  misc_feature (136)..(136): n is a, c, g, or t
  misc_feature (138)..(138): n is a, c, g, or t
  misc_feature (154)..(154): n is a, c, g, or t
  misc_feature (157)..(157): n is a, c, g, or t
  misc_feature (222)..(222): n is a, c, g, or t

SEQ ID NO: 388359 - DNA, 1323 bp, Homo Sapiens; identical to SEQ ID NO: 364853
  misc_feature (949)..(949): n is a, c, g, or t
  misc_feature (1087)..(1087): n is a, c, g, or t
  misc_feature (1113)..(1114): n is a, c, g, or t

SEQ ID NO: 388360 - DNA, 990 bp, Homo Sapiens; identical to SEQ ID NO: 364855

SEQ ID NO: 388361 - DNA, 797 bp, Homo Sapiens; identical to SEQ ID NO: 364856

SEQ ID NO: 388362 - DNA, 1079 bp, Homo Sapiens; identical to SEQ ID NO: 364860

SEQ ID NO: 388363 - DNA, 1049 bp, Homo Sapiens; identical to SEQ ID NO: 364861

SEQ ID NO: 388364 - DNA, 993 bp, Homo Sapiens; identical to SEQ ID NO: 364862

SEQ ID NO: 388365 - DNA, 778 bp, Homo Sapiens; identical to SEQ ID NO: 364872
  misc_feature (15)..(15): n is a, c, g, or t
  misc_feature (27)..(27): n is a, c, g, or t
  misc_feature (38)..(38): n is a, c, g, or t
  misc_feature (54)..(54): n is a, c, g, or t

SEQ ID NO: 388366 - DNA, 2304 bp, Homo Sapiens; identical to SEQ ID NO: 364873
  misc_feature (936)..(954): n is a, c, g, or t
  misc_feature (1913)..(2084): n is a, c, g, or t
  misc_feature (2105)..(2113): n is a, c, g, or t
  misc_feature (2165)..(2175): n is a, c, g, or t
  misc_feature (2232)..(2245): n is a, c, g, or t

SEQ ID NO: 388367 - DNA, 687 bp, Homo Sapiens; identical to SEQ ID NO: 364886

SEQ ID NO: 388368 - DNA, 771 bp, Homo Sapiens; identical to SEQ ID NO: 364887

SEQ ID NO: 388369 - DNA, 697 bp, Homo Sapiens; identical to SEQ ID NO: 364912

SEQ ID NO: 388370 - DNA, 445 bp, Homo Sapiens; identical to SEQ ID NO: 364913
  misc_feature (29)..(29): n is a, c, g, or t
  misc_feature (51)..(51): n is a, c, g, or t
  misc_feature (64)..(64): n is a, c, g, or t

SEQ ID NO: 388371 - DNA, 466 bp, Homo Sapiens; identical to SEQ ID NO: 364914
  misc_feature (391)..(391): n is a, c, g, or t

SEQ ID NO: 388372 - DNA, 595 bp, Homo Sapiens; identical to SEQ ID NO: 364947
  misc_feature (18)..(18): n is a, c, g, or t
  misc_feature (31)..(31): n is a, c, g, or t
  misc_feature (147)..(147): n is a, c, g, or t

SEQ ID NO: 388373 - DNA, 856 bp, Homo Sapiens; identical to SEQ ID NO: 364948

SEQ ID NO: 388374 - DNA, 810 bp, Homo Sapiens; identical to SEQ ID NO: 364959

SEQ ID NO: 388375 - DNA, 1643 bp, Homo Sapiens; identical to SEQ ID NO: 364960
  misc_feature (24)..(24): n is a, c, g, or t

SEQ ID NO: 388376 - DNA, 482 bp, Homo Sapiens; identical to SEQ ID NO: 364961

SEQ ID NO: 388377 - DNA, 400 bp, Homo Sapiens; identical to SEQ ID NO: 364971

SEQ ID NO: 388378 - DNA, 855 bp, Homo Sapiens; identical to SEQ ID NO: 364972

SEQ ID NO: 388379 - DNA, 712 bp, Homo Sapiens; identical to SEQ ID NO: 364973

SEQ ID NO: 388380 - DNA, 1665 bp, Homo Sapiens; identical to SEQ ID NO: 364974

SEQ ID NO: 388381 - DNA, 469 bp, Homo Sapiens; identical to SEQ ID NO: 364981
  misc_feature (60)..(61): n is a, c, g, or t
  misc_feature (94)..(94): n is a, c, g, or t

SEQ ID NO: 388382 - DNA, 546 bp, Homo Sapiens; identical to SEQ ID NO: 364982

SEQ ID NO: 388383 - DNA, 494 bp, Homo Sapiens; identical to SEQ ID NO: 364989

SEQ ID NO: 388384 - DNA, 1119 bp, Homo Sapiens; identical to SEQ ID NO: 364990
  misc_feature (764)..(842): n is a, c, g, or t
  misc_feature (882)..(892): n is a, c, g, or t
  misc_feature (916)..(929): n is a, c, g, or t
  misc_feature (1039)..(1039): n is a, c, g, or t
  misc_feature (1063)..(1063): n is a, c, g, or t
  misc_feature (1087)..(1087): n is a, c, g, or t
  misc_feature (1091)..(1091): n is a, c, g, or t

SEQ ID NO: 388385 - DNA, 453 bp, Homo Sapiens; identical to SEQ ID NO: 364996

SEQ ID NO: 388386 - DNA, 502 bp, Homo Sapiens; identical to SEQ ID NO: 364997
  misc_feature (15)..(15): n is a, c, g, or t
  misc_feature (22)..(22): n is a, c, g, or t
  misc_feature (41)..(41): n is a, c, g, or t
  misc_feature (50)..(50): n is a, c, g, or t
  misc_feature (68)..(68): n is a, c, g, or t
  misc_feature (87)..(87): n is a, c, g, or t
  misc_feature (138)..(138): n is a, c, g, or t

SEQ ID NO: 388387 - DNA, 2003 bp, Homo Sapiens; identical to SEQ ID NO: 365014
  misc_feature (484)..(484): n is a, c, g, or t
  misc_feature (1564)..(1564): n is a, c, g, or t
  misc_feature (1656)..(1697): n is a, c, g, or t
  misc_feature (1796)..(1823): n is a, c, g, or t

SEQ ID NO: 388388 - DNA, 1263 bp, Homo Sapiens; identical to SEQ ID NO: 365015
  misc_feature (97)..(125): n is a, c, g, or t
  misc_feature (223)..(266): n is a, c, g, or t

SEQ ID NO: 388389 - DNA, 752 bp, Homo Sapiens; identical to SEQ ID NO: 365027
  misc_feature (54)..(90): n is a, c, g, or t

SEQ ID NO: 388390 - DNA, 466 bp, Homo Sapiens; identical to SEQ ID NO: 365028

SEQ ID NO: 388391 - DNA, 1124 bp, Homo Sapiens; identical to SEQ ID NO: 365048

SEQ ID NO: 388392 - DNA, 404 bp, Homo Sapiens; identical to SEQ ID NO: 365049

SEQ ID NO: 388393 - DNA, 628 bp, Homo Sapiens; identical to SEQ ID NO: 365088

SEQ ID NO: 388394 - DNA, 1196 bp, Homo Sapiens; identical to SEQ ID NO: 365089

SEQ ID NO: 388395 - DNA, 441 bp, Homo Sapiens; identical to SEQ ID NO: 365100

SEQ ID NO: 388396 - DNA, 450 bp, Homo Sapiens; identical to SEQ ID NO: 365101
  misc_feature (19)..(19): n is a, c, g, or t
  misc_feature (91)..(91): n is a, c, g, or t

SEQ ID NO: 388397 - DNA, 617 bp, Homo Sapiens; identical to SEQ ID NO: 365102
  misc_feature (236)..(276): n is a, c, g, or t

SEQ ID NO: 388398 - DNA, 478 bp, Homo Sapiens; identical to SEQ ID NO: 365103
  misc_feature (99)..(139): n is a, c, g, or t

SEQ ID NO: 388399 - DNA, 394 bp, Homo Sapiens; identical to SEQ ID NO: 365104
  misc_feature (205)..(245): n is a, c, g, or t

SEQ ID NO: 388400 - DNA, 518 bp, Homo Sapiens; identical to SEQ ID NO: 365149
  misc_feature (77)..(174): n is a, c, g, or t
  misc_feature (353)..(418): n is a, c, g, or t

SEQ ID NO: 388401 - DNA, 799 bp, Homo Sapiens; identical to SEQ ID NO: 365150
  misc_feature (143)..(143): n is a, c, g, or t
  misc_feature (180)..(277): n is a, c, g, or t
  misc_feature (438)..(438): n is a, c, g, or t

SEQ ID NO: 388402 - DNA, 1500 bp, Homo Sapiens; identical to SEQ ID NO: 365153
  misc_feature (1054)..(1094): n is a, c, g, or t

SEQ ID NO: 388403 - DNA, 1174 bp, Homo Sapiens; identical to SEQ ID NO: 365154
  misc_feature (44)..(44): n is a, c, g, or t
  misc_feature (564)..(564): n is a, c, g, or t
  misc_feature (1064)..(1110): n is a, c, g, or t

SEQ ID NO: 388404 - DNA, 1027 bp, Homo Sapiens; identical to SEQ ID NO: 365155

SEQ ID NO: 388405 - DNA, 711 bp, Homo Sapiens; identical to SEQ ID NO: 365167
  misc_feature (193)..(250): n is a, c, g, or t

SEQ ID NO: 388406 - DNA, 1351 bp, Homo Sapiens; identical to SEQ ID NO: 365168
  misc_feature (1119)..(1144): n is a, c, g, or t

SEQ ID NO: 388407 - DNA, 1388 bp, Homo Sapiens; identical to SEQ ID NO: 365191
  misc_feature (350)..(383): n is a, c, g, or t
  misc_feature (396)..(441): n is a, c, g, or t

SEQ ID NO: 388408 - DNA, 1093 bp, Homo Sapiens; identical to SEQ ID NO: 365192
  misc_feature (178)..(229): n is a, c, g, or t

SEQ ID NO: 388409 - DNA, 1168 bp, Homo Sapiens; identical to SEQ ID NO: 365193

SEQ ID NO: 388410 - DNA, 530 bp, Homo Sapiens; identical to SEQ ID NO: 365196

SEQ ID NO: 388411 - DNA, 444 bp, Homo Sapiens; identical to SEQ ID NO: 365197
  misc_feature (19)..(19): n is a, c, g, or t
  misc_feature (35)..(35): n is a, c, g, or t
  misc_feature (259)..(259): n is a, c, g, or t

SEQ ID NO: 388412 - DNA, 505 bp, Homo Sapiens; identical to SEQ ID NO: 365229

SEQ ID NO: 388413 - DNA, 484 bp, Homo Sapiens; identical to SEQ ID NO: 365230
  misc_feature (44)..(44): n is a, c, g, or t
  misc_feature (78)..(78): n is a, c, g, or t
  misc_feature (111)..(111): n is a, c, g, or t

SEQ ID NO: 388414 - DNA, 593 bp, Homo Sapiens; identical to SEQ ID NO: 365243

SEQ ID NO: 388415 - DNA, 471 bp, Homo Sapiens; identical to SEQ ID NO: 365244
  misc_feature (16)..(16): n is a, c, g, or t
  misc_feature (419)..(419): n is a, c, g, or t

SEQ ID NO: 388416 - DNA, 717 bp, Homo Sapiens; identical to SEQ ID NO: 365246
  misc_feature (184)..(184): n is a, c, g, or t
  misc_feature (681)..(681): n is a, c, g, or t
  misc_feature (687)..(687): n is a, c, g, or t

SEQ ID NO: 388417 - DNA, 1054 bp, Homo Sapiens; identical to SEQ ID NO: 365247

SEQ ID NO: 388418 - DNA, 740 bp, Homo Sapiens; identical to SEQ ID NO: 365261

SEQ ID NO: 388419 - DNA, 479 bp, Homo Sapiens; identical to SEQ ID NO: 365262
  misc_feature (35)..(35): n is a, c, g, or t

SEQ ID NO: 388420 - DNA, 971 bp, Homo Sapiens; identical to SEQ ID NO: 365269

SEQ ID NO: 388421 - DNA, 1180 bp, Homo Sapiens; identical to SEQ ID NO: 365270

SEQ ID NO: 388422 - DNA, 460 bp, Homo Sapiens; identical to SEQ ID NO: 365271

SEQ ID NO: 388423 - DNA, 482 bp, Homo Sapiens; identical to SEQ ID NO: 365281
  misc_feature (50)..(50): n is a, c, g, or t

SEQ ID NO: 388424 - DNA, 768 bp, Homo Sapiens; identical to SEQ ID NO: 365282
  misc_feature (14)..(14): n is a, c, g, or t
  misc_feature (39)..(39): n is a, c, g, or t
  misc_feature (406)..(416): n is a, c, g, or t

SEQ ID NO: 388425 - DNA, 709 bp, Homo Sapiens; identical to SEQ ID NO: 365303
  misc_feature (362)..(397): n is a, c, g, or t

SEQ ID NO: 388426 - DNA, 423 bp, Homo Sapiens; identical to SEQ ID NO: 365304
  misc_feature (328)..(363): n is a, c, g, or t

SEQ ID NO: 388427 - DNA, 807 bp, Homo Sapiens; identical to SEQ ID NO: 365314

SEQ ID NO: 388428 - DNA, 822 bp, Homo Sapiens; identical to SEQ ID NO: 365315
  misc_feature (738)..(738): n is a, c, g, or t

SEQ ID NO: 388429 - DNA, 548 bp, Homo Sapiens; identical to SEQ ID NO: 365316
  misc_feature (13)..(13): n is a, c, g, or t
  misc_feature (349)..(357): n is a, c, g, or t

SEQ ID NO: 388430 - DNA, 1364 bp, Homo Sapiens; identical to SEQ ID NO: 365357

SEQ ID NO: 388431 - DNA, 1924 bp, Homo Sapiens; identical to SEQ ID NO: 365358

SEQ ID NO: 388432 - DNA, 1016 bp, Homo Sapiens; identical to SEQ ID NO: 365359
  misc_feature (677)..(677): n is a, c, g, or t

SEQ ID NO: 388433 - DNA, 1459 bp, Homo Sapiens; identical to SEQ ID NO: 365360
  misc_feature (236)..(250): n is a, c, g, or t
  misc_feature (765)..(790): n is a, c, g, or t
  misc_feature (792)..(792): n is a, c, g, or t
  misc_feature (795)..(796): n is a, c, g, or t
  misc_feature (801)..(801): n is a, c, g, or t
  misc_feature (839)..(852): n is a, c, g, or t
  misc_feature (882)..(883): n is a, c, g, or t
  misc_feature (893)..(912): n is a, c, g, or t
  misc_feature (919)..(940): n is a, c, g, or t
  misc_feature (1036)..(1047): n is a, c, g, or t
  misc_feature (1171)..(1183): n is a, c, g, or t

SEQ ID NO: 388434 - DNA, 1003 bp, Homo Sapiens; identical to SEQ ID NO: 365375

SEQ ID NO: 388435 - DNA, 1131 bp, Homo Sapiens; identical to SEQ ID NO: 365376

SEQ ID NO: 388436 - DNA, 1124 bp, Homo Sapiens; identical to SEQ ID NO: 365377

SEQ ID NO: 388437 - DNA, 468 bp, Homo Sapiens; identical to SEQ ID NO: 365384
  misc_feature (23)..(23): n is a, c, g, or t

SEQ ID NO: 388438 - DNA, 473 bp, Homo Sapiens; identical to SEQ ID NO: 365385
  misc_feature (36)..(36): n is a, c, g, or t
  misc_feature (46)..(46): n is a, c, g, or t
  misc_feature (51)..(51): n is a, c, g, or t
  misc_feature (79)..(79): n is a, c, g, or t

SEQ ID NO: 388439 - DNA, 765 bp, Homo Sapiens; identical to SEQ ID NO: 365398
  misc_feature (265)..(265): n is a, c, g, or t

SEQ ID NO: 388440 - DNA, 465 bp, Homo Sapiens; identical to SEQ ID NO: 365399
  misc_feature (449)..(449): n is a, c, g, or t

SEQ ID NO: 388441 - DNA, 466 bp, Homo Sapiens; identical to SEQ ID NO: 365416

SEQ ID NO: 388442 - DNA, 356 bp, Homo Sapiens; identical to SEQ ID NO: 365417

SEQ ID NO: 388443 - DNA, 1138 bp, Homo Sapiens; identical to SEQ ID NO: 365424
  misc_feature (898)..(915): n is a, c, g, or t

SEQ ID NO: 388444 - DNA, 473 bp, Homo Sapiens; identical to SEQ ID NO: 365425
  misc_feature (19)..(19): n is a, c, g, or t
  misc_feature (38)..(38): n is a, c, g, or t
  misc_feature (227)..(242): n is a, c, g, or t

SEQ ID NO: 388445 - DNA, 899 bp, Homo Sapiens; identical to SEQ ID NO: 365431
  misc_feature (339)..(339): n is a, c, g, or t

SEQ ID NO: 388446 - DNA, 1061 bp, Homo Sapiens; identical to SEQ ID NO: 365432

SEQ ID NO: 388447 - DNA, 842 bp, Homo Sapiens; identical to SEQ ID NO: 365442

SEQ ID NO: 388448 - DNA, 1169 bp, Homo Sapiens; identical to SEQ ID NO: 365443

SEQ ID NO: 388449 - DNA, 1305 bp, Homo Sapiens; identical to SEQ ID NO: 365455

SEQ ID NO: 388450 - DNA, 454 bp, Homo Sapiens; identical to SEQ ID NO: 365456
  misc_feature (393)..(393): n is a, c, g, or t

SEQ ID NO: 388451 - DNA, 1400 bp, Homo Sapiens; identical to SEQ ID NO: 365464
  misc_feature (757)..(767): n is a, c, g, or t
  misc_feature (781)..(1344): n is a, c, g, or t

SEQ ID NO: 388452 - DNA, 796 bp, Homo Sapiens; identical to SEQ ID NO: 365465

SEQ ID NO: 388453 - DNA, 803 bp, Homo Sapiens; identical to SEQ ID NO: 365466

SEQ ID NO: 388454 - DNA, 1063 bp, Homo Sapiens; identical to SEQ ID NO: 365468
  misc_feature (979)..(1000): n is a, c, g, or t

SEQ ID NO: 388455 - DNA, 477 bp, Homo Sapiens; identical to SEQ ID NO: 365469
  misc_feature (379)..(400): n is a, c, g, or t

SEQ ID NO: 388456 - DNA, 1731 bp, Homo Sapiens; identical to SEQ ID NO: 365472

SEQ ID NO: 388457 - DNA, 279 bp, Homo Sapiens; identical to SEQ ID NO: 365473

SEQ ID NO: 388458 - DNA, 998 bp, Homo Sapiens; identical to SEQ ID NO: 365484

SEQ ID NO: 388459 - DNA, 917 bp, Homo Sapiens; identical to SEQ ID NO: 365485

SEQ ID NO: 388460 - DNA, 487 bp, Homo Sapiens; identical to SEQ ID NO: 365486
  misc_feature (382)..(382): n is a, c, g, or t
  misc_feature (385)..(385): n is a, c, g, or t

SEQ ID NO: 388461 - DNA, 654 bp, Homo Sapiens; identical to SEQ ID NO: 365487
  misc_feature (164)..(189): n is a, c, g, or t
  misc_feature (596)..(596): n is a, c, g, or t
  misc_feature (598)..(599): n is a, c, g, or t
  misc_feature (602)..(602): n is a, c, g, or t
  misc_feature (605)..(606): n is a, c, g, or t
  misc_feature (630)..(630): n is a, c, g, or t

SEQ ID NO: 388462 - DNA, 437 bp, Homo Sapiens; identical to SEQ ID NO: 365488

SEQ ID NO: 388463 - DNA, 633 bp, Homo Sapiens; identical to SEQ ID NO: 365492

SEQ ID NO: 388464 - DNA, 714 bp, Homo Sapiens; identical to SEQ ID NO: 365493
  misc_feature (55)..(86): n is a, c, g, or t

SEQ ID NO: 388465 - DNA, 790 bp, Homo Sapiens; identical to SEQ ID NO: 365495

SEQ ID NO: 388466 - DNA, 647 bp, Homo Sapiens; identical to SEQ ID NO: 365496

SEQ ID NO: 388467 - DNA, 1418 bp, Homo Sapiens; identical to SEQ ID NO: 365524
  misc_feature (28)..(28): n is a, c, g, or t
  misc_feature (40)..(40): n is a, c, g, or t
  misc_feature (197)..(197): n is a, c, g, or t
  misc_feature (793)..(959): n is a, c, g, or t
  misc_feature (961)..(1019): n is a, c, g, or t
  misc_feature (1074)..(1083): n is a, c, g, or t
  misc_feature (1122)..(1163): n is a, c, g, or t
  misc_feature (1189)..(1211): n is a, c, g, or t
  misc_feature (1228)..(1257): n is a, c, g, or t

SEQ ID NO: 388468 - DNA, 473 bp, Homo Sapiens; identical to SEQ ID NO: 365525
  misc_feature (11)..(11): n is a, c, g, or t
  misc_feature (23)..(23): n is a, c, g, or t
  misc_feature (37)..(37): n is a, c, g, or t

SEQ ID NO: 388469 - DNA, 1604 bp, Homo Sapiens; identical to SEQ ID NO: 365527
  misc_feature (30)..(31): n is a, c, g, or t
  misc_feature (1496)..(1507): n is a, c, g, or t

SEQ ID NO: 388470 - DNA, 1023 bp, Homo Sapiens; identical to SEQ ID NO: 365528

SEQ ID NO: 388471 - DNA, 1124 bp, Homo Sapiens; identical to SEQ ID NO: 365547
  misc_feature (22)..(22): n is a, c, g, or t
  misc_feature (32)..(32): n is a, c, g, or t

SEQ ID NO: 388472 - DNA, 1189 bp, Homo Sapiens; identical to SEQ ID NO: 365548
  misc_feature (64)..(122): n is a, c, g, or t

SEQ ID NO: 388473 - DNA, 456 bp, Homo Sapiens; identical to SEQ ID NO: 365549
  misc_feature (417)..(417): n is a, c, g, or t
  misc_feature (422)..(422): n is a, c, g, or t
  misc_feature (442)..(442): n is a, c, g, or t

SEQ ID NO: 388474 - DNA, 936 bp, Homo Sapiens; identical to SEQ ID NO: 365552

SEQ ID NO: 388475 - DNA, 988 bp, Homo Sapiens; identical to SEQ ID NO: 365553

SEQ ID NO: 388476 - DNA, 850 bp, Homo Sapiens; identical to SEQ ID NO: 365554

SEQ ID NO: 388477 - DNA, 1075 bp, Homo Sapiens; identical to SEQ ID NO: 365555

SEQ ID NO: 388478 - DNA, 696 bp, Homo Sapiens; identical to SEQ ID NO: 365560
  misc_feature (19)..(19): n is a, c, g, or t

SEQ ID NO: 388479 - DNA, 1029 bp, Homo Sapiens; identical to SEQ ID NO: 365561
  misc_feature (418)..(478): n is a, c, g, or t
  misc_feature (570)..(570): n is a, c, g, or t

SEQ ID NO: 388480 - DNA, 3447 bp, Homo Sapiens; identical to SEQ ID NO: 365614
  misc_feature (114)..(164): n is a, c, g, or t
  misc_feature (2485)..(2504): n is a, c, g, or t

SEQ ID NO: 388481 - DNA, 726 bp, Homo Sapiens; identical to SEQ ID NO: 365615

SEQ ID NO: 388482 - DNA, 725 bp, Homo Sapiens; identical to SEQ ID NO: 365631

SEQ ID NO: 388483 - DNA, 1260 bp, Homo Sapiens; identical to SEQ ID NO: 365632
  misc_feature (783)..(831): n is a, c, g, or t
  misc_feature (913)..(968): n is a, c, g, or t
  misc_feature (1171)..(1181): n is a, c, g, or t
  misc_feature (1204)..(1220): n is a, c, g, or t

SEQ ID NO: 388484 - DNA, 936 bp, Homo Sapiens; identical to SEQ ID NO: 365633

SEQ ID NO: 388485 - DNA, 662 bp, Homo Sapiens; identical to SEQ ID NO: 365637
  misc_feature (28)..(28): n is a, c, g, or t
  misc_feature (71)..(123): n is a, c, g, or t

SEQ ID NO: 388486 - DNA, 1269 bp, Homo Sapiens; identical to SEQ ID NO: 365638
  misc_feature (97)..(149): n is a, c, g, or t
  misc_feature (530)..(602): n is a, c, g, or t

SEQ ID NO: 388487 - DNA, 431 bp, Homo Sapiens; identical to SEQ ID NO: 365659
  misc_feature (67)..(67): n is a, c, g, or t

SEQ ID NO: 388488 - DNA, 409 bp, Homo Sapiens; identical to SEQ ID NO: 365660
  misc_feature (15)..(15): n is a, c, g, or t
  misc_feature (25)..(25): n is a, c, g, or t

SEQ ID NO: 388489 - DNA, 1054 bp, Homo Sapiens; identical to SEQ ID NO: 365725

SEQ ID NO: 388490 - DNA, 591 bp, Homo Sapiens; identical to SEQ ID NO: 365726

SEQ ID NO: 388491 - DNA, 736 bp, Homo Sapiens; identical to SEQ ID NO: 365731

SEQ ID NO: 388492 - DNA, 508 bp, Homo Sapiens; identical to SEQ ID NO: 365732
  misc_feature (364)..(364): n is a, c, g, or t
  misc_feature (407)..(407): n is a, c, g, or t
  misc_feature (431)..(431): n is a, c, g, or t
  misc_feature (442)..(442): n is a, c, g, or t
  misc_feature (480)..(480): n is a, c, g, or t

SEQ ID NO: 388493 - DNA, 1026 bp, Homo Sapiens; identical to SEQ ID NO: 365773

SEQ ID NO: 388494 - DNA, 266 bp, Homo Sapiens; identical to SEQ ID NO: 365774

SEQ ID NO: 388495 - DNA, 1129 bp, Homo Sapiens; identical to SEQ ID NO: 365795
  misc_feature (108)..(161): n is a, c, g, or t
  misc_feature (1012)..(1057): n is a, c, g, or t
  misc_feature (1111)..(1111): n is a, c, g, or t

SEQ ID NO: 388496 - DNA, 647 bp, Homo Sapiens; identical to SEQ ID NO: 365796
  misc_feature (47)..(92): n is a, c, g, or t

SEQ ID NO: 388497 - DNA, 1450 bp, Homo Sapiens; identical to SEQ ID NO: 365849
  misc_feature (69)..(105): n is a, c, g, or t
  misc_feature (1241)..(1241): n is a, c, g, or t
  misc_feature (1281)..(1282): n is a, c, g, or t
  misc_feature (1299)..(1299): n is a, c, g, or t
  misc_feature (1307)..(1308): n is a, c, g, or t

SEQ ID NO: 388498 - DNA, 332 bp, Homo Sapiens; identical to SEQ ID NO: 365850
  misc_feature (12)..(12): n is a, c, g, or t
  misc_feature (25)..(25): n is a, c, g, or t

SEQ ID NO: 388499 - DNA, 826 bp, Homo Sapiens; identical to SEQ ID NO: 365854

SEQ ID NO: 388500 - DNA, 800 bp, Homo Sapiens; identical to SEQ ID NO: 365855

SEQ ID NO: 388501 - DNA, 586 bp, Homo Sapiens; identical to SEQ ID NO: 365857
  misc_feature (239)..(239): n is a, c, g, or t

SEQ ID NO: 388502 - DNA, 479 bp, Homo Sapiens; identical to SEQ ID NO: 365858
  misc_feature (39)..(39): n is a, c, g, or t
  misc_feature (41)..(41): n is a, c, g, or t
  misc_feature (54)..(54): n is a, c, g, or t
  misc_feature (452)..(452): n is a, c, g, or t

SEQ ID NO: 388503 - DNA, 768 bp, Homo Sapiens; identical to SEQ ID NO: 365859

SEQ ID NO: 388504 - DNA, 788 bp, Homo Sapiens; identical to SEQ ID NO: 365860
  misc_feature (588)..(588): n is a, c, g, or t

SEQ ID NO: 388505 - DNA, 1663 bp, Homo Sapiens; identical to SEQ ID NO: 365861

SEQ ID NO: 388506 - DNA, 550 bp, Homo Sapiens; identical to SEQ ID NO: 365862
  misc_feature (368)..(368): n is a, c, g, or t
  misc_feature (483)..(483): n is a, c, g, or t
  misc_feature (522)..(522): n is a, c, g, or t

SEQ ID NO: 388507 - DNA, 906 bp, Homo Sapiens; identical to SEQ ID NO: 365866
  misc_feature (1)..(1): n is a, c, g, or t
  misc_feature (284)..(284): n is a, c, g, or t
  misc_feature (405)..(405): n is a, c, g, or t
  misc_feature (452)..(452): n is a, c, g, or t

SEQ ID NO: 388508 - DNA, 452 bp, Homo Sapiens; identical to SEQ ID NO: 365867
  misc_feature (45)..(77): n is a, c, g, or t
  misc_feature (157)..(176): n is a, c, g, or t
  misc_feature (214)..(238): n is a, c, g, or t
  misc_feature (375)..(375): n is a, c, g, or t
  misc_feature (412)..(412): n is a, c, g, or t

SEQ ID NO: 388509 - DNA, 1457 bp, Homo Sapiens; identical to SEQ ID NO: 365874
  misc_feature (1048)..(1079): n is a, c, g, or t
  misc_feature (1089)..(1089): n is a, c, g, or t
  misc_feature (1380)..(1380): n is a, c, g, or t
  misc_feature (1387)..(1387): n is a, c, g, or t
  misc_feature (1408)..(1408): n is a, c, g, or t
  misc_feature (1444)..(1444): n is a, c, g, or t

SEQ ID NO: 388510 - DNA, 884 bp, Homo Sapiens; identical to SEQ ID NO: 365875
  misc_feature (78)..(109): n is a, c, g, or t

SEQ ID NO: 388511 - DNA, 952 bp, Homo Sapiens; identical to SEQ ID NO: 365881

SEQ ID NO: 388512 - DNA, 514 bp, Homo Sapiens; identical to SEQ ID NO: 365882

SEQ ID NO: 388513 - DNA, 417 bp, Homo Sapiens; identical to SEQ ID NO: 365935
  misc_feature (99)..(132): n is a, c, g, or t

SEQ ID NO: 388514 - DNA, 945 bp, Homo Sapiens; identical to SEQ ID NO: 365936
  misc_feature (627)..(660): n is a, c, g, or t

SEQ ID NO: 388515 - DNA, 1487 bp, Homo Sapiens; identical to SEQ ID NO: 365942
  misc_feature (25)..(26): n is a, c, g, or t

SEQ ID NO: 388516 - DNA, 319 bp, Homo Sapiens; identical to SEQ ID NO: 365943
  misc_feature (87)..(138): n is a, c, g, or t

SEQ ID NO: 388517 - DNA, 671 bp, Homo Sapiens; identical to SEQ ID NO: 366014
  misc_feature (22)..(22): n is a, c, g, or t
  misc_feature (39)..(39): n is a, c, g, or t
  misc_feature (211)..(211): n is a, c, g, or t

SEQ ID NO: 388518 - DNA, 503 bp, Homo Sapiens; identical to SEQ ID NO: 366015
  misc_feature (320)..(320): n is a, c, g, or t
  misc_feature (361)..(361): n is a, c, g, or t
  misc_feature (391)..(391): n is a, c, g, or t
  misc_feature (429)..(429): n is a, c, g, or t
  misc_feature (437)..(437): n is a, c, g, or t
  misc_feature (475)..(475): n is a, c, g, or t

SEQ ID NO: 388519 - DNA, 1030 bp, Homo Sapiens; identical to SEQ ID NO: 366058

SEQ ID NO: 388520 - DNA, 605 bp, Homo Sapiens; identical to SEQ ID NO: 366059

SEQ ID NO: 388521 - DNA, 1028 bp, Homo Sapiens; identical to SEQ ID NO: 366075

SEQ ID NO: 388522 - DNA, 660 bp, Homo Sapiens; identical to SEQ ID NO: 366076

SEQ ID NO: 388523 - DNA, 848 bp, Homo Sapiens; identical to SEQ ID NO: 366123

SEQ ID NO: 388524 - DNA, 391 bp, Homo Sapiens; identical to SEQ ID NO: 366124
  misc_feature (374)..(374): n is a, c, g, or t

SEQ ID NO: 388525 - DNA, 518 bp, Homo Sapiens; identical to SEQ ID NO: 366157
  misc_feature (56)..(56): n is a, c, g, or t

SEQ ID NO: 388526 - DNA, 510 bp, Homo Sapiens; identical to SEQ ID NO: 366158
  misc_feature (18)..(18): n is a, c, g, or t
  misc_feature (35)..(35): n is a, c, g, or t

SEQ ID NO: 388527 - DNA, 939 bp, Homo Sapiens; identical to SEQ ID NO: 366176

SEQ ID NO: 388528 - DNA, 440 bp, Homo Sapiens; identical to SEQ ID NO: 366177
  misc_feature (18)..(18): n is a, c, g, or t

SEQ ID NO: 388529 - DNA, 681 bp, Homo Sapiens; identical to SEQ ID NO: 366183

SEQ ID NO: 388530 - DNA, 1572 bp, Homo Sapiens; identical to SEQ ID NO: 366184
  misc_feature (23)..(23): n is a, c, g, or t
  misc_feature (29)..(29): n is a, c, g, or t
  misc_feature (47)..(47): n is a, c, g, or t
  misc_feature (125)..(125): n is a, c, g, or t
  misc_feature (138)..(138): n is a, c, g, or t
  misc_feature (277)..(277): n is a, c, g, or t

SEQ ID NO: 388531 - DNA, 1157 bp, Homo Sapiens; identical to SEQ ID NO: 366196

SEQ ID NO: 388532 - DNA, 908 bp, Homo Sapiens; identical to SEQ ID NO: 366197

SEQ ID NO: 388533 - DNA, 1254 bp, Homo Sapiens; identical to SEQ ID NO: 366221

SEQ ID NO: 388534 - DNA, 483 bp, Homo Sapiens; identical to SEQ ID NO: 366222

SEQ ID NO: 388535 - DNA, 538 bp, Homo Sapiens; identical to SEQ ID NO: 366223
  misc_feature (246)..(275): n is a, c, g, or t

SEQ ID NO: 388536 - DNA, 778 bp, Homo Sapiens; identical to SEQ ID NO: 366257
  misc_feature (47)..(47): n is a, c, g, or t
  misc_feature (438)..(456): n is a, c, g, or t
  misc_feature (528)..(550): n is a, c, g, or t

SEQ ID NO: 388537 - DNA, 1089 bp, Homo Sapiens; identical to SEQ ID NO: 98880

SEQ ID NO: 388538 - DNA, 1493 bp, Homo Sapiens; identical to SEQ ID NO: 366259

SEQ ID NO: 388539 - DNA, 544 bp, Homo Sapiens; identical to SEQ ID NO: 366260

SEQ ID NO: 388540 - DNA, 1837 bp, Homo Sapiens; identical to SEQ ID NO: 366279

SEQ ID NO: 388541 - DNA, 1675 bp, Homo Sapiens; identical to SEQ ID NO: 366280

SEQ ID NO: 388542 - DNA, 1022 bp, Homo Sapiens; identical to SEQ ID NO: 366285

SEQ ID NO: 388543 - DNA, 1281 bp, Homo Sapiens; identical to SEQ ID NO: 366286

SEQ ID NO: 388544 - DNA, 1116 bp, Homo Sapiens; identical to SEQ ID NO: 366295

SEQ ID NO: 388545 - DNA, 332 bp, Homo Sapiens; identical to SEQ ID NO: 366296
  misc_feature (19)..(19): n is a, c, g, or t

SEQ ID NO: 388546 - DNA, 1034 bp, Homo Sapiens; identical to SEQ ID NO: 366300

SEQ ID NO: 388547 - DNA, 618 bp, Homo Sapiens; identical to SEQ ID NO: 366301
  misc_feature (428)..(428): n is a, c, g, or t
  misc_feature (477)..(477): n is a, c, g, or t
  misc_feature (485)..(485): n is a, c, g, or t
  misc_feature (517)..(517): n is a, c, g, or t
  misc_feature (523)..(523): n is a, c, g, or t
  misc_feature (553)..(553): n is a, c, g, or t
  misc_feature (567)..(567): n is a, c, g, or t
  misc_feature (582)..(582): n is a, c, g, or t
  misc_feature (597)..(597): n is a, c, g, or t

SEQ ID NO: 388548 - DNA, 617 bp, Homo Sapiens; identical to SEQ ID NO: 366321

SEQ ID NO: 388549 - DNA, 1205 bp, Homo Sapiens; identical to SEQ ID NO: 366322

SEQ ID NO: 388550 - DNA, 438 bp, Homo Sapiens; identical to SEQ ID NO: 366329

SEQ ID NO: 388551 - DNA, 549 bp, Homo Sapiens; identical to SEQ ID NO: 366330
  misc_feature (314)..(314): n is a, c, g, or t
  misc_feature (432)..(432): n is a, c, g, or t
  misc_feature (455)..(455): n is a, c, g, or t
  misc_feature (459)..(479): n is a, c, g, or t
  misc_feature (488)..(488): n is a, c, g, or t

SEQ ID NO: 388552 - DNA, 581 bp, Homo Sapiens; identical to SEQ ID NO: 366353

SEQ ID NO: 388553 - DNA, 422 bp, Homo Sapiens; identical to SEQ ID NO: 366354

SEQ ID NO: 388554 - DNA, 571 bp, Homo Sapiens; identical to SEQ ID NO: 366358

SEQ ID NO: 388555 - DNA, 518 bp, Homo Sapiens; identical to SEQ ID NO: 366359
  misc_feature (26)..(26): n is a, c, g, or t

SEQ ID NO: 388556 - DNA, 1114 bp, Homo Sapiens; identical to SEQ ID NO: 366376

SEQ ID NO: 388557 - DNA, 549 bp, Homo Sapiens; identical to SEQ ID NO: 366377

SEQ ID NO: 388558 - DNA, 843 bp, Homo Sapiens; identical to SEQ ID NO: 366380

SEQ ID NO: 388559 - DNA, 750 bp, Homo Sapiens; identical to SEQ ID NO: 366381

SEQ ID NO: 388560 - DNA, 897 bp, Homo Sapiens; identical to SEQ ID NO: 366401

SEQ ID NO: 388561 - DNA, 1099 bp, Homo Sapiens; identical to SEQ ID NO: 366402
  misc_feature (275)..(378): n is a, c, g, or t

SEQ ID NO: 388562 - DNA, 1501 bp, Homo Sapiens; identical to SEQ ID NO: 366413
  misc_feature (532)..(611): n is a, c, g, or t
  misc_feature (655)..(755): n is a, c, g, or t
  misc_feature (837)..(846): n is a, c, g, or t
  misc_feature (865)..(874): n is a, c, g, or t
  misc_feature (931)..(958): n is a, c, g, or t
  misc_feature (1021)..(1032): n is a, c, g, or t
  misc_feature (1082)..(1097): n is a, c, g, or t
  misc_feature (1379)..(1379): n is a, c, g, or t
  misc_feature (1414)..(1422): n is a, c, g, or t

SEQ ID NO: 388563 - DNA, 772 bp, Homo Sapiens; identical to SEQ ID NO: 366414

SEQ ID NO: 388564 - DNA, 1247 bp, Homo Sapiens; identical to SEQ ID NO: 366415

SEQ ID NO: 388565 - DNA, 546 bp, Homo Sapiens; identical to SEQ ID NO: 366416
  misc_feature (25)..(25): n is a, c, g, or t
  misc_feature (75)..(75): n is a, c, g, or t
  misc_feature (350)..(350): n is a, c, g, or t
  misc_feature (488)..(488): n is a, c, g, or t
  misc_feature (501)..(501): n is a, c, g, or t

SEQ ID NO: 388566 - DNA, 1049 bp, Homo Sapiens; identical to SEQ ID NO: 366428
  misc_feature (881)..(889): n is a, c, g, or t

SEQ ID NO: 388567 - DNA, 1028 bp, Homo Sapiens; identical to SEQ ID NO: 366429

SEQ ID NO: 388568 - DNA, 2011 bp, Homo Sapiens; identical to SEQ ID NO: 366433

SEQ ID NO: 388569 - DNA, 676 bp, Homo Sapiens; identical to SEQ ID NO: 264810

SEQ ID NO: 388570 - DNA, 1005 bp, Homo Sapiens; identical to SEQ ID NO: 366435
  misc_feature (536)..(536): n is a, c, g, or t
  misc_feature (547)..(547): n is a, c, g, or t
  misc_feature (549)..(549): n is a, c, g, or t
  misc_feature (553)..(553): n is a, c, g, or t

SEQ ID NO: 388571 - DNA, 1024 bp, Homo Sapiens; identical to SEQ ID NO: 366450
  misc_feature (427)..(480): n is a, c, g, or t

SEQ ID NO: 388572 - DNA, 809 bp, Homo Sapiens; identical to SEQ ID NO: 366451

SEQ ID NO: 388573 - DNA, 351 bp, Homo Sapiens; identical to SEQ ID NO: 173074

SEQ ID NO: 388574 - DNA, 809 bp, Homo Sapiens; identical to SEQ ID NO: 366454

SEQ ID NO: 388575 - DNA, 1065 bp, Homo Sapiens; identical to SEQ ID NO: 366455

SEQ ID NO: 388576 - DNA, 513 bp, Homo Sapiens; identical to SEQ ID NO: 366475
  misc_feature (75)..(152): n is a, c, g, or t

SEQ ID NO: 388577 - DNA, 500 bp, Homo Sapiens; identical to SEQ ID NO: 366476

SEQ ID NO: 388578 - DNA, 692 bp, Homo Sapiens; identical to SEQ ID NO: 366477

SEQ ID NO: 388579 - DNA, 1576 bp, Homo Sapiens; identical to SEQ ID NO: 366478

SEQ ID NO: 388580 - DNA, 526 bp, Homo Sapiens; identical to SEQ ID NO: 366479
  misc_feature (26)..(26): n is a, c, g, or t
  misc_feature (44)..(44): n is a, c, g, or t
  misc_feature (49)..(49): n is a, c, g, or t
  misc_feature (55)..(55): n is a, c, g, or t
  misc_feature (65)..(65): n is a, c, g, or t

SEQ ID NO: 388581 - DNA, 1335 bp, Homo Sapiens; identical to SEQ ID NO: 366487
  misc_feature (398)..(398): n is a, c, g, or t

SEQ ID NO: 388582 - DNA, 1260 bp, Homo Sapiens; identical to SEQ ID NO: 366488
  misc_feature (873)..(908): n is a, c, g, or t
  misc_feature (1159)..(1167): n is a, c, g, or t

SEQ ID NO: 388583 - DNA, 1108 bp, Homo Sapiens; identical to SEQ ID NO: 366489
  misc_feature (211)..(244): n is a, c, g, or t

SEQ ID NO: 388584 - DNA, 1354 bp, Homo Sapiens; identical to SEQ ID NO: 366490
  misc_feature (222)..(255): n is a, c, g, or t

SEQ ID NO: 388585 - DNA, 585 bp, Homo Sapiens; identical to SEQ ID NO: 366491
  misc_feature (107)..(140): n is a, c, g, or t

SEQ ID NO: 388586 - DNA, 723 bp, Homo Sapiens; identical to SEQ ID NO: 366492

SEQ ID NO: 388587 - DNA, 1289 bp, Homo Sapiens; identical to SEQ ID NO: 366493
  misc_feature (30)..(30): n is a, c, g, or t
  misc_feature (32)..(32): n is a, c, g, or t
  misc_feature (1063)..(1063): n is a, c, g, or t

SEQ ID NO: 388588 - DNA, 810 bp, Homo Sapiens; identical to SEQ ID NO: 366505
  misc_feature (524)..(715): n is a, c, g, or t
  misc_feature (717)..(719): n is a, c, g, or t
  misc_feature (721)..(726): n is a, c, g, or t
  misc_feature (728)..(748): n is a, c, g, or t

SEQ ID NO: 388589 - DNA, 1036 bp, Homo Sapiens; identical to SEQ ID NO: 366506

SEQ ID NO: 388590 - DNA, 741 bp, Homo Sapiens; identical to SEQ ID NO: 366510
  misc_feature (23)..(23): n is a, c, g, or t

SEQ ID NO: 388591 - DNA, 442 bp, Homo Sapiens; identical to SEQ ID NO: 366511
  misc_feature (19)..(19): n is a, c, g, or t

SEQ ID NO: 388592 - DNA, 700 bp, Homo Sapiens; identical to SEQ ID NO: 366517

SEQ ID NO: 388593 - DNA, 324 bp, Homo Sapiens; identical to SEQ ID NO: 366518

SEQ ID NO: 388594 - DNA, 1949 bp, Homo Sapiens; identical to SEQ ID NO: 366524
  misc_feature (1863)..(1863): n is a, c, g, or t
  misc_feature (1895)..(1895): n is a, c, g, or t
  misc_feature (1906)..(1906): n is a, c, g, or t
  misc_feature (1926)..(1926): n is a, c, g, or t
  misc_feature (1936)..(1936): n is a, c, g, or t

SEQ ID NO: 388595 - DNA, 887 bp, Homo Sapiens; identical to SEQ ID NO: 366525

SEQ ID NO: 388596 - DNA, 751 bp, Homo Sapiens; identical to SEQ ID NO: 366526

SEQ ID NO: 388597 - DNA, 1174 bp, Homo Sapiens; identical to SEQ ID NO: 366527
  misc_feature (69)..(69): n is a, c, g, or t
  misc_feature (1049)..(1049): n is a, c, g, or t

SEQ ID NO: 388598 - DNA, 408 bp, Homo Sapiens; identical to SEQ ID NO: 366528
  misc_feature (12)..(12): n is a, c, g, or t
  misc_feature (31)..(31): n is a, c, g, or t
  misc_feature (37)..(37): n is a, c, g, or t
  misc_feature (61)..(61): n is a, c, g, or t
  misc_feature (76)..(76): n is a, c, g, or t

SEQ ID NO: 388599 - DNA, 779 bp, Homo Sapiens; identical to SEQ ID NO: 366560

SEQ ID NO: 388600 - DNA, 922 bp, Homo Sapiens; identical to SEQ ID NO: 366561
  misc_feature (49)..(86): n is a, c, g, or t
  misc_feature (126)..(307): n is a, c, g, or t

SEQ ID NO: 388601 - DNA, 1551 bp, Homo Sapiens; identical to SEQ ID NO: 366564

SEQ ID NO: 388602 - DNA, 892 bp, Homo Sapiens; identical to SEQ ID NO: 366565
  misc_feature (482)..(502): n is a, c, g, or t
  misc_feature (537)..(583): n is a, c, g, or t

SEQ ID NO: 388603 - DNA, 689 bp, Homo Sapiens; identical to SEQ ID NO: 366571
  misc_feature (48)..(60): n is a, c, g, or t
  misc_feature (397)..(407): n is a, c, g, or t

SEQ ID NO: 388604 - DNA, 489 bp, Homo Sapiens; identical to SEQ ID NO: 366572
  misc_feature (261)..(272): n is a, c, g, or t

SEQ ID NO: 388605 - DNA, 907 bp, Homo Sapiens; identical to SEQ ID NO: 366579
  misc_feature (635)..(635): n is a, c, g, or t

SEQ ID NO: 388606 - DNA, 1237 bp, Homo Sapiens; identical to SEQ ID NO: 366580
  misc_feature (133)..(142): n is a, c, g, or t

SEQ ID NO: 388607 - DNA, 1253 bp, Homo Sapiens; identical to SEQ ID NO: 366644
  misc_feature (193)..(274): n is a, c, g, or t

SEQ ID NO: 388608 - DNA, 1656 bp, Homo Sapiens; identical to SEQ ID NO: 366645
  misc_feature (121)..(121): n is a, c, g, or t
  misc_feature (355)..(355): n is a, c, g, or t
  misc_feature (1007)..(1088): n is a, c, g, or t
  misc_feature (1377)..(1377): n is a, c, g, or t
  misc_feature (1535)..(1550): n is a, c, g, or t
  misc_feature (1582)..(1590): n is a, c, g, or t

SEQ ID NO: 388609 - DNA, 1029 bp, Homo Sapiens; identical to SEQ ID NO: 366646

SEQ ID NO: 388610 - DNA, 800 bp, Homo Sapiens; identical to SEQ ID NO: 366647

SEQ ID NO: 388611 - DNA, 897 bp, Homo Sapiens; identical to SEQ ID NO: 366648

SEQ ID NO: 388612 - DNA, 1254 bp, Homo Sapiens; identical to SEQ ID NO: 366673

SEQ ID NO: 388613 - DNA, 1068 bp, Homo Sapiens; identical to SEQ ID NO: 366674

SEQ ID NO: 388614 - DNA, 963 bp, Homo Sapiens; identical to SEQ ID NO: 366686

SEQ ID NO: 388615 - DNA, 868 bp, Homo Sapiens; identical to SEQ ID NO: 366687

SEQ ID NO: 388616 - DNA, 1110 bp, Homo Sapiens; identical to SEQ ID NO: 366688

SEQ ID NO: 388617 - DNA, 1160 bp, Homo Sapiens; identical to SEQ ID NO: 366689
  misc_feature (1062)..(1085): n is a, c, g, or t

SEQ ID NO: 388618 - DNA, 1189 bp, Homo Sapiens; identical to SEQ ID NO: 366695
  misc_feature (488)..(498): n is a, c, g, or t
  misc_feature (945)..(945): n is a, c, g, or t
  misc_feature (966)..(966): n is a, c, g, or t
  misc_feature (1130)..(1130): n is a, c, g, or t

SEQ ID NO: 388619 - DNA, 1333 bp, Homo Sapiens; identical to SEQ ID NO: 366696

SEQ ID NO: 388620 - DNA, 581 bp, Homo Sapiens; identical to SEQ ID NO: 366697

SEQ ID NO: 388621 - DNA, 1786 bp, Homo Sapiens; identical to SEQ ID NO: 366705
  misc_feature (710)..(737): n is a, c, g, or t

SEQ ID NO: 388622 - DNA, 1056 bp, Homo Sapiens; identical to SEQ ID NO: 366706

SEQ ID NO: 388623 - DNA, 1066 bp, Homo Sapiens; identical to SEQ ID NO: 366711
  misc_feature (973)..(1013): n is a, c, g, or t
  misc_feature (1038)..(1038): n is a, c, g, or t

SEQ ID NO: 388624 - DNA, 996 bp, Homo Sapiens; identical to SEQ ID NO: 366712
  misc_feature (855)..(855): n is a, c, g, or t
  misc_feature (857)..(857): n is a, c, g, or t
  misc_feature (859)..(859): n is a, c, g, or t
  misc_feature (899)..(899): n is a, c, g, or t
  misc_feature (943)..(944): n is a, c, g, or t
  misc_feature (967)..(967): n is a, c, g, or t
  misc_feature (977)..(977): n is a, c, g, or t

SEQ ID NO: 388625 - DNA, 1252 bp, Homo Sapiens; identical to SEQ ID NO: 366722
  misc_feature (266)..(315): n is a, c, g, or t

SEQ ID NO: 388626 - DNA, 1332 bp, Homo Sapiens; identical to SEQ ID NO: 366723
  misc_feature (1287)..(1287): n is a, c, g, or t

SEQ ID NO: 388627 - DNA, 871 bp, Homo Sapiens; identical to SEQ ID NO: 366741

SEQ ID NO: 388628 - DNA, 772 bp, Homo Sapiens; identical to SEQ ID NO: 366742

SEQ ID NO: 388629 - DNA, 1446 bp, Homo Sapiens; identical to SEQ ID NO: 366743
  misc_feature (51)..(87): n is a, c, g, or t

SEQ ID NO: 388630 - DNA, 909 bp, Homo Sapiens; identical to SEQ ID NO: 366745

SEQ ID NO: 388631 - DNA, 404 bp, Homo Sapiens; identical to SEQ ID NO: 366746

SEQ ID NO: 388632 - DNA, 1669 bp, Homo Sapiens; identical to SEQ ID NO: 366749
  misc_feature (73)..(87): n is a, c, g, or t
  misc_feature (128)..(185): n is a, c, g, or t
  misc_feature (1148)..(1148): n is a, c, g, or t
  misc_feature (1306)..(1306): n is a, c, g, or t
  misc_feature (1354)..(1354): n is a, c, g, or t
  misc_feature (1383)..(1383): n is a, c, g, or t
  misc_feature (1405)..(1405): n is a, c, g, or t
  misc_feature (1452)..(1452): n is a, c, g, or t
  misc_feature (1519)..(1519): n is a, c, g, or t

SEQ ID NO: 388633 - DNA, 905 bp, Homo Sapiens; identical to SEQ ID NO: 366750
  misc_feature (813)..(813): n is a, c, g, or t

SEQ ID NO: 388634 - DNA, 721 bp, Homo Sapiens; identical to SEQ ID NO: 98675

SEQ ID NO: 388635 - DNA, 1245 bp, Homo Sapiens; identical to SEQ ID NO: 366752
  misc_feature (1164)..(1200): n is a, c, g, or t

SEQ ID NO: 388636 - DNA, 1048 bp, Homo Sapiens; identical to SEQ ID NO: 366753
  misc_feature (808)..(808): n is a, c, g, or t

SEQ ID NO: 388637 - DNA, 373 bp, Homo Sapiens; identical to SEQ ID NO: 366754
  misc_feature (108)..(108): n is a, c, g, or t
  misc_feature (203)..(203): n is a, c, g, or t

SEQ ID NO: 388638 - DNA, 909 bp, Homo Sapiens; identical to SEQ ID NO: 366781

SEQ ID NO: 388639 - DNA, 1138 bp, Homo Sapiens; identical to SEQ ID NO: 366782
  misc_feature (923)..(947): n is a, c, g, or t

SEQ ID NO: 388640 - DNA, 1848 bp, Homo Sapiens; identical to SEQ ID NO: 366789
  misc_feature (791)..(805): n is a, c, g, or t

SEQ ID NO: 388641 - DNA, 1172 bp, Homo Sapiens; identical to SEQ ID NO: 366790

SEQ ID NO: 388642 - DNA, 1037 bp, Homo Sapiens; identical to SEQ ID NO: 366791
  misc_feature (20)..(20): n is a, c, g, or t

SEQ ID NO: 388643 - DNA, 919 bp, Homo Sapiens; identical to SEQ ID NO: 366792
  misc_feature (859)..(859): n is a, c, g, or t

SEQ ID NO: 388644 - DNA, 845 bp, Homo Sapiens; identical to SEQ ID NO: 366793
  misc_feature (164)..(164): n is a, c, g, or t
  misc_feature (195)..(195): n is a, c, g, or t

SEQ ID NO: 388645 - DNA, 1002 bp, Homo Sapiens; identical to SEQ ID NO: 366796
  misc_feature (576)..(587): n is a, c, g, or t

SEQ ID NO: 388646 - DNA, 445 bp, Homo Sapiens; identical to SEQ ID NO: 366797
  misc_feature (24)..(24): n is a, c, g, or t
  misc_feature (43)..(43): n is a, c, g, or t

SEQ ID NO: 388647 - DNA, 887 bp, Homo Sapiens; identical to SEQ ID NO: 366800

SEQ ID NO: 388648 - DNA, 1116 bp, Homo Sapiens; identical to SEQ ID NO: 366801
  misc_feature (852)..(865): n is a, c, g, or t
  misc_feature (912)..(952): n is a, c, g, or t

SEQ ID NO: 388649 - DNA, 616 bp, Homo Sapiens; identical to SEQ ID NO: 366804

SEQ ID NO: 388650 - DNA, 601 bp, Homo Sapiens; identical to SEQ ID NO: 366805
  misc_feature (323)..(433): n is a, c, g, or t
  misc_feature (588)..(588): n is a, c, g, or t

SEQ ID NO: 388651 - DNA, 530 bp, Homo Sapiens; identical to SEQ ID NO: 366820
  misc_feature (81)..(81): n is a, c, g, or t

SEQ ID NO: 388652 - DNA, 918 bp, Homo Sapiens; identical to SEQ ID NO: 366821
  misc_feature (300)..(300): n is a, c, g, or t

SEQ ID NO: 388653 - DNA, 864 bp, Homo Sapiens; identical to SEQ ID NO: 366824
  misc_feature (334)..(334): n is a, c, g, or t
  misc_feature (337)..(337): n is a, c, g, or t

SEQ ID NO: 388654 - DNA, 854 bp, Homo Sapiens; identical to SEQ ID NO: 366825

SEQ ID NO: 388655 - DNA, 1318 bp, Homo Sapiens; identical to SEQ ID NO: 366827

SEQ ID NO: 388656 - DNA, 437 bp, Homo Sapiens; identical to SEQ ID NO: 366828
  misc_feature (406)..(406): n is a, c, g, or t
  misc_feature (413)..(413): n is a, c, g, or t

SEQ ID NO: 388657 - DNA, 927 bp, Homo Sapiens; identical to SEQ ID NO: 366833

SEQ ID NO: 388658 - DNA, 479 bp, Homo Sapiens; identical to SEQ ID NO: 366834
  misc_feature (469)..(469): n is a, c, g, or t

SEQ ID NO: 388659 - DNA, 968 bp, Homo Sapiens; identical to SEQ ID NO: 366839
  misc_feature (780)..(780): n is a, c, g, or t

SEQ ID NO: 388660 - DNA, 1146 bp, Homo Sapiens; identical to SEQ ID NO: 366840

SEQ ID NO: 388661 - DNA, 1085 bp, Homo Sapiens; identical to SEQ ID NO: 366841
  misc_feature (260)..(352): n is a, c, g, or t
  misc_feature (989)..(989): n is a, c, g, or t

SEQ ID NO: 388662 - DNA, 1508 bp, Homo Sapiens; identical to SEQ ID NO: 366842
  misc_feature (1118)..(1118): n is a, c, g, or t
  misc_feature (1207)..(1207): n is a, c, g, or t

SEQ ID NO: 388663 - DNA, 1058 bp, Homo Sapiens; identical to SEQ ID NO: 366843

SEQ ID NO: 388664 - DNA, 969 bp, Homo Sapiens; identical to SEQ ID NO: 366844

SEQ ID NO: 388665 - DNA, 1043 bp, Homo Sapiens; identical to SEQ ID NO: 366845

SEQ ID NO: 388666 - DNA, 857 bp, Homo Sapiens; identical to SEQ ID NO: 366850

SEQ ID NO: 388667 - DNA, 493 bp, Homo Sapiens; identical to SEQ ID NO: 89599

SEQ ID NO: 388668 - DNA, 1061 bp, Homo Sapiens; identical to SEQ ID NO: 366853

SEQ ID NO: 388669 - DNA, 1108 bp, Homo Sapiens; identical to SEQ ID NO: 366854
  misc_feature (895)..(895): n is a, c, g, or t

SEQ ID NO: 388670 - DNA, 756 bp, Homo Sapiens; identical to SEQ ID NO: 366855

SEQ ID NO: 388671 - DNA, 708 bp, Homo Sapiens; identical to SEQ ID NO: 366856

SEQ ID NO: 388672 - DNA, 878 bp, Homo Sapiens; identical to SEQ ID NO: 366868

SEQ ID NO: 388673 - DNA, 1124 bp, Homo Sapiens; identical to SEQ ID NO: 366869
  misc_feature (139)..(139): n is a, c, g, or t

SEQ ID NO: 388674 - DNA, 808 bp, Homo Sapiens; identical to SEQ ID NO: 366887

SEQ ID NO: 388675 - DNA, 1012 bp, Homo Sapiens; identical to SEQ ID NO: 366888
  misc_feature (930)..(930): n is a, c, g, or t

SEQ ID NO: 388676 - DNA, 1037 bp, Homo Sapiens; identical to SEQ ID NO: 366889
  misc_feature (815)..(909): n is a, c, g, or t

SEQ ID NO: 388677 - DNA, 927 bp, Homo Sapiens; identical to SEQ ID NO: 366890

SEQ ID NO: 388678 - DNA, 832 bp, Homo Sapiens; identical to SEQ ID NO: 366891
  misc_feature (663)..(681): n is a, c, g, or t

SEQ ID NO: 388679 - DNA, 882 bp, Homo Sapiens; identical to SEQ ID NO: 366894

SEQ ID NO: 388680 - DNA, 1143 bp, Homo Sapiens; identical to SEQ ID NO: 366895
  misc_feature (691)..(691): n is a, c, g, or t
  misc_feature (929)..(939): n is a, c, g, or t

SEQ ID NO: 388681 - DNA, 864 bp, Homo Sapiens; identical to SEQ ID NO: 366899

SEQ ID NO: 388682 - DNA, 825 bp, Homo Sapiens; identical to SEQ ID NO: 366900

SEQ ID NO: 388683 - DNA, 717 bp, Homo Sapiens; identical to SEQ ID NO: 366904
  misc_feature (677)..(677): n is a, c, g, or t

SEQ ID NO: 388684 - DNA, 1190 bp, Homo Sapiens; identical to SEQ ID NO: 366905

SEQ ID NO: 388685 - DNA, 965 bp, Homo Sapiens; identical to SEQ ID NO: 366906

SEQ ID NO: 388686 - DNA, 1164 bp, Homo Sapiens; identical to SEQ ID NO: 366907
  misc_feature (1125)..(1125): n is a, c, g, or t
  misc_feature (1140)..(1140): n is a, c, g, or t
  misc_feature (1152)..(1152): n is a, c, g, or t

SEQ ID NO: 388687 - DNA, 927 bp, Homo Sapiens; identical to SEQ ID NO: 366910

SEQ ID NO: 388688 - DNA, 1065 bp, Homo Sapiens; identical to SEQ ID NO: 366911

SEQ ID NO: 388689 - DNA, 765 bp, Homo Sapiens; identical to SEQ ID NO: 366916

SEQ ID NO: 388690 - DNA, 755 bp, Homo Sapiens; identical to SEQ ID NO: 366917
  misc_feature (687)..(687): n is a, c, g, or t

SEQ ID NO: 388691 - DNA, 945 bp, Homo Sapiens; identical to SEQ ID NO: 366918

SEQ ID NO: 388692 - DNA, 1318 bp, Homo Sapiens; identical to SEQ ID NO: 366922

SEQ ID NO: 388693 - DNA, 819 bp, Homo Sapiens; identical to SEQ ID NO: 366923

SEQ ID NO: 388694 - DNA, 1044 bp, Homo Sapiens; identical to SEQ ID NO: 366927
  misc_feature (144)..(145): n is a, c, g, or t

SEQ ID NO: 388695 - DNA, 1175 bp, Homo Sapiens; identical to SEQ ID NO: 366928
  misc_feature (903)..(903): n is a, c, g, or t
  misc_feature (929)..(929): n is a, c, g, or t
  misc_feature (961)..(961): n is a, c, g, or t
  misc_feature (967)..(967): n is a, c, g, or t
  misc_feature (977)..(977): n is a, c, g, or t
  misc_feature (1059)..(1059): n is a, c, g, or t
  misc_feature (1108)..(1108): n is a, c, g, or t
  misc_feature (1159)..(1159): n is a, c, g, or t

SEQ ID NO: 388696 - DNA, 927 bp, Homo Sapiens; identical to SEQ ID NO: 366958

SEQ ID NO: 388697 - DNA, 652 bp, Homo Sapiens; identical to SEQ ID NO: 366959

SEQ ID NO: 388698 - DNA, 1120 bp, Homo Sapiens; identical to SEQ ID NO: 366972

SEQ ID NO: 388699 - DNA, 1016 bp, Homo Sapiens; identical to SEQ ID NO: 366973

SEQ ID NO: 388700 - DNA, 1002 bp, Homo Sapiens; identical to SEQ ID NO: 366974

SEQ ID NO: 388701 - DNA, 546 bp, Homo Sapiens; identical to SEQ ID NO: 366985
  misc_feature (415)..(479): n is a, c, g, or t

SEQ ID NO: 388702 - DNA, 1633 bp, Homo Sapiens; identical to SEQ ID NO: 366986

SEQ ID NO: 388703 - DNA, 1338 bp, Homo Sapiens; identical to SEQ ID NO: 366987

SEQ ID NO: 388704 - DNA, 1359 bp, Homo Sapiens; identical to SEQ ID NO: 366988
  misc_feature (1212)..(1212): n is a, c, g, or t

SEQ ID NO: 388705 - DNA, 622 bp, Homo Sapiens; identical to SEQ ID NO: 366989

SEQ ID NO: 388706 - DNA, 1135 bp, Homo Sapiens; identical to SEQ ID NO: 366990

SEQ ID NO: 388707 - DNA, 897 bp, Homo Sapiens; identical to SEQ ID NO: 366996

SEQ ID NO: 388708 - DNA, 826 bp, Homo Sapiens; identical to SEQ ID NO: 366997

SEQ ID NO: 388709 - DNA, 582 bp, Homo Sapiens; identical to SEQ ID NO: 366998
  misc_feature (396)..(396): n is a, c, g, or t
  misc_feature (491)..(492): n is a, c, g, or t

SEQ ID NO: 388710 - DNA, 1209 bp, Homo Sapiens; identical to SEQ ID NO: 367007

SEQ ID NO: 388711 - DNA, 922 bp, Homo Sapiens; identical to SEQ ID NO: 367008

SEQ ID NO: 388712 - DNA, 984 bp, Homo Sapiens; identical to SEQ ID NO: 367010
  misc_feature (823)..(823): n is a, c, g, or t

SEQ ID NO: 388713 - DNA, 1154 bp, Homo Sapiens; identical to SEQ ID NO: 367011

SEQ ID NO: 388714 - DNA, 884 bp, Homo Sapiens; identical to SEQ ID NO: 367014

SEQ ID NO: 388715 - DNA, 1069 bp, Homo Sapiens; identical to SEQ ID NO: 367015

SEQ ID NO: 388716 - DNA, 905 bp, Homo Sapiens; identical to SEQ ID NO: 367016
  misc_feature (130)..(143): n is a, c, g, or t
  misc_feature (161)..(408): n is a, c, g, or t

SEQ ID NO: 388717 - DNA, 677 bp, Homo Sapiens; identical to SEQ ID NO: 367017
  misc_feature (34)..(34): n is a, c, g, or t
  misc_feature (203)..(211): n is a, c, g, or t

SEQ ID NO: 388718 - DNA, 911 bp, Homo Sapiens; identical to SEQ ID NO: 367018

SEQ ID NO: 388719 - DNA, 1514 bp, Homo Sapiens; identical to SEQ ID NO: 367019
  misc_feature (642)..(643): n is a, c, g, or t
  misc_feature (648)..(652): n is a, c, g, or t
  misc_feature (656)..(661): n is a, c, g, or t
  misc_feature (663)..(1120): n is a, c, g, or t
  misc_feature (1122)..(1122): n is a, c, g, or t
  misc_feature (1128)..(1128): n is a, c, g, or t
  misc_feature (1131)..(1131): n is a, c, g, or t
  misc_feature (1137)..(1137): n is a, c, g, or t
  misc_feature (1151)..(1243): n is a, c, g, or t
  misc_feature (1265)..(1265): n is a, c, g, or t
  misc_feature (1270)..(1270): n is a, c, g, or t
  misc_feature (1286)..(1286): n is a, c, g, or t
  misc_feature (1297)..(1297): n is a, c, g, or t
  misc_feature (1301)..(1301): n is a, c, g, or t
  misc_feature (1303)..(1303): n is a, c, g, or t
  misc_feature (1307)..(1307): n is a, c, g, or t
  misc_feature (1309)..(1364): n is a, c, g, or t
  misc_feature (1391)..(1391): n is a, c, g, or t
  misc_feature (1409)..(1409): n is a, c, g, or t
  misc_feature (1474)..(1474): n is a, c, g, or t
  misc_feature (1488)..(1488): n is a, c, g, or t

SEQ ID NO: 388720 - DNA, 1225 bp, Homo Sapiens; identical to SEQ ID NO: 367020
  misc_feature (1158)..(1167): n is a, c, g, or t

SEQ ID NO: 388721 - DNA, 863 bp, Homo Sapiens; identical to SEQ ID NO: 367021
  misc_feature (52)..(88): n is a, c, g, or t

SEQ ID NO: 388722 - DNA, 1106 bp, Homo Sapiens; identical to SEQ ID NO: 367030
  misc_feature (854)..(854): n is a, c, g, or t
  misc_feature (857)..(857): n is a, c, g, or t
  misc_feature (864)..(864): n is a, c, g, or t
  misc_feature (893)..(893): n is a, c, g, or t
  misc_feature (909)..(909): n is a, c, g, or t
  misc_feature (987)..(987): n is a, c, g, or t
  misc_feature (1058)..(1058): n is a, c, g, or t
  misc_feature (1068)..(1068): n is a, c, g, or t
  misc_feature (1080)..(1080): n is a, c, g, or t

SEQ ID NO: 388723 - DNA, 1408 bp, Homo Sapiens; identical to SEQ ID NO: 367031
  misc_feature (516)..(566): n is a, c, g, or t

SEQ ID NO: 388724 - DNA, 808 bp, Homo Sapiens; identical to SEQ ID NO: 367037

SEQ ID NO: 388725 - DNA, 1220 bp, Homo Sapiens; identical to SEQ ID NO: 367038

SEQ ID NO: 388726 - DNA, 923 bp, Homo Sapiens; identical to SEQ ID NO: 367045

SEQ ID NO: 388727 - DNA, 1431 bp, Homo Sapiens; identical to SEQ ID NO: 367046

SEQ ID NO: 388728 - DNA, 1297 bp, Homo Sapiens; identical to SEQ ID NO: 367054

SEQ ID NO: 388729 - DNA, 741 bp, Homo Sapiens; identical to SEQ ID NO: 367055

SEQ ID NO: 388730 - DNA, 1042 bp, Homo Sapiens; identical to SEQ ID NO: 367056

SEQ ID NO: 388731 - DNA, 1182 bp, Homo Sapiens; identical to SEQ ID NO: 367057

SEQ ID NO: 388732 - DNA, 881 bp, Homo Sapiens; identical to SEQ ID NO: 367060

SEQ ID NO: 388733 - DNA, 789 bp, Homo Sapiens; identical to SEQ ID NO: 367061

SEQ ID NO: 388734 - DNA, 777 bp, Homo Sapiens; identical to SEQ ID NO: 367062

SEQ ID NO: 388735 - DNA, 692 bp, Homo Sapiens; identical to SEQ ID NO: 367063

SEQ ID NO: 388736 - DNA, 875 bp, Homo Sapiens; identical to SEQ ID NO: 367072
  misc_feature (474)..(474): n is a, c, g, or t

SEQ ID NO: 388737 - DNA, 684 bp, Homo Sapiens; identical to SEQ ID NO: 367073
  misc_feature (195)..(203): n is a, c, g, or t

SEQ ID NO: 388738 - DNA, 1149 bp, Homo Sapiens; identical to SEQ ID NO: 367074

SEQ ID NO: 388739 - DNA, 895 bp, Homo Sapiens; identical to SEQ ID NO: 367075

SEQ ID NO: 388740 - DNA, 980 bp, Homo Sapiens; identical to SEQ ID NO: 367076

SEQ ID NO: 388741 - DNA, 460 bp, Homo Sapiens; identical to SEQ ID NO: 367077
  misc_feature (132)..(132): n is a, c, g, or t
  misc_feature (404)..(404): n is a, c, g, or t
  misc_feature (421)..(421): n is a, c, g, or t
  misc_feature (434)..(434): n is a, c, g, or t
  misc_feature (441)..(441): n is a, c, g, or t

SEQ ID NO: 388742 - DNA, 1233 bp, Homo Sapiens; identical to SEQ ID NO: 367087
  misc_feature (173)..(173): n is a, c, g, or t
  misc_feature (958)..(966): n is a, c, g, or t

SEQ ID NO: 388743 - DNA, 481 bp, Homo Sapiens; identical to SEQ ID NO: 367088
  misc_feature (466)..(466): n is a, c, g, or t

SEQ ID NO: 388744 - DNA, 888 bp, Homo Sapiens; identical to SEQ ID NO: 367096

SEQ ID NO: 388745 - DNA, 877 bp, Homo Sapiens; identical to SEQ ID NO: 367097

SEQ ID NO: 388746 - DNA, 1027 bp, Homo Sapiens; identical to SEQ ID NO: 367103
  misc_feature (909)..(909): n is a, c, g, or t
  misc_feature (969)..(969): n is a, c, g, or t
  misc_feature (981)..(981): n is a, c, g, or t
  misc_feature (985)..(985): n is a, c, g, or t

SEQ ID NO: 388747 - DNA, 957 bp, Homo Sapiens; identical to SEQ ID NO: 367104
  misc_feature (246)..(246): n is a, c, g, or t

SEQ ID NO: 388748 - DNA, 1089 bp, Homo Sapiens; identical to SEQ ID NO: 367105
  misc_feature (462)..(462): n is a, c, g, or t

SEQ ID NO: 388749 - DNA, 786 bp, Homo Sapiens; identical to SEQ ID NO: 367106

SEQ ID NO: 388750 - DNA, 483 bp, Homo Sapiens; identical to SEQ ID NO: 367107

SEQ ID NO: 388751 - DNA, 488 bp, Homo Sapiens; identical to SEQ ID NO: 367114
  misc_feature (12)..(12): n is a, c, g, or t
  misc_feature (27)..(27): n is a, c, g, or t
  misc_feature (64)..(64): n is a, c, g, or t
  misc_feature (72)..(72): n is a, c, g, or t

SEQ ID NO: 388752 - DNA, 432 bp, Homo Sapiens; identical to SEQ ID NO: 367115
  misc_feature (37)..(37): n is a, c, g, or t
  misc_feature (77)..(77): n is a, c, g, or t

SEQ ID NO: 388753 - DNA, 502 bp, Homo Sapiens; identical to SEQ ID NO: 367116
  misc_feature (24)..(24): n is a, c, g, or t
  misc_feature (278)..(278): n is a, c, g, or t
  misc_feature (419)..(419): n is a, c, g, or t
  misc_feature (436)..(436): n is a, c, g, or t

SEQ ID NO: 388754 - DNA, 926 bp, Homo Sapiens; identical to SEQ ID NO: 367124
  misc_feature (814)..(814): n is a, c, g, or t
  misc_feature (873)..(874): n is a, c, g, or t

SEQ ID NO: 388755 - DNA, 1026 bp, Homo Sapiens; identical to SEQ ID NO: 367125

SEQ ID NO: 388756 - DNA, 870 bp, Homo Sapiens; identical to SEQ ID NO: 367135
  misc_feature (409)..(462): n is a, c, g, or t

SEQ ID NO: 388757 - DNA, 671 bp, Homo Sapiens; identical to SEQ ID NO: 367136

SEQ ID NO: 388758 - DNA, 815 bp, Homo Sapiens; identical to SEQ ID NO: 98677

SEQ ID NO: 388759 - DNA, 1160 bp, Homo Sapiens; identical to SEQ ID NO: 367139

SEQ ID NO: 388760 - DNA, 1094 bp, Homo Sapiens; identical to SEQ ID NO: 367140

SEQ ID NO: 388761 - DNA, 963 bp, Homo Sapiens; identical to SEQ ID NO: 367141

SEQ ID NO: 388762 - DNA, 769 bp, Homo Sapiens; identical to SEQ ID NO: 367147
  misc_feature (117)..(117): n is a, c, g, or t

SEQ ID NO: 388763 - DNA, 875 bp, Homo Sapiens; identical to SEQ ID NO: 367148

SEQ ID NO: 388764 - DNA, 830 bp, Homo Sapiens; identical to SEQ ID NO: 367159
  misc_feature (16)..(16): n is a, c, g, or t

SEQ ID NO: 388765 - DNA, 426 bp, Homo Sapiens; identical to SEQ ID NO: 264749

SEQ ID NO: 388766 - DNA, 1212 bp, Homo Sapiens; identical to SEQ ID NO: 367164
  misc_feature (944)..(1067): n is a, c, g, or t

SEQ ID NO: 388767 - DNA, 542 bp, Homo Sapiens; identical to SEQ ID NO: 367165
  misc_feature (399)..(399): n is a, c, g, or t
  misc_feature (498)..(498): n is a, c, g, or t
  misc_feature (503)..(503): n is a, c, g, or t
  misc_feature (508)..(508): n is a, c, g, or t
  misc_feature (515)..(515): n is a, c, g, or t

SEQ ID NO: 388768 - DNA, 1139 bp, Homo Sapiens; identical to SEQ ID NO: 367172

SEQ ID NO: 388769 - DNA, 466 bp, Homo Sapiens; identical to SEQ ID NO: 367173
  misc_feature (349)..(349): n is a, c, g, or t
  misc_feature (446)..(446): n is a, c, g, or t

SEQ ID NO: 388770 - DNA, 1782 bp, Homo Sapiens; identical to SEQ ID NO: 367175
  misc_feature (1189)..(1253): n is a, c, g, or t
  misc_feature (1295)..(1340): n is a, c, g, or t

SEQ ID NO: 388771 - DNA, 735 bp, Homo Sapiens; identical to SEQ ID NO: 367176
  misc_feature (95)..(158): n is a, c, g, or t
  misc_feature (260)..(273): n is a, c, g, or t
  misc_feature (671)..(671): n is a, c, g, or t
  misc_feature (707)..(707): n is a, c, g, or t
  misc_feature (718)..(718): n is a, c, g, or t

SEQ ID NO: 388772 - DNA, 479 bp, Homo Sapiens; identical to SEQ ID NO: 367177
  misc_feature (14)..(14): n is a, c, g, or t
  misc_feature (49)..(49): n is a, c, g, or t
  misc_feature (118)..(118): n is a, c, g, or t

SEQ ID NO: 388773 - DNA, 541 bp, Homo Sapiens; identical to SEQ ID NO: 367178
  misc_feature (454)..(454): n is a, c, g, or t
  misc_feature (531)..(531): n is a, c, g, or t

SEQ ID NO: 388774 - DNA, 970 bp, Homo Sapiens; identical to SEQ ID NO: 367188

SEQ ID NO: 388775 - DNA, 1475 bp, Homo Sapiens; identical to SEQ ID NO: 367189
  misc_feature (873)..(1172): n is a, c, g, or t

SEQ ID NO: 388776 - DNA, 987 bp, Homo Sapiens; identical to SEQ ID NO: 367196
  misc_feature (348)..(430): n is a, c, g, or t

SEQ ID NO: 388777 - DNA, 968 bp, Homo Sapiens; identical to SEQ ID NO: 367197

SEQ ID NO: 388778 - DNA, 1521 bp, Homo Sapiens; identical to SEQ ID NO: 367198
  misc_feature (362)..(444): n is a, c, g, or t

SEQ ID NO: 388779 - DNA, 795 bp, Homo Sapiens; identical to SEQ ID NO: 367199
  misc_feature (542)..(624): n is a, c, g, or t

SEQ ID NO: 388780 - DNA, 1102 bp, Homo Sapiens; identical to SEQ ID NO: 367205

SEQ ID NO: 388781 - DNA, 515 bp, Homo Sapiens; identical to SEQ ID NO: 367206

SEQ ID NO: 388782 - DNA, 1402 bp, Homo Sapiens; identical to SEQ ID NO: 367207
  misc_feature (367)..(385): n is a, c, g, or t

SEQ ID NO: 388783 - DNA, 767 bp, Homo Sapiens; identical to SEQ ID NO: 367208

SEQ ID NO: 388784 - DNA, 456 bp, Homo Sapiens; identical to SEQ ID NO: 367209

SEQ ID NO: 388785 - DNA, 1459 bp, Homo Sapiens; identical to SEQ ID NO: 367220
  misc_feature (31)..(31): n is a, c, g, or t

SEQ ID NO: 388786 - DNA, 893 bp, Homo Sapiens; identical to SEQ ID NO: 367221
  misc_feature (847)..(847): n is a, c, g, or t
  misc_feature (870)..(870): n is a, c, g, or t

SEQ ID NO: 388787 - DNA, 1217 bp, Homo Sapiens; identical to SEQ ID NO: 367222

SEQ ID NO: 388788 - DNA, 1034 bp, Homo Sapiens; identical to SEQ ID NO: 367223

SEQ ID NO: 388789 - DNA, 1301 bp, Homo Sapiens; identical to SEQ ID NO: 367227
  misc_feature (945)..(945): n is a, c, g, or t
  misc_feature (1030)..(1038): n is a, c, g, or t

SEQ ID NO: 388790 - DNA, 433 bp, Homo Sapiens; identical to SEQ ID NO: 367228

SEQ ID NO: 388791 - DNA, 975 bp, Homo Sapiens; identical to SEQ ID NO: 367234
  misc_feature (891)..(891): n is a, c, g, or t

SEQ ID NO: 388792 - DNA, 903 bp, Homo Sapiens; identical to SEQ ID NO: 367235

SEQ ID NO: 388793 - DNA, 1096 bp, Homo Sapiens; identical to SEQ ID NO: 367237
  misc_feature (713)..(741): n is a, c, g, or t
  misc_feature (840)..(848): n is a, c, g, or t

SEQ ID NO: 388794 - DNA, 473 bp, Homo Sapiens; identical to SEQ ID NO: 367238
  misc_feature (23)..(23): n is a, c, g, or t
  misc_feature (30)..(30): n is a, c, g, or t
  misc_feature (115)..(115): n is a, c, g, or t

SEQ ID NO: 388795 - DNA, 497 bp, Homo Sapiens; identical to SEQ ID NO: 367239
  misc_feature (22)..(22): n is a, c, g, or t
  misc_feature (29)..(29): n is a, c, g, or t
  misc_feature (89)..(89): n is a, c, g, or t

SEQ ID NO: 388796 - DNA, 1158 bp, Homo Sapiens; identical to SEQ ID NO: 367246
  misc_feature (21)..(21): n is a, c, g, or t
  misc_feature (31)..(31): n is a, c, g, or t
  misc_feature (63)..(63): n is a, c, g, or t
  misc_feature (74)..(74): n is a, c, g, or t
  misc_feature (81)..(81): n is a, c, g, or t
  misc_feature (93)..(93): n is a, c, g, or t
  misc_feature (540)..(549): n is a, c, g, or t

SEQ ID NO: 388797 - DNA, 1112 bp, Homo Sapiens; identical to SEQ ID NO: 367247
  misc_feature (405)..(522): n is a, c, g, or t
  misc_feature (1087)..(1087): n is a, c, g, or t

SEQ ID NO: 388798 - DNA, 491 bp, Homo Sapiens; identical to SEQ ID NO: 367248
  misc_feature (400)..(400): n is a, c, g, or t
  misc_feature (462)..(462): n is a, c, g, or t
  misc_feature (468)..(468): n is a, c, g, or t

SEQ ID NO: 388799 - DNA, 1166 bp, Homo Sapiens; identical to SEQ ID NO: 367249
  misc_feature (1048)..(1120): n is a, c, g, or t

SEQ ID NO: 388800 - DNA, 902 bp, Homo Sapiens; identical to SEQ ID NO: 367250
  misc_feature (718)..(811): n is a, c, g, or t

SEQ ID NO: 388801 - DNA, 1062 bp, Homo Sapiens; identical to SEQ ID NO: 367252
  misc_feature (697)..(762): n is a, c, g, or t
  misc_feature (765)..(765): n is a, c, g, or t
  misc_feature (767)..(771): n is a, c, g, or t
  misc_feature (774)..(787): n is a, c, g, or t
  misc_feature (1000)..(1011): n is a, c, g, or t

SEQ ID NO: 388802 - DNA, 2079 bp, Homo Sapiens; identical to SEQ ID NO: 367253
  misc_feature (899)..(929): n is a, c, g, or t
  misc_feature (931)..(1187): n is a, c, g, or t
  misc_feature (1723)..(1723): n is a, c, g, or t
  misc_feature (1729)..(1729): n is a, c, g, or t
  misc_feature (1734)..(1734): n is a, c, g, or t

SEQ ID NO: 388803 - DNA, 1738 bp, Homo Sapiens; identical to SEQ ID NO: 367254
  misc_feature (89)..(97): n is a, c, g, or t
  misc_feature (1622)..(1658): n is a, c, g, or t

SEQ ID NO: 388804 - DNA, 1038 bp, Homo Sapiens; identical to SEQ ID NO: 367255
  misc_feature (898)..(959): n is a, c, g, or t

SEQ ID NO: 388805 - DNA, 1353 bp, Homo Sapiens; identical to SEQ ID NO: 367265
  misc_feature (225)..(234): n is a, c, g, or t
  misc_feature (455)..(463): n is a, c, g, or t
  misc_feature (1316)..(1316): n is a, c, g, or t

SEQ ID NO: 388806 - DNA, 434 bp, Homo Sapiens; identical to SEQ ID NO: 367266

SEQ ID NO: 388807 - DNA, 1144 bp, Homo Sapiens; identical to SEQ ID NO: 367267
  misc_feature (104)..(112): n is a, c, g, or t

SEQ ID NO: 388808 - DNA, 1196 bp, Homo Sapiens; identical to SEQ ID NO: 367268
  misc_feature (899)..(899): n is a, c, g, or t
  misc_feature (1056)..(1056): n is a, c, g, or t

SEQ ID NO: 388809 - DNA, 982 bp, Homo Sapiens; identical to SEQ ID NO: 367304

SEQ ID NO: 388810 - DNA, 1168 bp, Homo Sapiens; identical to SEQ ID NO: 367305

SEQ ID NO: 388811 - DNA, 1183 bp, Homo Sapiens; identical to SEQ ID NO: 367306
  misc_feature (1135)..(1143): n is a, c, g, or t

SEQ ID NO: 388812 - DNA, 1144 bp, Homo Sapiens; identical to SEQ ID NO: 367307
  misc_feature (1068)..(1079): n is a, c, g, or t

SEQ ID NO: 388813 - DNA, 530 bp, Homo Sapiens; identical to SEQ ID NO: 367308
  misc_feature (351)..(393): n is a, c, g, or t

SEQ ID NO: 388814 - DNA, 1531 bp, Homo Sapiens; identical to SEQ ID NO: 367309

SEQ ID NO: 388815 - DNA, 704 bp, Homo Sapiens; identical to SEQ ID NO: 367315

SEQ ID NO: 388816 - DNA, 435 bp, Homo Sapiens; identical to SEQ ID NO: 367316
  misc_feature (14)..(14): n is a, c, g, or t
  misc_feature (62)..(62): n is a, c, g, or t

SEQ ID NO: 388817 - DNA, 1094 bp, Homo Sapiens; identical to SEQ ID NO: 367330

SEQ ID NO: 388818 - DNA, 1643 bp, Homo Sapiens; identical to SEQ ID NO: 367331
  misc_feature (518)..(559): n is a, c, g, or t

SEQ ID NO: 388819 - DNA, 864 bp, Homo Sapiens; identical to SEQ ID NO: 264781

SEQ ID NO: 388820 - DNA, 731 bp, Homo Sapiens; identical to SEQ ID NO: 367339

SEQ ID NO: 388821 - DNA, 1482 bp, Homo Sapiens; identical to SEQ ID NO: 367340
  misc_feature (1160)..(1160): n is a, c, g, or t

SEQ ID NO: 388822 - DNA, 2733 bp, Homo Sapiens; identical to SEQ ID NO: 367341
  misc_feature (1735)..(1748): n is a, c, g, or t
  misc_feature (1825)..(1825): n is a, c, g, or t
  misc_feature (2042)..(2042): n is a, c, g, or t
  misc_feature (2089)..(2089): n is a, c, g, or t
  misc_feature (2118)..(2118): n is a, c, g, or t
  misc_feature (2258)..(2258): n is a, c, g, or t
  misc_feature (2283)..(2284): n is a, c, g, or t
  misc_feature (2345)..(2345): n is a, c, g, or t
  misc_feature (2349)..(2349): n is a, c, g, or t
  misc_feature (2351)..(2351): n is a, c, g, or t
  misc_feature (2403)..(2403): n is a, c, g, or t
  misc_feature (2711)..(2711): n is a, c, g, or t

SEQ ID NO: 388823 - DNA, 908 bp, Homo Sapiens; identical to SEQ ID NO: 367342

SEQ ID NO: 388824 - DNA, 1342 bp, Homo Sapiens; identical to SEQ ID NO: 367361

SEQ ID NO: 388825 - DNA, 2411 bp, Homo Sapiens; identical to SEQ ID NO: 367362
  misc_feature (1674)..(1674): n is a, c, g, or t
  misc_feature (1810)..(1810): n is a, c, g, or t
  misc_feature (1812)..(1812): n is a, c, g, or t
  misc_feature (1890)..(1891): n is a, c, g, or t
  misc_feature (1908)..(1908): n is a, c, g, or t
  misc_feature (2356)..(2356): n is a, c, g, or t

SEQ ID NO: 388826 - DNA, 868 bp, Homo Sapiens; identical to SEQ ID NO: 367377

SEQ ID NO: 388827 - DNA, 726 bp, Homo Sapiens; identical to SEQ ID NO: 367378

SEQ ID NO: 388828 - DNA, 832 bp, Homo Sapiens; identical to SEQ ID NO: 367382
  misc_feature (155)..(224): n is a, c, g, or t

SEQ ID NO: 388829 - DNA, 964 bp, Homo Sapiens; identical to SEQ ID NO: 367383
  misc_feature (727)..(804): n is a, c, g, or t

SEQ ID NO: 388830 - DNA, 368 bp, Homo Sapiens; identical to SEQ ID NO: 367384
  misc_feature (128)..(158): n is a, c, g, or t

SEQ ID NO: 388831 - DNA, 1645 bp, Homo Sapiens; identical to SEQ ID NO: 367386

SEQ ID NO: 388832 - DNA, 1080 bp, Homo Sapiens; identical to SEQ ID NO: 367387
  misc_feature (809)..(809): n is a, c, g, or t

SEQ ID NO: 388833 - DNA, 859 bp, Homo Sapiens; identical to SEQ ID NO: 367392

SEQ ID NO: 388834 - DNA, 1030 bp, Homo Sapiens; identical to SEQ ID NO: 367393
  misc_feature (526)..(527): n is a, c, g, or t
  misc_feature (530)..(564): n is a, c, g, or t
  misc_feature (594)..(754): n is a, c, g, or t
  misc_feature (802)..(850): n is a, c, g, or t
  misc_feature (892)..(940): n is a, c, g, or t

SEQ ID NO: 388835 - DNA, 772 bp, Homo Sapiens; identical to SEQ ID NO: 367414

SEQ ID NO: 388836 - DNA, 492 bp, Homo Sapiens; identical to SEQ ID NO: 367415
  misc_feature (400)..(400): n is a, c, g, or t
  misc_feature (455)..(455): n is a, c, g, or t

SEQ ID NO: 388837 - DNA, 1488 bp, Homo Sapiens; identical to SEQ ID NO: 367423
  misc_feature (13)..(13): n is a, c, g, or t

SEQ ID NO: 388838 - DNA, 935 bp, Homo Sapiens; identical to SEQ ID NO: 367424

SEQ ID NO: 388839 - DNA, 1463 bp, Homo Sapiens; identical to SEQ ID NO: 367429
  misc_feature (743)..(745): n is a, c, g, or t
  misc_feature (760)..(760): n is a, c, g, or t
  misc_feature (1062)..(1067): n is a, c, g, or t
  misc_feature (1069)..(1095): n is a, c, g, or t
  misc_feature (1097)..(1110): n is a, c, g, or t
  misc_feature (1113)..(1124): n is a, c, g, or t
  misc_feature (1126)..(1129): n is a, c, g, or t
  misc_feature (1131)..(1141): n is a, c, g, or t
  misc_feature (1143)..(1153): n is a, c, g, or t
  misc_feature (1155)..(1373): n is a, c, g, or t
  misc_feature (1388)..(1388): n is a, c, g, or t
  misc_feature (1391)..(1392): n is a, c, g, or t
  misc_feature (1426)..(1426): n is a, c, g, or t
  misc_feature (1440)..(1440): n is a, c, g, or t

SEQ ID NO: 388840 - DNA, 886 bp, Homo Sapiens; identical to SEQ ID NO: 253391

SEQ ID NO: 388841 - DNA, 2372 bp, Homo Sapiens; identical to SEQ ID NO: 367463

SEQ ID NO: 388842 - DNA, 1116 bp, Homo Sapiens; identical to SEQ ID NO: 367464

SEQ ID NO: 388843 - DNA, 786 bp, Homo Sapiens; identical to SEQ ID NO: 367484
  misc_feature (148)..(252): n is a, c, g, or t

SEQ ID NO: 388844 - DNA, 1180 bp, Homo Sapiens; identical to SEQ ID NO: 367485

SEQ ID NO: 388845 - DNA, 954 bp, Homo Sapiens; identical to SEQ ID NO: 367486

SEQ ID NO: 388846 - DNA, 484 bp, Homo Sapiens; identical to SEQ ID NO: 367487
  misc_feature (35)..(35): n is a, c, g, or t

SEQ ID NO: 388847 - DNA, 1827 bp, Homo Sapiens; identical to SEQ ID NO: 367502
  misc_feature (1652)..(1652): n is a, c, g, or t

SEQ ID NO: 388848 - DNA, 1128 bp, Homo Sapiens; identical to SEQ ID NO: 367503
  misc_feature (98)..(141): n is a, c, g, or t

SEQ ID NO: 388849 - DNA, 937 bp, Homo Sapiens; identical to SEQ ID NO: 98933

SEQ ID NO: 388850 - DNA, 673 bp, Homo Sapiens; identical to SEQ ID NO: 367512

SEQ ID NO: 388851 - DNA, 956 bp, Homo Sapiens; identical to SEQ ID NO: 367516

SEQ ID NO: 388852 - DNA, 1176 bp, Homo Sapiens; identical to SEQ ID NO: 367517
  misc_feature (874)..(912): n is a, c, g, or t
  misc_feature (934)..(944): n is a, c, g, or t

SEQ ID NO: 388853 - DNA, 763 bp, Homo Sapiens; identical to SEQ ID NO: 367520

SEQ ID NO: 388854 - DNA, 1096 bp, Homo Sapiens; identical to SEQ ID NO: 367521
  misc_feature (820)..(820): n is a, c, g, or t
  misc_feature (879)..(879): n is a, c, g, or t
  misc_feature (960)..(986): n is a, c, g, or t
  misc_feature (991)..(999): n is a, c, g, or t

SEQ ID NO: 388855 - DNA, 848 bp, Homo Sapiens; identical to SEQ ID NO: 367532

SEQ ID NO: 388856 - DNA, 930 bp, Homo Sapiens; identical to SEQ ID NO: 367533

SEQ ID NO: 388857 - DNA, 738 bp, Homo Sapiens; identical to SEQ ID NO: 367538

SEQ ID NO: 388858 - DNA, 549 bp, Homo Sapiens; identical to SEQ ID NO: 367539
  misc_feature (17)..(17): n is a, c, g, or t
  misc_feature (477)..(477): n is a, c, g, or t
  misc_feature (491)..(491): n is a, c, g, or t
  misc_feature (497)..(497): n is a, c, g, or t
  misc_feature (535)..(535): n is a, c, g, or t

SEQ ID NO: 388859 - DNA, 288 bp, Homo Sapiens; identical to SEQ ID NO: 367550

SEQ ID NO: 388860 - DNA, 738 bp, Homo Sapiens; identical to SEQ ID NO: 367551
  misc_feature (88)..(88): n is a, c, g, or t
  misc_feature (600)..(613): n is a, c, g, or t

SEQ ID NO: 388861 - DNA, 1014 bp, Homo Sapiens; identical to SEQ ID NO: 367556

SEQ ID NO: 388862 - DNA, 897 bp, Homo Sapiens; identical to SEQ ID NO: 367557
  misc_feature (126)..(180): n is a, c, g, or t

SEQ ID NO: 388863 - DNA, 1084 bp, Homo Sapiens; identical to SEQ ID NO: 367564
  misc_feature (551)..(754): n is a, c, g, or t
  misc_feature (1019)..(1030): n is a, c, g, or t

SEQ ID NO: 388864 - DNA, 874 bp, Homo Sapiens; identical to SEQ ID NO: 367565

SEQ ID NO: 388865 - DNA, 793 bp, Homo Sapiens; identical to SEQ ID NO: 367566

SEQ ID NO: 388866 - DNA, 641 bp, Homo Sapiens; identical to SEQ ID NO: 367567

SEQ ID NO: 388867 - DNA, 738 bp, Homo Sapiens; identical to SEQ ID NO: 367592

SEQ ID NO: 388868 - DNA, 888 bp, Homo Sapiens; identical to SEQ ID NO: 367593

SEQ ID NO: 388869 - DNA, 1174 bp, Homo Sapiens; identical to SEQ ID NO: 367603
  misc_feature (327)..(351): n is a, c, g, or t

SEQ ID NO: 388870 - DNA, 840 bp, Homo Sapiens; identical to SEQ ID NO: 367604

SEQ ID NO: 388871 - DNA, 1035 bp, Homo Sapiens; identical to SEQ ID NO: 367619

SEQ ID NO: 388872 - DNA, 1142 bp, Homo Sapiens; identical to SEQ ID NO: 367620

SEQ ID NO: 388873 - DNA, 825 bp, Homo Sapiens; identical to SEQ ID NO: 367621
  misc_feature (394)..(394): n is a, c, g, or t
  misc_feature (433)..(433): n is a, c, g, or t

SEQ ID NO: 388874 - DNA, 968 bp, Homo Sapiens; identical to SEQ ID NO: 367626

SEQ ID NO: 388875 - DNA, 2558 bp, Homo Sapiens; identical to SEQ ID NO: 367627
  misc_feature (2034)..(2034): n is a, c, g, or t
  misc_feature (2057)..(2057): n is a, c, g, or t
  misc_feature (2108)..(2108): n is a, c, g, or t
  misc_feature (2197)..(2197): n is a, c, g, or t
  misc_feature (2317)..(2317): n is a, c, g, or t
  misc_feature (2320)..(2320): n is a, c, g, or t
  misc_feature (2350)..(2350): n is a, c, g, or t
  misc_feature (2452)..(2452): n is a, c, g, or t
  misc_feature (2517)..(2517): n is a, c, g, or t

SEQ ID NO: 388876 - DNA, 1071 bp, Homo Sapiens; identical to SEQ ID NO: 367633
  misc_feature (849)..(849): n is a, c, g, or t

SEQ ID NO: 388877 - DNA, 1178 bp, Homo Sapiens; identical to SEQ ID NO: 367634

SEQ ID NO: 388878 - DNA, 1941 bp, Homo Sapiens; identical to SEQ ID NO: 367640

SEQ ID NO: 388879 - DNA, 801 bp, Homo Sapiens; identical to SEQ ID NO: 367641

SEQ ID NO: 388880 - DNA, 1079 bp, Homo Sapiens; identical to SEQ ID NO: 367660
  misc_feature (97)..(97): n is a, c, g, or t

SEQ ID NO: 388881 - DNA, 890 bp, Homo Sapiens; identical to SEQ ID NO: 367661
  misc_feature (821)..(821): n is a, c, g, or t
  misc_feature (844)..(844): n is a, c, g, or t
  misc_feature (869)..(869): n is a, c, g, or t

SEQ ID NO: 388882 - DNA, 380 bp, Homo Sapiens; identical to SEQ ID NO: 367662
  misc_feature (21)..(21): n is a, c, g, or t

SEQ ID NO: 388883 - DNA, 975 bp, Homo Sapiens; identical to SEQ ID NO: 367679

SEQ ID NO: 388884 - DNA, 537 bp, Homo Sapiens; identical to SEQ ID NO: 367680

SEQ ID NO: 388885 - DNA, 1461 bp, Homo Sapiens; identical to SEQ ID NO: 367688
  misc_feature (24)..(24): n is a, c, g, or t
  misc_feature (1180)..(1190): n is a, c, g, or t

SEQ ID NO: 388886 - DNA, 768 bp, Homo Sapiens; identical to SEQ ID NO: 367689

SEQ ID NO: 388887 - DNA, 1671 bp, Homo Sapiens; identical to SEQ ID NO: 367690

SEQ ID NO: 388888 - DNA, 1087 bp, Homo Sapiens; identical to SEQ ID NO: 367694

SEQ ID NO: 388889 - DNA, 896 bp, Homo Sapiens; identical to SEQ ID NO: 367695
  misc_feature (53)..(89): n is a, c, g, or t

SEQ ID NO: 388890 - DNA, 876 bp, Homo Sapiens; identical to SEQ ID NO: 367701

SEQ ID NO: 388891 - DNA, 605 bp, Homo Sapiens; identical to SEQ ID NO: 367702

SEQ ID NO: 388892 - DNA, 856 bp, Homo Sapiens; identical to SEQ ID NO: 367707

SEQ ID NO: 388893 - DNA, 1098 bp, Homo Sapiens; identical to SEQ ID NO: 367708

SEQ ID NO: 388894 - DNA, 938 bp, Homo Sapiens; identical to SEQ ID NO: 367709
  misc_feature (785)..(785): n is a, c, g, or t

SEQ ID NO: 388895 - DNA, 1477 bp, Homo Sapiens; identical to SEQ ID NO: 367725
  misc_feature (137)..(185): n is a, c, g, or t
  misc_feature (1256)..(1266): n is a, c, g, or t

SEQ ID NO: 388896 - DNA, 1064 bp, Homo Sapiens; identical to SEQ ID NO: 367726

SEQ ID NO: 388897 - DNA, 1178 bp, Homo Sapiens; identical to SEQ ID NO: 367732
  misc_feature (496)..(562): n is a, c, g, or t
  misc_feature (609)..(618): n is a, c, g, or t
  misc_feature (858)..(868): n is a, c, g, or t

SEQ ID NO: 388898 - DNA, 533 bp, Homo Sapiens; identical to SEQ ID NO: 367733

SEQ ID NO: 388899 - DNA, 1327 bp, Homo Sapiens; identical to SEQ ID NO: 367743
  misc_feature (131)..(131): n is a, c, g, or t
  misc_feature (433)..(489): n is a, c, g, or t

SEQ ID NO: 388900 - DNA, 1045 bp, Homo Sapiens; identical to SEQ ID NO: 367744
  misc_feature (790)..(872): n is a, c, g, or t

SEQ ID NO: 388901 - DNA, 1628 bp, Homo Sapiens; identical to SEQ ID NO: 367757
  misc_feature (1388)..(1388): n is a, c, g, or t

SEQ ID NO: 388902 - DNA, 500 bp, Homo Sapiens; identical to SEQ ID NO: 367758
  misc_feature (270)..(309): n is a, c, g, or t
  misc_feature (481)..(481): n is a, c, g, or t

SEQ ID NO: 388903 - DNA, 901 bp, Homo Sapiens; identical to SEQ ID NO: 367760

SEQ ID NO: 388904 - DNA, 700 bp, Homo Sapiens; identical to SEQ ID NO: 367761

SEQ ID NO: 388905 - DNA, 1029 bp, Homo Sapiens; identical to SEQ ID NO: 367767
  misc_feature (943)..(951): n is a, c, g, or t

SEQ ID NO: 388906 - DNA, 971 bp, Homo Sapiens; identical to SEQ ID NO: 367768

SEQ ID NO: 388907 - DNA, 1697 bp, Homo Sapiens; identical to SEQ ID NO: 367780
  misc_feature (366)..(416): n is a, c, g, or t
  misc_feature (550)..(645): n is a, c, g, or t

SEQ ID NO: 388908 - DNA, 1238 bp, Homo Sapiens; identical to SEQ ID NO: 367781
  misc_feature (74)..(191): n is a, c, g, or t
  misc_feature (902)..(954): n is a, c, g, or t
  misc_feature (1123)..(1172): n is a, c, g, or t

SEQ ID NO: 388909 - DNA, 462 bp, Homo Sapiens; identical to SEQ ID NO: 367782
  misc_feature (78)..(78): n is a, c, g, or t
  misc_feature (81)..(81): n is a, c, g, or t
  misc_feature (137)..(137): n is a, c, g, or t
  misc_feature (382)..(382): n is a, c, g, or t
  misc_feature (414)..(414): n is a, c, g, or t
  misc_feature (423)..(423): n is a, c, g, or t
  misc_feature (428)..(428): n is a, c, g, or t
  misc_feature (445)..(445): n is a, c, g, or t

SEQ ID NO: 388910 - DNA, 738 bp, Homo Sapiens; identical to SEQ ID NO: 367790

SEQ ID NO: 388911 - DNA, 1002 bp, Homo Sapiens; identical to SEQ ID NO: 367791

SEQ ID NO: 388912 - DNA, 806 bp, Homo Sapiens; identical to SEQ ID NO: 367793

SEQ ID NO: 388913 - DNA, 988 bp, Homo Sapiens; identical to SEQ ID NO: 367794

SEQ ID NO: 388914 - DNA, 972 bp, Homo Sapiens; identical to SEQ ID NO: 367800

SEQ ID NO: 388915 - DNA, 1047 bp, Homo Sapiens; identical to SEQ ID NO: 367801
  misc_feature (1006)..(1006): n is a, c, g, or t

SEQ ID NO: 388916 - DNA, 866 bp, Homo Sapiens; identical to SEQ ID NO: 367820
  misc_feature (852)..(852): n is a, c, g, or t

SEQ ID NO: 388917 - DNA, 558 bp, Homo Sapiens; identical to SEQ ID NO: 367821
  misc_feature (11)..(11): n is a, c, g, or t
  misc_feature (34)..(34): n is a, c, g, or t
  misc_feature (43)..(43): n is a, c, g, or t
  misc_feature (50)..(50): n is a, c, g, or t
  misc_feature (69)..(69): n is a, c, g, or t
  misc_feature (89)..(89): n is a, c, g, or t
  misc_feature (110)..(110): n is a, c, g, or t

SEQ ID NO: 388918 - DNA, 829 bp, Homo Sapiens; identical to SEQ ID NO: 367833

SEQ ID NO: 388919 - DNA, 1184 bp, Homo Sapiens; identical to SEQ ID NO: 367834

SEQ ID NO: 388920 - DNA, 679 bp, Homo Sapiens; identical to SEQ ID NO: 367835

SEQ ID NO: 388921 - DNA, 849 bp, Homo Sapiens; identical to SEQ ID NO: 367836

SEQ ID NO: 388922 - DNA, 671 bp, Homo Sapiens; identical to SEQ ID NO: 367838

SEQ ID NO: 388923 - DNA, 427 bp, Homo Sapiens; identical to SEQ ID NO: 367839

SEQ ID NO: 388924 - DNA, 829 bp, Homo Sapiens; identical to SEQ ID NO: 367841

SEQ ID NO: 388925 - DNA, 1038 bp, Homo Sapiens; identical to SEQ ID NO: 367842

SEQ ID NO: 388926 - DNA, 904 bp, Homo Sapiens; identical to SEQ ID NO: 367846

SEQ ID NO: 388927 - DNA, 1737 bp, Homo Sapiens; identical to SEQ ID NO: 367847
  misc_feature (1122)..(1122): n is a, c, g, or t

SEQ ID NO: 388928 - DNA, 791 bp, Homo Sapiens; identical to SEQ ID NO: 367849

SEQ ID NO: 388929 - DNA, 857 bp, Homo Sapiens; identical to SEQ ID NO: 367850

SEQ ID NO: 388930 - DNA, 1249 bp, Homo Sapiens; identical to SEQ ID NO: 367867

SEQ ID NO: 388931 - DNA, 1401 bp, Homo Sapiens; identical to SEQ ID NO: 367868

SEQ ID NO: 388932 - DNA, 833 bp, Homo Sapiens; identical to SEQ ID NO: 367869

SEQ ID NO: 388933 - DNA, 1097 bp, Homo Sapiens; identical to SEQ ID NO: 367870
  misc_feature (24)..(24): n is a, c, g, or t

SEQ ID NO: 388934 - DNA, 1016 bp, Homo Sapiens; identical to SEQ ID NO: 367871
  misc_feature (991)..(991): n is a, c, g, or t

SEQ ID NO: 388935 - DNA, 889 bp, Homo Sapiens; identical to SEQ ID NO: 367872
  misc_feature (763)..(763): n is a, c, g, or t

SEQ ID NO: 388936 - DNA, 1114 bp, Homo Sapiens; identical to SEQ ID NO: 367877

SEQ ID NO: 388937 - DNA, 1061 bp, Homo Sapiens; identical to SEQ ID NO: 367878

SEQ ID NO: 388938 - DNA, 1942 bp, Homo Sapiens; identical to SEQ ID NO: 367894

SEQ ID NO: 388939 - DNA, 1195 bp, Homo Sapiens; identical to SEQ ID NO: 367895
  misc_feature (789)..(852): n is a, c, g, or t

SEQ ID NO: 388940 - DNA, 1053 bp, Homo Sapiens; identical to SEQ ID NO: 367896
  misc_feature (737)..(800): n is a, c, g, or t
  misc_feature (953)..(953): n is a, c, g, or t

SEQ ID NO: 388941 - DNA, 1024 bp, Homo Sapiens; identical to SEQ ID NO: 367897
  misc_feature (705)..(762): n is a, c, g, or t
  misc_feature (909)..(909): n is a, c, g, or t
  misc_feature (934)..(934): n is a, c, g, or t
  misc_feature (996)..(996): n is a, c, g, or t

SEQ ID NO: 388942 - DNA, 1651 bp, Homo Sapiens; identical to SEQ ID NO: 367938

SEQ ID NO: 388943 - DNA, 1085 bp, Homo Sapiens; identical to SEQ ID NO: 367939
  misc_feature (953)..(961): n is a, c, g, or t

SEQ ID NO: 388944 - DNA, 1118 bp, Homo Sapiens; identical to SEQ ID NO: 367940

SEQ ID NO: 388945 - DNA, 1137 bp, Homo Sapiens; identical to SEQ ID NO: 367941
  misc_feature (860)..(870): n is a, c, g, or t

SEQ ID NO: 388946 - DNA, 781 bp, Homo Sapiens; identical to SEQ ID NO: 367955

SEQ ID NO: 388947 - DNA, 784 bp, Homo Sapiens; identical to SEQ ID NO: 367956

SEQ ID NO: 388948 - DNA, 1057 bp, Homo Sapiens; identical to SEQ ID NO: 367960

SEQ ID NO: 388949 - DNA, 790 bp, Homo Sapiens; identical to SEQ ID NO: 367961

SEQ ID NO: 388950 - DNA, 974 bp, Homo Sapiens; identical to SEQ ID NO: 367966

SEQ ID NO: 388951 - DNA, 535 bp, Homo Sapiens; identical to SEQ ID NO: 367967

SEQ ID NO: 388952 - DNA, 776 bp, Homo Sapiens; identical to SEQ ID NO: 367972

SEQ ID NO: 388953 - DNA, 1490 bp, Homo Sapiens; identical to SEQ ID NO: 367973
  misc_feature (844)..(844): n is a, c, g, or t

SEQ ID NO: 388954 - DNA, 968 bp, Homo Sapiens; identical to SEQ ID NO: 367979

SEQ ID NO: 388955 - DNA, 1695 bp, Homo Sapiens; identical to SEQ ID NO: 367980
  misc_feature (21)..(21): n is a, c, g, or t
  misc_feature (629)..(629): n is a, c, g, or t

SEQ ID NO: 388956 - DNA, 2089 bp, Homo Sapiens; identical to SEQ ID NO: 367991

SEQ ID NO: 388957 - DNA, 1145 bp, Homo Sapiens; identical to SEQ ID NO: 367992

SEQ ID NO: 388958 - DNA, 1485 bp, Homo Sapiens; identical to SEQ ID NO: 367993
  misc_feature (62)..(118): n is a, c, g, or t
  misc_feature (127)..(127): n is a, c, g, or t
  misc_feature (131)..(131): n is a, c, g, or t
  misc_feature (161)..(169): n is a, c, g, or t
  misc_feature (293)..(302): n is a, c, g, or t
  misc_feature (325)..(325): n is a, c, g, or t
  misc_feature (350)..(364): n is a, c, g, or t
  misc_feature (619)..(651): n is a, c, g, or t

SEQ ID NO: 388959 - DNA, 842 bp, Homo Sapiens; identical to SEQ ID NO: 367994

SEQ ID NO: 388960 - DNA, 981 bp, Homo Sapiens; identical to SEQ ID NO: 367995

SEQ ID NO: 388961 - DNA, 1231 bp, Homo Sapiens; identical to SEQ ID NO: 367996
  misc_feature (85)..(123): n is a, c, g, or t

SEQ ID NO: 388962 - DNA, 1068 bp, Homo Sapiens; identical to SEQ ID NO: 368000
  misc_feature (118)..(130): n is a, c, g, or t
  misc_feature (846)..(963): n is a, c, g, or t
  misc_feature (981)..(981): n is a, c, g, or t
  misc_feature (988)..(990): n is a, c, g, or t
  misc_feature (993)..(993): n is a, c, g, or t
  misc_feature (1024)..(1024): n is a, c, g, or t

SEQ ID NO: 388963 - DNA, 1186 bp, Homo Sapiens; identical to SEQ ID NO: 368001
  misc_feature (144)..(157): n is a, c, g, or t
  misc_feature (925)..(925): n is a, c, g, or t

SEQ ID NO: 388964 - DNA, 1092 bp, Homo Sapiens; identical to SEQ ID NO: 368007

SEQ ID NO: 388965 - DNA, 1037 bp, Homo Sapiens; identical to SEQ ID NO: 368008

SEQ ID NO: 388966 - DNA, 1068 bp, Homo Sapiens; identical to SEQ ID NO: 368009
  misc_feature (971)..(971): n is a, c, g, or t

SEQ ID NO: 388967 - DNA, 736 bp, Homo Sapiens; identical to SEQ ID NO: 368010

SEQ ID NO: 388968 - DNA, 1906 bp, Homo Sapiens; identical to SEQ ID NO: 368011
  misc_feature (1359)..(1377): n is a, c, g, or t
  misc_feature (1379)..(1383): n is a, c, g, or t
  misc_feature (1385)..(1427): n is a, c, g, or t
  misc_feature (1801)..(1820): n is a, c, g, or t

SEQ ID NO: 388969 - DNA, 1073 bp, Homo Sapiens; identical to SEQ ID NO: 368012

SEQ ID NO: 388970 - DNA, 730 bp, Homo Sapiens; identical to SEQ ID NO: 368017

SEQ ID NO: 388971 - DNA, 961 bp, Homo Sapiens; identical to SEQ ID NO: 368018
  misc_feature (49)..(85): n is a, c, g, or t

SEQ ID NO: 388972 - DNA, 1307 bp, Homo Sapiens; identical to SEQ ID NO: 368029
  misc_feature (1158)..(1158): n is a, c, g, or t
  misc_feature (1226)..(1236): n is a, c, g, or t

SEQ ID NO: 388973 - DNA, 1051 bp, Homo Sapiens; identical to SEQ ID NO: 368030

SEQ ID NO: 388974 - DNA, 822 bp, Homo Sapiens; identical to SEQ ID NO: 368031

SEQ ID NO: 388975 - DNA, 876 bp, Homo Sapiens; identical to SEQ ID NO: 368036

SEQ ID NO: 388976 - DNA, 1104 bp, Homo Sapiens; identical to SEQ ID NO: 368037

SEQ ID NO: 388977 - DNA, 896 bp, Homo Sapiens; identical to SEQ ID NO: 368040

SEQ ID NO: 388978 - DNA, 758 bp, Homo Sapiens; identical to SEQ ID NO: 368041

SEQ ID NO: 388979 - DNA, 734 bp, Homo Sapiens; identical to SEQ ID NO: 368042

SEQ ID NO: 388980 - DNA, 972 bp, Homo Sapiens; identical to SEQ ID NO: 368043

SEQ ID NO: 388981 - DNA, 867 bp, Homo Sapiens; identical to SEQ ID NO: 368046

SEQ ID NO: 388982 - DNA, 768 bp, Homo Sapiens; identical to SEQ ID NO: 368047

SEQ ID NO: 388983 - DNA, 772 bp, Homo Sapiens; identical to SEQ ID NO: 368054

SEQ ID NO: 388984 - DNA, 1261 bp, Homo Sapiens; identical to SEQ ID NO: 368055

SEQ ID NO: 388985 - DNA, 859 bp, Homo Sapiens; identical to SEQ ID NO: 368066

SEQ ID NO: 388986 - DNA, 860 bp, Homo Sapiens; identical to SEQ ID NO: 368067

SEQ ID NO: 388987 - DNA, 1069 bp, Homo Sapiens; identical to SEQ ID NO: 368069
  misc_feature (719)..(727): n is a, c, g, or t
  misc_feature (978)..(978): n is a, c, g, or t
  misc_feature (983)..(983): n is a, c, g, or t
  misc_feature (1042)..(1042): n is a, c, g, or t

SEQ ID NO: 388988 - DNA, 1056 bp, Homo Sapiens; identical to SEQ ID NO: 368070

SEQ ID NO: 388989 - DNA, 1087 bp, Homo Sapiens; identical to SEQ ID NO: 368071

SEQ ID NO: 388990 - DNA, 1127 bp, Homo Sapiens; identical to SEQ ID NO: 368081

SEQ ID NO: 388991 - DNA, 863 bp, Homo Sapiens; identical to SEQ ID NO: 368082
  misc_feature (683)..(732): n is a, c, g, or t

SEQ ID NO: 388992 - DNA, 743 bp, Homo Sapiens; identical to SEQ ID NO: 368083
  misc_feature (20)..(20): n is a, c, g, or t
  misc_feature (23)..(23): n is a, c, g, or t

SEQ ID NO: 388993 - DNA, 839 bp, Homo Sapiens; identical to SEQ ID NO: 368089

SEQ ID NO: 388994 - DNA, 695 bp, Homo Sapiens; identical to SEQ ID NO: 368090

SEQ ID NO: 388995 - DNA, 510 bp, Homo Sapiens; identical to SEQ ID NO: 368107

SEQ ID NO: 388996 - DNA, 850 bp, Homo Sapiens; identical to SEQ ID NO: 368108
  misc_feature (800)..(808): n is a, c, g, or t

SEQ ID NO: 388997 - DNA, 732 bp, Homo Sapiens; identical to SEQ ID NO: 368109
  misc_feature (614)..(676): n is a, c, g, or t

SEQ ID NO: 388998 - DNA, 998 bp, Homo Sapiens; identical to SEQ ID NO: 368124

SEQ ID NO: 388999 - DNA, 1004 bp, Homo Sapiens; identical to SEQ ID NO: 368125

SEQ ID NO: 389000 - DNA, 826 bp, Homo Sapiens; identical to SEQ ID NO: 368130

SEQ ID NO: 389001 - DNA, 1210 bp, Homo Sapiens; identical to SEQ ID NO: 368131
  misc_feature (320)..(320): n is a, c, g, or t

SEQ ID NO: 389002 - DNA, 1111 bp, Homo Sapiens; identical to SEQ ID NO: 368149
  misc_feature (982)..(982): n is a, c, g, or t
  misc_feature (985)..(985): n is a, c, g, or t

SEQ ID NO: 389003 - DNA, 810 bp, Homo Sapiens; identical to SEQ ID NO: 368150

SEQ ID NO: 389004 - DNA, 699 bp, Homo Sapiens; identical to SEQ ID NO: 368173
  misc_feature (643)..(654): n is a, c, g, or t

SEQ ID NO: 389005 - DNA, 692 bp, Homo Sapiens; identical to SEQ ID NO: 368174

SEQ ID NO: 389006 - DNA, 1265 bp, Homo Sapiens; identical to SEQ ID NO: 368183
  misc_feature (1242)..(1242): n is a, c, g, or t

SEQ ID NO: 389007 - DNA, 817 bp, Homo Sapiens; identical to SEQ ID NO: 368184

SEQ ID NO: 389008 - DNA, 1496 bp, Homo Sapiens; identical to SEQ ID NO: 368199
  misc_feature (1200)..(1241): n is a, c, g, or t
  misc_feature (1342)..(1342): n is a, c, g, or t

SEQ ID NO: 389009 - DNA, 432 bp, Homo Sapiens; identical to SEQ ID NO: 368200

SEQ ID NO: 389010 - DNA, 785 bp, Homo Sapiens; identical to SEQ ID NO: 368205

SEQ ID NO: 389011 - DNA, 760 bp, Homo Sapiens; identical to SEQ ID NO: 368206

SEQ ID NO: 389012 - DNA, 835 bp, Homo Sapiens; identical to SEQ ID NO: 368245

SEQ ID NO: 389013 - DNA, 211 bp, Homo Sapiens; identical to SEQ ID NO: 368246

SEQ ID NO: 389014 - DNA, 1039 bp, Homo Sapiens; identical to SEQ ID NO: 368272

SEQ ID NO: 389015 - DNA, 1739 bp, Homo Sapiens; identical to SEQ ID NO: 368273
  misc_feature (956)..(1017): n is a, c, g, or t
  misc_feature (1101)..(1122): n is a, c, g, or t
  misc_feature (1144)..(1152): n is a, c, g, or t
  misc_feature (1499)..(1499): n is a, c, g, or t
  misc_feature (1501)..(1501): n is a, c, g, or t
  misc_feature (1623)..(1623): n is a, c, g, or t

SEQ ID NO: 389016 - DNA, 1616 bp, Homo Sapiens; identical to SEQ ID NO: 368277
  misc_feature (46)..(46): n is a, c, g, or t
  misc_feature (594)..(602): n is a, c, g, or t
  misc_feature (1053)..(1073): n is a, c, g, or t

SEQ ID NO: 389017 - DNA, 1096 bp, Homo Sapiens; identical to SEQ ID NO: 368278
  misc_feature (312)..(320): n is a, c, g, or t
  misc_feature (880)..(880): n is a, c, g, or t

SEQ ID NO: 389018 - DNA, 1103 bp, Homo Sapiens; identical to SEQ ID NO: 368283
  misc_feature (902)..(910): n is a, c, g, or t

SEQ ID NO: 389019 - DNA, 848 bp, Homo Sapiens; identical to SEQ ID NO: 368284

SEQ ID NO: 389020 - DNA, 1776 bp, Homo Sapiens; identical to SEQ ID NO: 368287
  misc_feature (1369)..(1413): n is a, c, g, or t
  misc_feature (1716)..(1729): n is a, c, g, or t

SEQ ID NO: 389021 - DNA, 267 bp, Homo Sapiens; identical to SEQ ID NO: 368288

SEQ ID NO: 389022 - DNA, 1558 bp, Homo Sapiens; identical to SEQ ID NO: 368320
  misc_feature (847)..(847): n is a, c, g, or t

SEQ ID NO: 389023 - DNA, 1091 bp, Homo Sapiens; identical to SEQ ID NO: 368321

SEQ ID NO: 389024 - DNA, 784 bp, Homo Sapiens; identical to SEQ ID NO: 368323

SEQ ID NO: 389025 - DNA, 991 bp, Homo Sapiens; identical to SEQ ID NO: 368324
  misc_feature (924)..(924): n is a, c, g, or t

SEQ ID NO: 389026 - DNA, 837 bp, Homo Sapiens; identical to SEQ ID NO: 368348

SEQ ID NO: 389027 - DNA, 1131 bp, Homo Sapiens; identical to SEQ ID NO: 368349

SEQ ID NO: 389028 - DNA, 1415 bp, Homo Sapiens; identical to SEQ ID NO: 368353

SEQ ID NO: 389029 - DNA, 469 bp, Homo Sapiens; identical to SEQ ID NO: 368354
  misc_feature (406)..(406): n is a, c, g, or t

SEQ ID NO: 389030 - DNA, 384 bp, Homo Sapiens; identical to SEQ ID NO: 368359

SEQ ID NO: 389031 - DNA, 733 bp, Homo Sapiens; identical to SEQ ID NO: 368360

SEQ ID NO: 389032 - DNA, 1404 bp, Homo Sapiens; identical to SEQ ID NO: 368362
  misc_feature (979)..(979): n is a, c, g, or t

SEQ ID NO: 389033 - DNA, 931 bp, Homo Sapiens; identical to SEQ ID NO: 368363
  misc_feature (70)..(106): n is a, c, g, or t
  misc_feature (700)..(700): n is a, c, g, or t

SEQ ID NO: 389034 - DNA, 1314 bp, Homo Sapiens; identical to SEQ ID NO: 368367

SEQ ID NO: 389035 - DNA, 1481 bp, Homo Sapiens; identical to SEQ ID NO: 368368
  misc_feature (116)..(124): n is a, c, g, or t

SEQ ID NO: 389036 - DNA, 720 bp, Homo Sapiens; identical to SEQ ID NO: 368375

SEQ ID NO: 389037 - DNA, 1813 bp, Homo Sapiens; identical to SEQ ID NO: 368376
  misc_feature (1440)..(1493): n is a, c, g, or t

SEQ ID NO: 389038 - DNA, 786 bp, Homo Sapiens; identical to SEQ ID NO: 368377
  misc_feature (593)..(609): n is a, c, g, or t
  misc_feature (699)..(710): n is a, c, g, or t

SEQ ID NO: 389039 - DNA, 896 bp, Homo Sapiens; identical to SEQ ID NO: 368386
  misc_feature (685)..(726): n is a, c, g, or t

SEQ ID NO: 389040 - DNA, 749 bp, Homo Sapiens; identical to SEQ ID NO: 368387

SEQ ID NO: 389041 - DNA, 1187 bp, Homo Sapiens; identical to SEQ ID NO: 368388
  misc_feature (69)..(160): n is a, c, g, or t
  misc_feature (1012)..(1012): n is a, c, g, or t

SEQ ID NO: 389042 - DNA, 1004 bp, Homo Sapiens; identical to SEQ ID NO: 368389

SEQ ID NO: 389043 - DNA, 1169 bp, Homo Sapiens; identical to SEQ ID NO: 368394

SEQ ID NO: 389044 - DNA, 730 bp, Homo Sapiens; identical to SEQ ID NO: 368395

SEQ ID NO: 389045 - DNA, 1054 bp, Homo Sapiens; identical to SEQ ID NO: 368449

SEQ ID NO: 389046 - DNA, 451 bp, Homo Sapiens; identical to SEQ ID NO: 368450
  misc_feature (403)..(403): n is a, c, g, or t

SEQ ID NO: 389047 - DNA, 707 bp, Homo Sapiens; identical to SEQ ID NO: 368469

SEQ ID NO: 389048 - DNA, 771 bp, Homo Sapiens; identical to SEQ ID NO: 368470

SEQ ID NO: 389049 - DNA, 703 bp, Homo Sapiens; identical to SEQ ID NO: 368476

SEQ ID NO: 389050 - DNA, 398 bp, Homo Sapiens; identical to SEQ ID NO: 368477

SEQ ID NO: 389051 - DNA, 1035 bp, Homo Sapiens; identical to SEQ ID NO: 368540

SEQ ID NO: 389052 - DNA, 462 bp, Homo Sapiens; identical to SEQ ID NO: 368541
  misc_feature (119)..(119): n is a, c, g, or t
  misc_feature (123)..(123): n is a, c, g, or t

SEQ ID NO: 389053 - DNA, 1179 bp, Homo Sapiens; identical to SEQ ID NO: 368555

SEQ ID NO: 389054 - DNA, 754 bp, Homo Sapiens; identical to SEQ ID NO: 368556

SEQ ID NO: 389055 - DNA, 1008 bp, Homo Sapiens; identical to SEQ ID NO: 368569

SEQ ID NO: 389056 - DNA, 480 bp, Homo Sapiens; identical to SEQ ID NO: 368570
  misc_feature (41)..(41): n is a, c, g, or t
  misc_feature (58)..(58): n is a, c, g, or t

SEQ ID NO: 389057 - DNA, 843 bp, Homo Sapiens; identical to SEQ ID NO: 368571

SEQ ID NO: 389058 - DNA, 420 bp, Homo Sapiens; identical to SEQ ID NO: 368572
  misc_feature (361)..(362): n is a, c, g, or t
  misc_feature (387)..(387): n is a, c, g, or t

SEQ ID NO: 389059 - DNA, 815 bp, Homo Sapiens; identical to SEQ ID NO: 368574

SEQ ID NO: 389060 - DNA, 1393 bp, Homo Sapiens; identical to SEQ ID NO: 368575
  misc_feature (1332)..(1332): n is a, c, g, or t

SEQ ID NO: 389061 - DNA, 863 bp, Homo Sapiens; identical to SEQ ID NO: 368576

SEQ ID NO: 389062 - DNA, 987 bp, Homo Sapiens; identical to SEQ ID NO: 368577

SEQ ID NO: 389063 - DNA, 1353 bp, Homo Sapiens; identical to SEQ ID NO: 368586
  misc_feature (1119)..(1147): n is a, c, g, or t
  misc_feature (1266)..(1302): n is a, c, g, or t

SEQ ID NO: 389064 - DNA, 2022 bp, Homo Sapiens; identical to SEQ ID NO: 368587

SEQ ID NO: 389065 - DNA, 1155 bp, Homo Sapiens; identical to SEQ ID NO: 368602
  misc_feature (716)..(716): n is a, c, g, or t
  misc_feature (1082)..(1109): n is a, c, g, or t

SEQ ID NO: 389066 - DNA, 582 bp, Homo Sapiens; identical to SEQ ID NO: 368603
  misc_feature (494)..(494): n is a, c, g, or t

SEQ ID NO: 389067 - DNA, 674 bp, Homo Sapiens; identical to SEQ ID NO: 368612
  misc_feature (361)..(379): n is a, c, g, or t

SEQ ID NO: 389068 - DNA, 475 bp, Homo Sapiens; identical to SEQ ID NO: 368613
  misc_feature (23)..(23): n is a, c, g, or t
  misc_feature (40)..(40): n is a, c, g, or t
  misc_feature (413)..(430): n is a, c, g, or t

SEQ ID NO: 389069 - DNA, 650 bp, Homo Sapiens; identical to SEQ ID NO: 368630
  misc_feature (345)..(367): n is a, c, g, or t

SEQ ID NO: 389070 - DNA, 631 bp, Homo Sapiens; identical to SEQ ID NO: 368631
  misc_feature (13)..(13): n is a, c, g, or t
  misc_feature (33)..(33): n is a, c, g, or t
  misc_feature (79)..(79): n is a, c, g, or t
  misc_feature (106)..(106): n is a, c, g, or t

SEQ ID NO: 389071 - DNA, 786 bp, Homo Sapiens; identical to SEQ ID NO: 368641
  misc_feature (397)..(397): n is a, c, g, or t

SEQ ID NO: 389072 - DNA, 1048 bp, Homo Sapiens; identical to SEQ ID NO: 368642
  misc_feature (915)..(915): n is a, c, g, or t

SEQ ID NO: 389073 - DNA, 695 bp, Homo Sapiens; identical to SEQ ID NO: 368665

SEQ ID NO: 389074 - DNA, 1118 bp, Homo Sapiens; identical to SEQ ID NO: 368666

SEQ ID NO: 389075 - DNA, 1273 bp, Homo Sapiens; identical to SEQ ID NO: 368674
  misc_feature (669)..(679): n is a, c, g, or t
  misc_feature (776)..(776): n is a, c, g, or t
  misc_feature (1071)..(1071): n is a, c, g, or t
  misc_feature (1081)..(1081): n is a, c, g, or t
  misc_feature (1120)..(1120): n is a, c, g, or t

SEQ ID NO: 389076 - DNA, 506 bp, Homo Sapiens; identical to SEQ ID NO: 368675
  misc_feature (229)..(229): n is a, c, g, or t

SEQ ID NO: 389077 - DNA, 1300 bp, Homo Sapiens; identical to SEQ ID NO: 368680
  misc_feature (181)..(215): n is a, c, g, or t
  misc_feature (335)..(344): n is a, c, g, or t
  misc_feature (477)..(477): n is a, c, g, or t
  misc_feature (1205)..(1217): n is a, c, g, or t

SEQ ID NO: 389078 - DNA, 784 bp, Homo Sapiens; identical to SEQ ID NO: 368681
  misc_feature (383)..(383): n is a, c, g, or t
  misc_feature (452)..(452): n is a, c, g, or t
  misc_feature (465)..(465): n is a, c, g, or t
  misc_feature (631)..(665): n is a, c, g, or t

SEQ ID NO: 389079 - DNA, 925 bp, Homo Sapiens; identical to SEQ ID NO: 368683
  misc_feature (426)..(539): n is a, c, g, or t
  misc_feature (843)..(843): n is a, c, g, or t
  misc_feature (861)..(861): n is a, c, g, or t
  misc_feature (877)..(877): n is a, c, g, or t
  misc_feature (886)..(886): n is a, c, g, or t
  misc_feature (895)..(895): n is a, c, g, or t

SEQ ID NO: 389080 - DNA, 822 bp, Homo Sapiens; identical to SEQ ID NO: 368684

SEQ ID NO: 389081 - DNA, 829 bp, Homo Sapiens; identical to SEQ ID NO: 368686
  misc_feature (254)..(278): n is a, c, g, or t

SEQ ID NO: 389082 - DNA, 1067 bp, Homo Sapiens; identical to SEQ ID NO: 368687
  misc_feature (210)..(235): n is a, c, g, or t
  misc_feature (639)..(664): n is a, c, g, or t
  misc_feature (902)..(902): n is a, c, g, or t
  misc_feature (1052)..(1052): n is a, c, g, or t

SEQ ID NO: 389083 - DNA, 1144 bp, Homo Sapiens; identical to SEQ ID NO: 368719

SEQ ID NO: 389084 - DNA, 547 bp, Homo Sapiens; identical to SEQ ID NO: 368720
  misc_feature (429)..(429): n is a, c, g, or t
  misc_feature (435)..(435): n is a, c, g, or t
  misc_feature (448)..(448): n is a, c, g, or t
  misc_feature (478)..(478): n is a, c, g, or t
  misc_feature (486)..(486): n is a, c, g, or t
  misc_feature (494)..(494): n is a, c, g, or t
  misc_feature (531)..(531): n is a, c, g, or t

SEQ ID NO: 389085 - DNA, 1337 bp, Homo Sapiens; identical to SEQ ID NO: 368724
  misc_feature (1148)..(1148): n is a, c, g, or t

SEQ ID NO: 389086 - DNA, 189 bp, Homo Sapiens; identical to SEQ ID NO: 368725

SEQ ID NO: 389087 - DNA, 1653 bp, Homo Sapiens; identical to SEQ ID NO: 368737
  misc_feature (467)..(494): n is a, c, g, or t
  misc_feature (1243)..(1243): n is a, c, g, or t

SEQ ID NO: 389088 - DNA, 461 bp, Homo Sapiens; identical to SEQ ID NO: 368738
  misc_feature (435)..(435): n is a, c, g, or t

SEQ ID NO: 389089 - DNA, 1144 bp, Homo Sapiens; identical to SEQ ID NO: 368766

SEQ ID NO: 389090 - DNA, 276 bp, Homo Sapiens; identical to SEQ ID NO: 368767

SEQ ID NO: 389091 - DNA, 1098 bp, Homo Sapiens; identical to SEQ ID NO: 368774
  misc_feature (951)..(999): n is a, c, g, or t

SEQ ID NO: 389092 - DNA, 553 bp, Homo Sapiens; identical to SEQ ID NO: 368775

SEQ ID NO: 389093 - DNA, 713 bp, Homo Sapiens; identical to SEQ ID NO: 368787
  misc_feature (106)..(163): n is a, c, g, or t
  misc_feature (176)..(264): n is a, c, g, or t

SEQ ID NO: 389094 - DNA, 1214 bp, Homo Sapiens; identical to SEQ ID NO: 368788
  misc_feature (74)..(74): n is a, c, g, or t
  misc_feature (207)..(295): n is a, c, g, or t
  misc_feature (308)..(331): n is a, c, g, or t

SEQ ID NO: 389095 - DNA, 865 bp, Homo Sapiens; identical to SEQ ID NO: 368789
  misc_feature (317)..(340): n is a, c, g, or t
  misc_feature (353)..(441): n is a, c, g, or t

SEQ ID NO: 389096 - DNA, 380 bp, Homo Sapiens; identical to SEQ ID NO: 368799

SEQ ID NO: 389097 - DNA, 1255 bp, Homo Sapiens; identical to SEQ ID NO: 368800
  misc_feature (685)..(693): n is a, c, g, or t

SEQ ID NO: 389098 - DNA, 1111 bp, Homo Sapiens; identical to SEQ ID NO: 368808
  misc_feature (126)..(126): n is a, c, g, or t
  misc_feature (721)..(730): n is a, c, g, or t

SEQ ID NO: 389099 - DNA, 525 bp, Homo Sapiens; identical to SEQ ID NO: 368809
  misc_feature (399)..(399): n is a, c, g, or t
  misc_feature (429)..(429): n is a, c, g, or t
  misc_feature (445)..(445): n is a, c, g, or t
  misc_feature (455)..(455): n is a, c, g, or t
  misc_feature (467)..(467): n is a, c, g, or t
  misc_feature (493)..(493): n is a, c, g, or t
  misc_feature (502)..(502): n is a, c, g, or t
  misc_feature (507)..(507): n is a, c, g, or t

SEQ ID NO: 389100 - DNA, 925 bp, Homo Sapiens; identical to SEQ ID NO: 368813

SEQ ID NO: 389101 - DNA, 1676 bp, Homo Sapiens; identical to SEQ ID NO: 368814
  misc_feature (1151)..(1177): n is a, c, g, or t
  misc_feature (1197)..(1332): n is a, c, g, or t
  misc_feature (1391)..(1391): n is a, c, g, or t
  misc_feature (1597)..(1636): n is a, c, g, or t

SEQ ID NO: 389102 - DNA, 1087 bp, Homo Sapiens; identical to SEQ ID NO: 368825
  misc_feature (962)..(963): n is a, c, g, or t
  misc_feature (989)..(989): n is a, c, g, or t

SEQ ID NO: 389103 - DNA, 488 bp, Homo Sapiens; identical to SEQ ID NO: 368826
  misc_feature (167)..(167): n is a, c, g, or t

SEQ ID NO: 389104 - DNA, 1351 bp, Homo Sapiens; identical to SEQ ID NO: 368832
  misc_feature (103)..(161): n is a, c, g, or t
  misc_feature (225)..(247): n is a, c, g, or t

SEQ ID NO: 389105 - DNA, 479 bp, Homo Sapiens; identical to SEQ ID NO: 368833
  misc_feature (354)..(354): n is a, c, g, or t
  misc_feature (379)..(379): n is a, c, g, or t
  misc_feature (421)..(421): n is a, c, g, or t
  misc_feature (458)..(458): n is a, c, g, or t

SEQ ID NO: 389106 - DNA, 1292 bp, Homo Sapiens; identical to SEQ ID NO: 368846
  misc_feature (60)..(60): n is a, c, g, or t
  misc_feature (691)..(699): n is a, c, g, or t
  misc_feature (1202)..(1202): n is a, c, g, or t
  misc_feature (1239)..(1239): n is a, c, g, or t
  misc_feature (1248)..(1248): n is a, c, g, or t
  misc_feature (1272)..(1272): n is a, c, g, or t

SEQ ID NO: 389107 - DNA, 736 bp, Homo Sapiens; identical to SEQ ID NO: 368847
  misc_feature (46)..(46): n is a, c, g, or t
  misc_feature (50)..(51): n is a, c, g, or t
  misc_feature (55)..(55): n is a, c, g, or t

SEQ ID NO: 389108 - DNA, 626 bp, Homo Sapiens; identical to SEQ ID NO: 368850
  misc_feature (37)..(37): n is a, c, g, or t
  misc_feature (54)..(54): n is a, c, g, or t
  misc_feature (63)..(63): n is a, c, g, or t
  misc_feature (72)..(72): n is a, c, g, or t

SEQ ID NO: 389109 - DNA, 532 bp, Homo Sapiens; identical to SEQ ID NO: 368851
  misc_feature (391)..(391): n is a, c, g, or t
  misc_feature (447)..(447): n is a, c, g, or t
  misc_feature (456)..(456): n is a, c, g, or t
  misc_feature (478)..(478): n is a, c, g, or t
  misc_feature (516)..(516): n is a, c, g, or t

SEQ ID NO: 389110 - DNA, 1670 bp, Homo Sapiens; identical to SEQ ID NO: 368861
  misc_feature (412)..(479): n is a, c, g, or t

SEQ ID NO: 389111 - DNA, 1018 bp, Homo Sapiens; identical to SEQ ID NO: 368862
  misc_feature (438)..(466): n is a, c, g, or t

SEQ ID NO: 389112 - DNA, 1823 bp, Homo Sapiens; identical to SEQ ID NO: 368881
  misc_feature (45)..(81): n is a, c, g, or t
  misc_feature (297)..(339): n is a, c, g, or t

SEQ ID NO: 389113 - DNA, 1050 bp, Homo Sapiens; identical to SEQ ID NO: 368882
  misc_feature (852)..(852): n is a, c, g, or t
  misc_feature (993)..(993): n is a, c, g, or t

SEQ ID NO: 389114 - DNA, 750 bp, Homo Sapiens; identical to SEQ ID NO: 6953
  misc_feature (568)..(568): n is a, c, g, or t
  misc_feature (595)..(595): n is a, c, g, or t
  misc_feature (597)..(666): n is a, c, g, or t

SEQ ID NO: 389115 - DNA, 1111 bp, Homo Sapiens; identical to SEQ ID NO: 368889
  misc_feature (869)..(924): n is a, c, g, or t
  misc_feature (997)..(1052): n is a, c, g, or t

SEQ ID NO: 389116 - DNA, 550 bp, Homo Sapiens; identical to SEQ ID NO: 2915
  misc_feature (442)..(451): n is a, c, g, or t

SEQ ID NO: 389117 - DNA, 815 bp, Homo Sapiens; identical to SEQ ID NO: 368902

SEQ ID NO: 389118 - DNA, 916 bp, Homo Sapiens; identical to SEQ ID NO: 368916
  misc_feature (156)..(183): n is a, c, g, or t
  misc_feature (186)..(190): n is a, c, g, or t
  misc_feature (193)..(196): n is a, c, g, or t
  misc_feature (198)..(230): n is a, c, g, or t
  misc_feature (232)..(247): n is a, c, g, or t
  misc_feature (657)..(685): n is a, c, g, or t
  misc_feature (765)..(814): n is a, c, g, or t

SEQ ID NO: 389119 - DNA, 382 bp, Homo Sapiens; identical to SEQ ID NO: 368917
  misc_feature (84)..(134): n is a, c, g, or t
  misc_feature (218)..(246): n is a, c, g, or t

SEQ ID NO: 389120 - DNA, 851 bp, Homo Sapiens; identical to SEQ ID NO: 178189
  misc_feature (795)..(795): n is a, c, g, or t
  misc_feature (797)..(797): n is a, c, g, or t

SEQ ID NO: 389121 - DNA, 336 bp, Homo Sapiens; identical to SEQ ID NO: 368932

SEQ ID NO: 389122 - DNA, 720 bp, Homo Sapiens; identical to SEQ ID NO: 368942
  misc_feature (572)..(572): n is a, c, g, or t

SEQ ID NO: 389123 - DNA, 886 bp, Homo Sapiens; identical to SEQ ID NO: 368943

SEQ ID NO: 389124 - DNA, 581 bp, Homo Sapiens; identical to SEQ ID NO: 368952

SEQ ID NO: 389125 - DNA, 528 bp, Homo Sapiens; identical to SEQ ID NO: 368953
  misc_feature (513)..(513): n is a, c, g, or t

SEQ ID NO: 389126 - DNA, 429 bp, Homo Sapiens; identical to SEQ ID NO: 369021
  misc_feature (11)..(11): n is a, c, g, or t
  misc_feature (37)..(37): n is a, c, g, or t
  misc_feature (209)..(209): n is a, c, g, or t

SEQ ID NO: 389127 - DNA, 1242 bp, Homo Sapiens; identical to SEQ ID NO: 369022
  misc_feature (18)..(18): n is a, c, g, or t

SEQ ID NO: 389128 - DNA, 1348 bp, Homo Sapiens; identical to SEQ ID NO: 369026

SEQ ID NO: 389129 - DNA, 830 bp, Homo Sapiens; identical to SEQ ID NO: 369027
  misc_feature (594)..(598): n is a, c, g, or t
  misc_feature (601)..(681): n is a, c, g, or t
  misc_feature (697)..(698): n is a, c, g, or t
  misc_feature (702)..(702): n is a, c, g, or t
  misc_feature (706)..(706): n is a, c, g, or t
  misc_feature (710)..(750): n is a, c, g, or t
  misc_feature (754)..(754): n is a, c, g, or t
  misc_feature (768)..(768): n is a, c, g, or t
  misc_feature (774)..(788): n is a, c, g, or t

SEQ ID NO: 389130 - DNA, 1232 bp, Homo Sapiens; identical to SEQ ID NO: 369030
  misc_feature (360)..(447): n is a, c, g, or t

SEQ ID NO: 389131 - DNA, 516 bp, Homo Sapiens; identical to SEQ ID NO: 369031
  misc_feature (269)..(339): n is a, c, g, or t

SEQ ID NO: 389132 - DNA, 2020 bp, Homo Sapiens; identical to SEQ ID NO: 369040
  misc_feature (59)..(75): n is a, c, g, or t
  misc_feature (80)..(140): n is a, c, g, or t

SEQ ID NO: 389133 - DNA, 1333 bp, Homo Sapiens; identical to SEQ ID NO: 369041
  misc_feature (843)..(843): n is a, c, g, or t
  misc_feature (1006)..(1006): n is a, c, g, or t
  misc_feature (1267)..(1267): n is a, c, g, or t

SEQ ID NO: 389134 - DNA, 638 bp, Homo Sapiens; identical to SEQ ID NO: 369060
  misc_feature (486)..(575): n is a, c, g, or t

SEQ ID NO: 389135 - DNA, 380 bp, Homo Sapiens; identical to SEQ ID NO: 369061
  misc_feature (26)..(26): n is a, c, g, or t

SEQ ID NO: 389136 - DNA, 1627 bp, Homo Sapiens; identical to SEQ ID NO: 369066

SEQ ID NO: 389137 - DNA, 615 bp, Homo Sapiens; identical to SEQ ID NO: 369067

SEQ ID NO: 389138 - DNA, 655 bp, Homo Sapiens; identical to SEQ ID NO: 369074

SEQ ID NO: 389139 - DNA, 1632 bp, Homo Sapiens; identical to SEQ ID NO: 369075

SEQ ID NO: 389140 - DNA, 822 bp, Homo Sapiens; identical to SEQ ID NO: 369079
  misc_feature (268)..(280): n is a, c, g, or t
  misc_feature (397)..(441): n is a, c, g, or t

SEQ ID NO: 389141 - DNA, 247 bp, Homo Sapiens; identical to SEQ ID NO: 369080
  misc_feature (189)..(201): n is a, c, g, or t

SEQ ID NO: 389142 - DNA, 276 bp, Homo Sapiens; identical to SEQ ID NO: 72659

SEQ ID NO: 389143 - DNA, 522 bp, Homo Sapiens; identical to SEQ ID NO: 369124

SEQ ID NO: 389144 - DNA, 457 bp, Homo Sapiens; identical to SEQ ID NO: 369125

SEQ ID NO: 389145 - DNA, 1387 bp, Homo Sapiens; identical to SEQ ID NO: 369131
  misc_feature (77)..(77): n is a, c, g, or t
  misc_feature (222)..(222): n is a, c, g, or t
  misc_feature (623)..(644): n is a, c, g, or t
  misc_feature (872)..(872): n is a, c, g, or t
  misc_feature (1060)..(1060): n is a, c, g, or t
  misc_feature (1178)..(1178): n is a, c, g, or t

SEQ ID NO: 389146 - DNA, 462 bp, Homo Sapiens; identical to SEQ ID NO: 369132

SEQ ID NO: 389147 - DNA, 1198 bp, Homo Sapiens; identical to SEQ ID NO: 369145
  misc_feature (306)..(306): n is a, c, g, or t
  misc_feature (318)..(318): n is a, c, g, or t
  misc_feature (436)..(436): n is a, c, g, or t
  misc_feature (440)..(440): n is a, c, g, or t
  misc_feature (451)..(453): n is a, c, g, or t
  misc_feature (455)..(455): n is a, c, g, or t
  misc_feature (457)..(457): n is a, c, g, or t
  misc_feature (693)..(751): n is a, c, g, or t

SEQ ID NO: 389148 - DNA, 702 bp, Homo Sapiens; identical to SEQ ID NO: 369146
  misc_feature (324)..(324): n is a, c, g, or t
  misc_feature (587)..(587): n is a, c, g, or t
  misc_feature (627)..(627): n is a, c, g, or t
  misc_feature (641)..(641): n is a, c, g, or t
  misc_feature (651)..(651): n is a, c, g, or t

SEQ ID NO: 389149 - DNA, 634 bp, Homo Sapiens; identical to SEQ ID NO: 369184

SEQ ID NO: 389150 - DNA, 1240 bp, Homo Sapiens; identical to SEQ ID NO: 369185

SEQ ID NO: 389151 - DNA, 926 bp, Homo Sapiens; identical to SEQ ID NO: 369189
  misc_feature (122)..(122): n is a, c, g, or t
  misc_feature (124)..(124): n is a, c, g, or t

SEQ ID NO: 389152 - DNA, 635 bp, Homo Sapiens; identical to SEQ ID NO: 369190
  misc_feature (33)..(33): n is a, c, g, or t
  misc_feature (58)..(58): n is a, c, g, or t

SEQ ID NO: 389153 - DNA, 894 bp, Homo Sapiens; identical to SEQ ID NO: 369218
  misc_feature (189)..(198): n is a, c, g, or t
  misc_feature (285)..(447): n is a, c, g, or t
  misc_feature (884)..(884): n is a, c, g, or t

SEQ ID NO: 389154 - DNA, 700 bp, Homo Sapiens; identical to SEQ ID NO: 369219
  misc_feature (43)..(43): n is a, c, g, or t
  misc_feature (57)..(57): n is a, c, g, or t
  misc_feature (515)..(515): n is a, c, g, or t
  misc_feature (549)..(549): n is a, c, g, or t

SEQ ID NO: 389155 - DNA, 574 bp, Homo Sapiens; identical to SEQ ID NO: 369225
  misc_feature (359)..(359): n is a, c, g, or t
  misc_feature (376)..(376): n is a, c, g, or t
  misc_feature (433)..(433): n is a, c, g, or t
  misc_feature (466)..(466): n is a, c, g, or t
  misc_feature (506)..(506): n is a, c, g, or t
  misc_feature (530)..(530): n is a, c, g, or t
  misc_feature (558)..(558): n is a, c, g, or t

SEQ ID NO: 389156 - DNA, 758 bp, Homo Sapiens; identical to SEQ ID NO: 369226

SEQ ID NO: 389157 - DNA, 1036 bp, Homo Sapiens; identical to SEQ ID NO: 369227
  misc_feature (228)..(287): n is a, c, g, or t

SEQ ID NO: 389158 - DNA, 1181 bp, Homo Sapiens; identical to SEQ ID NO: 369255
  misc_feature (35)..(35): n is a, c, g, or t
  misc_feature (41)..(41): n is a, c, g, or t
  misc_feature (50)..(50): n is a, c, g, or t
  misc_feature (83)..(83): n is a, c, g, or t
  misc_feature (98)..(98): n is a, c, g, or t
  misc_feature (506)..(663): n is a, c, g, or t
  misc_feature (666)..(667): n is a, c, g, or t
  misc_feature (678)..(690): n is a, c, g, or t
  misc_feature (733)..(825): n is a, c, g, or t
  misc_feature (872)..(903): n is a, c, g, or t
  misc_feature (986)..(1000): n is a, c, g, or t
  misc_feature (1020)..(1051): n is a, c, g, or t
  misc_feature (1058)..(1066): n is a, c, g, or t

SEQ ID NO: 389159 - DNA, 503 bp, Homo Sapiens; identical to SEQ ID NO: 369256
  misc_feature (24)..(24): n is a, c, g, or t
  misc_feature (36)..(36): n is a, c, g, or t
  misc_feature (47)..(47): n is a, c, g, or t
  misc_feature (62)..(62): n is a, c, g, or t
  misc_feature (69)..(88): n is a, c, g, or t

SEQ ID NO: 389160 - DNA, 587 bp, Homo Sapiens; identical to SEQ ID NO: 369260
  misc_feature (463)..(472): n is a, c, g, or t

SEQ ID NO: 389161 - DNA, 144 bp, Homo Sapiens; identical to SEQ ID NO: 369261

SEQ ID NO: 389162 - DNA, 950 bp, Homo Sapiens; identical to SEQ ID NO: 369276

SEQ ID NO: 389163 - DNA, 1320 bp, Homo Sapiens; identical to SEQ ID NO: 369277

SEQ ID NO: 389164 - DNA, 653 bp, Homo Sapiens; identical to SEQ ID NO: 369290
  misc_feature (28)..(28): n is a, c, g, or t
  misc_feature (44)..(44): n is a, c, g, or t
  misc_feature (123)..(123): n is a, c, g, or t
  misc_feature (159)..(159): n is a, c, g, or t
  misc_feature (169)..(169): n is a, c, g, or t
  misc_feature (177)..(177): n is a, c, g, or t

SEQ ID NO: 389165 - DNA, 420 bp, Homo Sapiens; identical to SEQ ID NO: 369291

SEQ ID NO: 389166 - DNA, 617 bp, Homo Sapiens; identical to SEQ ID NO: 369299
  misc_feature (586)..(586): n is a, c, g, or t

SEQ ID NO: 389167 - DNA, 446 bp, Homo Sapiens; identical to SEQ ID NO: 369300
  misc_feature (24)..(24): n is a, c, g, or t
  misc_feature (50)..(50): n is a, c, g, or t

SEQ ID NO: 389168 - DNA, 939 bp, Homo Sapiens; identical to SEQ ID NO: 369323

SEQ ID NO: 389169 - DNA, 724 bp, Homo Sapiens; identical to SEQ ID NO: 369324

SEQ ID NO: 389170 - DNA, 461 bp, Homo Sapiens; identical to SEQ ID NO: 369361
  misc_feature (31)..(31): n is a, c, g, or t

SEQ ID NO: 389171 - DNA, 470 bp, Homo Sapiens; identical to SEQ ID NO: 369362
  misc_feature (73)..(73): n is a, c, g, or t
  misc_feature (84)..(84): n is a, c, g, or t
  misc_feature (118)..(118): n is a, c, g, or t

SEQ ID NO: 389172 - DNA, 592 bp, Homo Sapiens; identical to SEQ ID NO: 369376

SEQ ID NO: 389173 - DNA, 652 bp, Homo Sapiens; identical to SEQ ID NO: 369377

SEQ ID NO: 389174 - DNA, 845 bp, Homo Sapiens; identical to SEQ ID NO: 369382
  misc_feature (115)..(192): n is a, c, g, or t
  misc_feature (218)..(330): n is a, c, g, or t

SEQ ID NO: 389175 - DNA, 819 bp, Homo Sapiens; identical to SEQ ID NO: 369383
  misc_feature (102)..(102): n is a, c, g, or t
  misc_feature (300)..(559): n is a, c, g, or t

SEQ ID NO: 389176 - DNA, 1275 bp, Homo Sapiens; identical to SEQ ID NO: 369385

SEQ ID NO: 389177 - DNA, 523 bp, Homo Sapiens; identical to SEQ ID NO: 369386
  misc_feature (17)..(17): n is a, c, g, or t
  misc_feature (36)..(36): n is a, c, g, or t
  misc_feature (51)..(51): n is a, c, g, or t
  misc_feature (56)..(56): n is a, c, g, or t
  misc_feature (75)..(75): n is a, c, g, or t

SEQ ID NO: 389178 - DNA, 986 bp, Homo Sapiens; identical to SEQ ID NO: 369405
  misc_feature (214)..(214): n is a, c, g, or t
  misc_feature (516)..(555): n is a, c, g, or t

SEQ ID NO: 389179 - DNA, 527 bp, Homo Sapiens; identical to SEQ ID NO: 369406

SEQ ID NO: 389180 - DNA, 762 bp, Homo Sapiens; identical to SEQ ID NO: 369421

SEQ ID NO: 389181 - DNA, 977 bp, Homo Sapiens; identical to SEQ ID NO: 369422

SEQ ID NO: 389182 - DNA, 556 bp, Homo Sapiens; identical to SEQ ID NO: 369460

SEQ ID NO: 389183 - DNA, 914 bp, Homo Sapiens; identical to SEQ ID NO: 369461
  misc_feature (824)..(824): n is a, c, g, or t
  misc_feature (832)..(832): n is a, c, g, or t
  misc_feature (862)..(862): n is a, c, g, or t
  misc_feature (871)..(871): n is a, c, g, or t
  misc_feature (882)..(882): n is a, c, g, or t
  misc_feature (896)..(896): n is a, c, g, or t

SEQ ID NO: 389184 - DNA, 828 bp, Homo Sapiens; identical to SEQ ID NO: 369463

SEQ ID NO: 389185 - DNA, 882 bp, Homo Sapiens; identical to SEQ ID NO: 369464

SEQ ID NO: 389186 - DNA, 832 bp, Homo Sapiens; identical to SEQ ID NO: 369470

SEQ ID NO: 389187 - DNA, 882 bp, Homo Sapiens; identical to SEQ ID NO: 369471
  misc_feature (52)..(88): n is a, c, g, or t
  misc_feature (130)..(177): n is a, c, g, or t

SEQ ID NO: 389188 - DNA, 1008 bp, Homo Sapiens; identical to SEQ ID NO: 369478
  misc_feature (44)..(44): n is a, c, g, or t
  misc_feature (55)..(55): n is a, c, g, or t
  misc_feature (92)..(92): n is a, c, g, or t
  misc_feature (108)..(108): n is a, c, g, or t
  misc_feature (113)..(113): n is a, c, g, or t
  misc_feature (139)..(139): n is a, c, g, or t
  misc_feature (144)..(144): n is a, c, g, or t

SEQ ID NO: 389189 - DNA, 442 bp, Homo Sapiens; identical to SEQ ID NO: 369479
  misc_feature (23)..(23): n is a, c, g, or t
  misc_feature (55)..(55): n is a, c, g, or t
  misc_feature (76)..(76): n is a, c, g, or t

SEQ ID NO: 389190 - DNA, 1624 bp, Homo Sapiens; identical to SEQ ID NO: 369502
  misc_feature (1331)..(1331): n is a, c, g, or t

SEQ ID NO: 389191 - DNA, 929 bp, Homo Sapiens; identical to SEQ ID NO: 369503

SEQ ID NO: 389192 - DNA, 898 bp, Homo Sapiens; identical to SEQ ID NO: 369514

SEQ ID NO: 389193 - DNA, 475 bp, Homo Sapiens; identical to SEQ ID NO: 369515
  misc_feature (16)..(16): n is a, c, g, or t
  misc_feature (22)..(22): n is a, c, g, or t
  misc_feature (44)..(44): n is a, c, g, or t

SEQ ID NO: 389194 - DNA, 760 bp, Homo Sapiens; identical to SEQ ID NO: 369545

SEQ ID NO: 389195 - DNA, 641 bp, Homo Sapiens; identical to SEQ ID NO: 369546
  misc_feature (14)..(14): n is a, c, g, or t
  misc_feature (51)..(51): n is a, c, g, or t
  misc_feature (65)..(65): n is a, c, g, or t
  misc_feature (73)..(73): n is a, c, g, or t
  misc_feature (273)..(283): n is a, c, g, or t

SEQ ID NO: 389196 - DNA, 1054 bp, Homo Sapiens; identical to SEQ ID NO: 369551

SEQ ID NO: 389197 - DNA, 534 bp, Homo Sapiens; identical to SEQ ID NO: 369552
  misc_feature (33)..(33): n is a, c, g, or t
  misc_feature (50)..(50): n is a, c, g, or t
  misc_feature (79)..(79): n is a, c, g, or t
  misc_feature (88)..(88): n is a, c, g, or t
  misc_feature (250)..(250): n is a, c, g, or t

SEQ ID NO: 389198 - DNA, 1147 bp, Homo Sapiens; identical to SEQ ID NO: 369572
  misc_feature (12)..(12): n is a, c, g, or t
  misc_feature (72)..(72): n is a, c, g, or t

SEQ ID NO: 389199 - DNA, 520 bp, Homo Sapiens; identical to SEQ ID NO: 369573
  misc_feature (36)..(36): n is a, c, g, or t
  misc_feature (96)..(96): n is a, c, g, or t

SEQ ID NO: 389200 - DNA, 1159 bp, Homo Sapiens; identical to SEQ ID NO: 369579
  misc_feature (62)..(73): n is a, c, g, or t
  misc_feature (177)..(189): n is a, c, g, or t
  misc_feature (423)..(431): n is a, c, g, or t
  misc_feature (1126)..(1127): n is a, c, g, or t
  misc_feature (1143)..(1143): n is a, c, g, or t

SEQ ID NO: 389201 - DNA, 447 bp, Homo Sapiens; identical to SEQ ID NO: 369580

SEQ ID NO: 389202 - DNA, 866 bp, Homo Sapiens; identical to SEQ ID NO: 369613
  misc_feature (168)..(222): n is a, c, g, or t
  misc_feature (837)..(837): n is a, c, g, or t

SEQ ID NO: 389203 - DNA, 907 bp, Homo Sapiens; identical to SEQ ID NO: 369614
  misc_feature (243)..(264): n is a, c, g, or t

SEQ ID NO: 389204 - DNA, 1084 bp, Homo Sapiens; identical to SEQ ID NO: 369616

SEQ ID NO: 389205 - DNA, 631 bp, Homo Sapiens; identical to SEQ ID NO: 369617

SEQ ID NO: 389206 - DNA, 1092 bp, Homo Sapiens; identical to SEQ ID NO: 369619
  misc_feature (720)..(720): n is a, c, g, or t

SEQ ID NO: 389207 - DNA, 812 bp, Homo Sapiens; identical to SEQ ID NO: 369620

SEQ ID NO: 389208 - DNA, 577 bp, Homo Sapiens; identical to SEQ ID NO: 369643

SEQ ID NO: 389209 - DNA, 445 bp, Homo Sapiens; identical to SEQ ID NO: 369644
  misc_feature (428)..(428): n is a, c, g, or t

SEQ ID NO: 389210 - DNA, 1000 bp, Homo Sapiens; identical to SEQ ID NO: 369646
  misc_feature (430)..(430): n is a, c, g, or t
  misc_feature (442)..(443): n is a, c, g, or t
  misc_feature (463)..(464): n is a, c, g, or t
  misc_feature (486)..(487): n is a, c, g, or t
  misc_feature (498)..(499): n is a, c, g, or t
  misc_feature (509)..(510): n is a, c, g, or t
  misc_feature (519)..(519): n is a, c, g, or t

SEQ ID NO: 389211 - DNA, 697 bp, Homo Sapiens; identical to SEQ ID NO: 369647
  misc_feature (54)..(54): n is a, c, g, or t
  misc_feature (108)..(108): n is a, c, g, or t
  misc_feature (405)..(405): n is a, c, g, or t
  misc_feature (475)..(475): n is a, c, g, or t
  misc_feature (511)..(511): n is a, c, g, or t
  misc_feature (543)..(543): n is a, c, g, or t
  misc_feature (559)..(559): n is a, c, g, or t
  misc_feature (598)..(598): n is a, c, g, or t
  misc_feature (629)..(629): n is a, c, g, or t
  misc_feature (643)..(643): n is a, c, g, or t
  misc_feature (655)..(655): n is a, c, g, or t
  misc_feature (663)..(663): n is a, c, g, or t

SEQ ID NO: 389212 - DNA, 492 bp, Homo Sapiens; identical to SEQ ID NO: 369651
  misc_feature (480)..(480): n is a, c, g, or t

SEQ ID NO: 389213 - DNA, 543 bp, Homo Sapiens; identical to SEQ ID NO: 369652

SEQ ID NO: 389214 - DNA, 947 bp, Homo Sapiens; identical to SEQ ID NO: 369653
  misc_feature (15)..(15): n is a, c, g, or t
  misc_feature (33)..(33): n is a, c, g, or t
  misc_feature (39)..(39): n is a, c, g, or t
  misc_feature (61)..(61): n is a, c, g, or t
  misc_feature (81)..(81): n is a, c, g, or t
  misc_feature (120)..(120): n is a, c, g, or t
  misc_feature (877)..(877): n is a, c, g, or t
  misc_feature (908)..(908): n is a, c, g, or t
  misc_feature (914)..(914): n is a, c, g, or t

SEQ ID NO: 389215 - DNA, 669 bp, Homo Sapiens; identical to SEQ ID NO: 369709

SEQ ID NO: 389216 - DNA, 583 bp, Homo Sapiens; identical to SEQ ID NO: 264741

SEQ ID NO: 389217 - DNA, 505 bp, Homo Sapiens; identical to SEQ ID NO: 369711

SEQ ID NO: 389218 - DNA, 898 bp, Homo Sapiens; identical to SEQ ID NO: 369728
  misc_feature (66)..(66): n is a, c, g, or t
  misc_feature (135)..(136): n is a, c, g, or t
  misc_feature (139)..(139): n is a, c, g, or t

SEQ ID NO: 389219 - DNA, 484 bp, Homo Sapiens; identical to SEQ ID NO: 369729
  misc_feature (339)..(339): n is a, c, g, or t

SEQ ID NO: 389220 - DNA, 1330 bp, Homo Sapiens; identical to SEQ ID NO: 369781

SEQ ID NO: 389221 - DNA, 1964 bp, Homo Sapiens; identical to SEQ ID NO: 369782

SEQ ID NO: 389222 - DNA, 819 bp, Homo Sapiens; identical to SEQ ID NO: 369783

SEQ ID NO: 389223 - DNA, 506 bp, Homo Sapiens; identical to SEQ ID NO: 369784
  misc_feature (389)..(460): n is a, c, g, or t

SEQ ID NO: 389224 - DNA, 1226 bp, Homo Sapiens; identical to SEQ ID NO: 369785
  misc_feature (1055)..(1055): n is a, c, g, or t
  misc_feature (1157)..(1158): n is a, c, g, or t

SEQ ID NO: 389225 - DNA, 739 bp, Homo Sapiens; identical to SEQ ID NO: 369786

SEQ ID NO: 389226 - DNA, 811 bp, Homo Sapiens; identical to SEQ ID NO: 369787

SEQ ID NO: 389227 - DNA, 734 bp, Homo Sapiens; identical to SEQ ID NO: 369788
  misc_feature (237)..(344): n is a, c, g, or t

SEQ ID NO: 389228 - DNA, 734 bp, Homo Sapiens; identical to SEQ ID NO: 369789
  misc_feature (238)..(331): n is a, c, g, or t

SEQ ID NO: 389229 - DNA, 613 bp, Homo Sapiens; identical to SEQ ID NO: 369790
  misc_feature (127)..(188): n is a, c, g, or t

SEQ ID NO: 389230 - DNA, 696 bp, Homo Sapiens; identical to SEQ ID NO: 369791
  misc_feature (666)..(666): n is a, c, g, or t

SEQ ID NO: 389231 - DNA, 692 bp, Homo Sapiens; identical to SEQ ID NO: 369792
  misc_feature (348)..(455): n is a, c, g, or t

SEQ ID NO: 389232 - DNA, 826 bp, Homo Sapiens; identical to SEQ ID NO: 369793
  misc_feature (496)..(589): n is a, c, g, or t

SEQ ID NO: 389233 - DNA, 767 bp, Homo Sapiens; identical to SEQ ID NO: 369794
  misc_feature (526)..(526): n is a, c, g, or t

SEQ ID NO: 389234 - DNA, 681 bp, Homo Sapiens; identical to SEQ ID NO: 369798
  misc_feature (57)..(95): n is a, c, g, or t
  misc_feature (120)..(151): n is a, c, g, or t
  misc_feature (157)..(261): n is a, c, g, or t
  misc_feature (279)..(367): n is a, c, g, or t

SEQ ID NO: 389235 - DNA, 860 bp, Homo Sapiens; identical to SEQ ID NO: 369799
  misc_feature (23)..(23): n is a, c, g, or t
  misc_feature (30)..(30): n is a, c, g, or t
  misc_feature (411)..(411): n is a, c, g, or t
  misc_feature (419)..(419): n is a, c, g, or t

SEQ ID NO: 389236 - DNA, 1018 bp, Homo Sapiens; identical to SEQ ID NO: 369825

SEQ ID NO: 389237 - DNA, 636 bp, Homo Sapiens; identical to SEQ ID NO: 369826
  misc_feature (40)..(40): n is a, c, g, or t
  misc_feature (90)..(90): n is a, c, g, or t
  misc_feature (109)..(109): n is a, c, g, or t
  misc_feature (130)..(130): n is a, c, g, or t

SEQ ID NO: 389238 - DNA, 887 bp, Homo Sapiens; identical to SEQ ID NO: 369827

SEQ ID NO: 389239 - DNA, 786 bp, Homo Sapiens; identical to SEQ ID NO: 369828

SEQ ID NO: 389240 - DNA, 901 bp, Homo Sapiens; identical to SEQ ID NO: 369835

SEQ ID NO: 389241 - DNA, 771 bp, Homo Sapiens; identical to SEQ ID NO: 369836

SEQ ID NO: 389242 - DNA, 881 bp, Homo Sapiens; identical to SEQ ID NO: 369858
  misc_feature (670)..(682): n is a, c, g, or t

SEQ ID NO: 389243 - DNA, 558 bp, Homo Sapiens; identical to SEQ ID NO: 369859
  misc_feature (352)..(352): n is a, c, g, or t
  misc_feature (383)..(383): n is a, c, g, or t
  misc_feature (429)..(429): n is a, c, g, or t
  misc_feature (478)..(478): n is a, c, g, or t
  misc_feature (511)..(511): n is a, c, g, or t
  misc_feature (516)..(516): n is a, c, g, or t

SEQ ID NO: 389244 - DNA, 745 bp, Homo Sapiens; identical to SEQ ID NO: 369893

SEQ ID NO: 389245 - DNA, 496 bp, Homo Sapiens; identical to SEQ ID NO: 369894

SEQ ID NO: 389246 - DNA, 454 bp, Homo Sapiens; identical to SEQ ID NO: 369906

SEQ ID NO: 389247 - DNA, 343 bp, Homo Sapiens; identical to SEQ ID NO: 369907
  misc_feature (204)..(204): n is a, c, g, or t

SEQ ID NO: 389248 - DNA, 674 bp, Homo Sapiens; identical to SEQ ID NO: 369939

SEQ ID NO: 389249 - DNA, 610 bp, Homo Sapiens; identical to SEQ ID NO: 264828
  misc_feature (514)..(514): n is a, c, g, or t

SEQ ID NO: 389250 - DNA, 1088 bp, Homo Sapiens; identical to SEQ ID NO: 369990
  misc_feature (241)..(249): n is a, c, g, or t
  misc_feature (865)..(948): n is a, c, g, or t

SEQ ID NO: 389251 - DNA, 441 bp, Homo Sapiens; identical to SEQ ID NO: 369991

SEQ ID NO: 389252 - DNA, 905 bp, Homo Sapiens; identical to SEQ ID NO: 369993
  misc_feature (28)..(28): n is a, c, g, or t
  misc_feature (68)..(68): n is a, c, g, or t
  misc_feature (81)..(81): n is a, c, g, or t
  misc_feature (99)..(99): n is a, c, g, or t
  misc_feature (122)..(122): n is a, c, g, or t

SEQ ID NO: 389253 - DNA, 1037 bp, Homo Sapiens; identical to SEQ ID NO: 369994

SEQ ID NO: 389254 - DNA, 1448 bp, Homo Sapiens; identical to SEQ ID NO: 370020
  misc_feature (618)..(633): n is a, c, g, or t
  misc_feature (1327)..(1335): n is a, c, g, or t

SEQ ID NO: 389255 - DNA, 589 bp, Homo Sapiens; identical to SEQ ID NO: 370021
  misc_feature (260)..(260): n is a, c, g, or t

SEQ ID NO: 389256 - DNA, 817 bp, Homo Sapiens; identical to SEQ ID NO: 370031
  misc_feature (416)..(690): n is a, c, g, or t
  misc_feature (777)..(777): n is a, c, g, or t
  misc_feature (783)..(783): n is a, c, g, or t

SEQ ID NO: 389257 - DNA, 783 bp, Homo Sapiens; identical to SEQ ID NO: 370032
  misc_feature (617)..(629): n is a, c, g, or t

SEQ ID NO: 389258 - DNA, 1177 bp, Homo Sapiens; identical to SEQ ID NO: 370064

SEQ ID NO: 389259 - DNA, 802 bp, Homo Sapiens; identical to SEQ ID NO: 370065
  misc_feature (52)..(88): n is a, c, g, or t
  misc_feature (626)..(626): n is a, c, g, or t

SEQ ID NO: 389260 - DNA, 437 bp, Homo Sapiens; identical to SEQ ID NO: 370070
  misc_feature (48)..(48): n is a, c, g, or t

SEQ ID NO: 389261 - DNA, 487 bp, Homo Sapiens; identical to SEQ ID NO: 370071
  misc_feature (12)..(12): n is a, c, g, or t
  misc_feature (26)..(26): n is a, c, g, or t
  misc_feature (41)..(41): n is a, c, g, or t

SEQ ID NO: 389262 - DNA, 1228 bp, Homo Sapiens; identical to SEQ ID NO: 370102

SEQ ID NO: 389263 - DNA, 995 bp, Homo Sapiens; identical to SEQ ID NO: 370103

SEQ ID NO: 389264 - DNA, 1063 bp, Homo Sapiens; identical to SEQ ID NO: 370104
  misc_feature (433)..(479): n is a, c, g, or t

SEQ ID NO: 389265 - DNA, 569 bp, Homo Sapiens; identical to SEQ ID NO: 370105
  misc_feature (11)..(11): n is a, c, g, or t
  misc_feature (410)..(490): n is a, c, g, or t

SEQ ID NO: 389266 - DNA, 1068 bp, Homo Sapiens; identical to SEQ ID NO: 370107

SEQ ID NO: 389267 - DNA, 557 bp, Homo Sapiens; identical to SEQ ID NO: 370108

SEQ ID NO: 389268 - DNA, 633 bp, Homo Sapiens; identical to SEQ ID NO: 370122

SEQ ID NO: 389269 - DNA, 482 bp, Homo Sapiens; identical to SEQ ID NO: 370123
  misc_feature (11)..(11): n is a, c, g, or t
  misc_feature (35)..(35): n is a, c, g, or t

SEQ ID NO: 389270 - DNA, 810 bp, Homo Sapiens; identical to SEQ ID NO: 370128

SEQ ID NO: 389271 - DNA, 820 bp, Homo Sapiens; identical to SEQ ID NO: 370129

SEQ ID NO: 389272 - DNA, 1186 bp, Homo Sapiens; identical to SEQ ID NO: 370145
  misc_feature (1077)..(1077): n is a, c, g, or t
  misc_feature (1081)..(1081): n is a, c, g, or t
  misc_feature (1099)..(1099): n is a, c, g, or t

SEQ ID NO: 389273 - DNA, 1156 bp, Homo Sapiens; identical to SEQ ID NO: 370146
  misc_feature (271)..(415): n is a, c, g, or t

SEQ ID NO: 389274 - DNA, 972 bp, Homo Sapiens; identical to SEQ ID NO: 370153

SEQ ID NO: 389275 - DNA, 748 bp, Homo Sapiens; identical to SEQ ID NO: 264459

SEQ ID NO: 389276 - DNA, 904 bp, Homo Sapiens; identical to SEQ ID NO: 370168
  misc_feature (31)..(32): n is a, c, g, or t

SEQ ID NO: 389277 - DNA, 262 bp, Homo Sapiens; identical to SEQ ID NO: 370169
  misc_feature (191)..(191): n is a, c, g, or t

SEQ ID NO: 389278 - DNA, 591 bp, Homo Sapiens; identical to SEQ ID NO: 370196

SEQ ID NO: 389279 - DNA, 473 bp, Homo Sapiens; identical to SEQ ID NO: 370197
  misc_feature (26)..(26): n is a, c, g, or t
  misc_feature (65)..(65): n is a, c, g, or t

SEQ ID NO: 389280 - DNA, 836 bp, Homo Sapiens; identical to SEQ ID NO: 370207

SEQ ID NO: 389281 - DNA, 489 bp, Homo Sapiens; identical to SEQ ID NO: 370208
  misc_feature (22)..(22): n is a, c, g, or t
  misc_feature (40)..(40): n is a, c, g, or t
  misc_feature (77)..(77): n is a, c, g, or t

SEQ ID NO: 389282 - DNA, 851 bp, Homo Sapiens; identical to SEQ ID NO: 370232

SEQ ID NO: 389283 - DNA, 833 bp, Homo Sapiens; identical to SEQ ID NO: 370233
  misc_feature (223)..(223): n is a, c, g, or t

SEQ ID NO: 389284 - DNA, 835 bp, Homo Sapiens; identical to SEQ ID NO: 370252

SEQ ID NO: 389285 - DNA, 754 bp, Homo Sapiens; identical to SEQ ID NO: 370253

SEQ ID NO: 389286 - DNA, 755 bp, Homo Sapiens; identical to SEQ ID NO: 370261

SEQ ID NO: 389287 - DNA, 375 bp, Homo Sapiens; identical to SEQ ID NO: 370262

SEQ ID NO: 389288 - DNA, 333 bp, Homo Sapiens; identical to SEQ ID NO: 370288

SEQ ID NO: 389289 - DNA, 1011 bp, Homo Sapiens; identical to SEQ ID NO: 370289

SEQ ID NO: 389290 - DNA, 464 bp, Homo Sapiens; identical to SEQ ID NO: 370290

SEQ ID NO: 389291 - DNA, 490 bp, Homo Sapiens; identical to SEQ ID NO: 370291
  misc_feature (19)..(19): n is a, c, g, or t
  misc_feature (41)..(41): n is a, c, g, or t
  misc_feature (52)..(52): n is a, c, g, or t

SEQ ID NO: 389292 - DNA, 511 bp, Homo Sapiens; identical to SEQ ID NO: 370299
  misc_feature (464)..(464): n is a, c, g, or t
  misc_feature (472)..(472): n is a, c, g, or t
  misc_feature (483)..(483): n is a, c, g, or t

SEQ ID NO: 389293 - DNA, 803 bp, Homo Sapiens; identical to SEQ ID NO: 370300
  misc_feature (690)..(690): n is a, c, g, or t
  misc_feature (721)..(721): n is a, c, g, or t
  misc_feature (730)..(730): n is a, c, g, or t
  misc_feature (736)..(736): n is a, c, g, or t
  misc_feature (748)..(748): n is a, c, g, or t
  misc_feature (755)..(755): n is a, c, g, or t

SEQ ID NO: 389294 - DNA, 884 bp, Homo Sapiens; identical to SEQ ID NO: 264434

SEQ ID NO: 389295 - DNA, 308 bp, Homo Sapiens; identical to SEQ ID NO: 264435

SEQ ID NO: 389296 - DNA, 594 bp, Homo Sapiens; identical to SEQ ID NO: 264485

SEQ ID NO: 389297 - DNA, 430 bp, Homo Sapiens; identical to SEQ ID NO: 264486

SEQ ID NO: 389298 - DNA, 607 bp, Homo Sapiens; identical to SEQ ID NO: 264495

SEQ ID NO: 389299 - DNA, 400 bp, Homo Sapiens; identical to SEQ ID NO: 264496

SEQ ID NO: 389300 - DNA, 698 bp, Homo Sapiens; identical to SEQ ID NO: 264591

SEQ ID NO: 389301 - DNA, 372 bp, Homo Sapiens; identical to SEQ ID NO: 370438
  misc_feature (20)..(20): n is a, c, g, or t
  misc_feature (28)..(28): n is a, c, g, or t
  misc_feature (60)..(60): n is a, c, g, or t

SEQ ID NO: 389302 - DNA, 1199 bp, Homo Sapiens; identical to SEQ ID NO: 370460
  misc_feature (182)..(244): n is a, c, g, or t

SEQ ID NO: 389303 - DNA, 791 bp, Homo Sapiens; identical to SEQ ID NO: 370461

SEQ ID NO: 389304 - DNA, 811 bp, Homo Sapiens; identical to SEQ ID NO: 370474

SEQ ID NO: 389305 - DNA, 859 bp, Homo Sapiens; identical to SEQ ID NO: 370475

SEQ ID NO: 389306 - DNA, 612 bp, Homo Sapiens; identical to SEQ ID NO: 264645

SEQ ID NO: 389307 - DNA, 285 bp, Homo Sapiens; identical to SEQ ID NO: 370481
  misc_feature (236)..(236): n is a, c, g, or t

SEQ ID NO: 389308 - DNA, 820 bp, Homo Sapiens; identical to SEQ ID NO: 264671

SEQ ID NO: 389309 - DNA, 829 bp, Homo Sapiens; identical to SEQ ID NO: 370497

SEQ ID NO: 389310 - DNA, 654 bp, Homo Sapiens; identical to SEQ ID NO: 370583

SEQ ID NO: 389311 - DNA, 452 bp, Homo Sapiens; identical to SEQ ID NO: 370584

SEQ ID NO: 389312 - DNA, 755 bp, Homo Sapiens; identical to SEQ ID NO: 264805

SEQ ID NO: 389313 - DNA, 418 bp, Homo Sapiens; identical to SEQ ID NO: 370596
  misc_feature (13)..(13): n is a, c, g, or t
  misc_feature (42)..(42): n is a, c, g, or t

SEQ ID NO: 389314 - DNA, 412 bp, Homo Sapiens; identical to SEQ ID NO: 264838

SEQ ID NO: 389315 - DNA, 328 bp, Homo Sapiens; identical to SEQ ID NO: 370625

SEQ ID NO: 389316 - DNA, 1039 bp, Homo Sapiens; identical to SEQ ID NO: 370663
  misc_feature (968)..(968): n is a, c, g, or t

SEQ ID NO: 389317 - DNA, 980 bp, Homo Sapiens; identical to SEQ ID NO: 370664
  misc_feature (386)..(415): n is a, c, g, or t
  misc_feature (777)..(777): n is a, c, g, or t
  misc_feature (837)..(891): n is a, c, g, or t

SEQ ID NO: 389318 - DNA, 479 bp, Homo Sapiens; identical to SEQ ID NO: 370701
  misc_feature (84)..(84): n is a, c, g, or t
  misc_feature (100)..(100): n is a, c, g, or t
  misc_feature (115)..(115): n is a, c, g, or t

SEQ ID NO: 389319 - DNA, 646 bp, Homo Sapiens; identical to SEQ ID NO: 370702
  misc_feature (29)..(29): n is a, c, g, or t
  misc_feature (44)..(44): n is a, c, g, or t

SEQ ID NO: 389320 - DNA, 489 bp, Homo Sapiens; identical to SEQ ID NO: 370703
  misc_feature (30)..(30): n is a, c, g, or t
  misc_feature (46)..(46): n is a, c, g, or t
  misc_feature (55)..(55): n is a, c, g, or t
  misc_feature (63)..(63): n is a, c, g, or t
  misc_feature (99)..(99): n is a, c, g, or t
  misc_feature (104)..(104): n is a, c, g, or t

SEQ ID NO: 389321 - DNA, 1061 bp, Homo Sapiens; identical to SEQ ID NO: 370761

SEQ ID NO: 389322 - DNA, 814 bp, Homo Sapiens; identical to SEQ ID NO: 370762

SEQ ID NO: 389323 - DNA, 965 bp, Homo Sapiens; identical to SEQ ID NO: 370788

SEQ ID NO: 389324 - DNA, 584 bp, Homo Sapiens; identical to SEQ ID NO: 370789

SEQ ID NO: 389325 - DNA, 1121 bp, Homo Sapiens; identical to SEQ ID NO: 370798
  misc_feature (32)..(33): n is a, c, g, or t
  misc_feature (819)..(828): n is a, c, g, or t

SEQ ID NO: 389326 - DNA, 464 bp, Homo Sapiens; identical to SEQ ID NO: 370799

SEQ ID NO: 389327 - DNA, 1412 bp, Homo Sapiens; identical to SEQ ID NO: 370810

SEQ ID NO: 389328 - DNA, 390 bp, Homo Sapiens; identical to SEQ ID NO: 370811

SEQ ID NO: 389329 - DNA, 849 bp, Homo Sapiens; identical to SEQ ID NO: 370887
  misc_feature (42)..(42): n is a, c, g, or t
  misc_feature (56)..(92): n is a, c, g, or t
  misc_feature (635)..(635): n is a, c, g, or t

SEQ ID NO: 389330 - DNA, 699 bp, Homo Sapiens; identical to SEQ ID NO: 370888

SEQ ID NO: 389331 - DNA, 480 bp, Homo Sapiens; identical to SEQ ID NO: 370889
  misc_feature (390)..(390): n is a, c, g, or t
  misc_feature (422)..(422): n is a, c, g, or t
  misc_feature (428)..(428): n is a, c, g, or t
  misc_feature (451)..(451): n is a, c, g, or t
  misc_feature (460)..(460): n is a, c, g, or t

SEQ ID NO: 389332 - DNA, 972 bp, Homo Sapiens; identical to SEQ ID NO: 370962
  misc_feature (398)..(398): n is a, c, g, or t

SEQ ID NO: 389333 - DNA, 462 bp, Homo Sapiens; identical to SEQ ID NO: 370963
  misc_feature (29)..(29): n is a, c, g, or t
  misc_feature (438)..(438): n is a, c, g, or t

SEQ ID NO: 389334 - DNA, 808 bp, Homo Sapiens; identical to SEQ ID NO: 370976
  misc_feature (760)..(760): n is a, c, g, or t

SEQ ID NO: 389335 - DNA, 442 bp, Homo Sapiens; identical to SEQ ID NO: 370977

SEQ ID NO: 389336 - DNA, 1000 bp, Homo Sapiens; identical to SEQ ID NO: 370990
  misc_feature (50)..(82): n is a, c, g, or t
  misc_feature (176)..(203): n is a, c, g, or t

SEQ ID NO: 389337 - DNA, 443 bp, Homo Sapiens; identical to SEQ ID NO: 370991
  misc_feature (40)..(40): n is a, c, g, or t
  misc_feature (57)..(57): n is a, c, g, or t
  misc_feature (63)..(63): n is a, c, g, or t
  misc_feature (73)..(73): n is a, c, g, or t
  misc_feature (114)..(114): n is a, c, g, or t
  misc_feature (137)..(137): n is a, c, g, or t
  misc_feature (147)..(147): n is a, c, g, or t
  misc_feature (168)..(168): n is a, c, g, or t
  misc_feature (175)..(175): n is a, c, g, or t
  misc_feature (196)..(196): n is a, c, g, or t
  misc_feature (220)..(220): n is a, c, g, or t
  misc_feature (229)..(229): n is a, c, g, or t
  misc_feature (243)..(268): n is a, c, g, or t
  misc_feature (372)..(396): n is a, c, g, or t

SEQ ID NO: 389338 - DNA, 1398 bp, Homo Sapiens; identical to SEQ ID NO: 370995

SEQ ID NO: 389339 - DNA, 428 bp, Homo Sapiens; identical to SEQ ID NO: 370996

SEQ ID NO: 389340 - DNA, 820 bp, Homo Sapiens; identical to SEQ ID NO: 371000

SEQ ID NO: 389341 - DNA, 279 bp, Homo Sapiens; identical to SEQ ID NO: 371001

SEQ ID NO: 389342 - DNA, 914 bp, Homo Sapiens; identical to SEQ ID NO: 371053

SEQ ID NO: 389343 - DNA, 1119 bp, Homo Sapiens; identical to SEQ ID NO: 371054
  misc_feature (48)..(84): n is a, c, g, or t

SEQ ID NO: 389344 - DNA, 1127 bp, Homo Sapiens; identical to SEQ ID NO: 371074
  misc_feature (46)..(82): n is a, c, g, or t

SEQ ID NO: 389345 - DNA, 759 bp, Homo Sapiens; identical to SEQ ID NO: 371075

SEQ ID NO: 389346 - DNA, 992 bp, Homo Sapiens; identical to SEQ ID NO: 371112
  misc_feature (752)..(809): n is a, c, g, or t

SEQ ID NO: 389347 - DNA, 664 bp, Homo Sapiens; identical to SEQ ID NO: 371113
  misc_feature (451)..(511): n is a, c, g, or t
  misc_feature (529)..(529): n is a, c, g, or t
  misc_feature (562)..(562): n is a, c, g, or t
  misc_feature (572)..(572): n is a, c, g, or t
  misc_feature (593)..(593): n is a, c, g, or t
  misc_feature (613)..(613): n is a, c, g, or t
  misc_feature (626)..(626): n is a, c, g, or t
  misc_feature (630)..(630): n is a, c, g, or t

SEQ ID NO: 389348 - DNA, 296 bp, Homo Sapiens; identical to SEQ ID NO: 371114

SEQ ID NO: 389349 - DNA, 468 bp, Homo Sapiens; identical to SEQ ID NO: 371126

SEQ ID NO: 389350 - DNA, 393 bp, Homo Sapiens; identical to SEQ ID NO: 371127

SEQ ID NO: 389351 - DNA, 1065 bp, Homo Sapiens; identical to SEQ ID NO: 371226
  misc_feature (547)..(547): n is a, c, g, or t

SEQ ID NO: 389352 - DNA, 1100 bp, Homo Sapiens; identical to SEQ ID NO: 371227
  misc_feature (803)..(803): n is a, c, g, or t
  misc_feature (812)..(812): n is a, c, g, or t

SEQ ID NO: 389353 - DNA, 1034 bp, Homo Sapiens; identical to SEQ ID NO: 371240

SEQ ID NO: 389354 - DNA, 1051 bp, Homo Sapiens; identical to SEQ ID NO: 371241
  misc_feature (973)..(1010): n is a, c, g, or t

SEQ ID NO: 389355 - DNA, 1169 bp, Homo Sapiens; identical to SEQ ID NO: 371292
  misc_feature (847)..(847): n is a, c, g, or t
  misc_feature (929)..(929): n is a, c, g, or t
  misc_feature (933)..(933): n is a, c, g, or t
  misc_feature (937)..(956): n is a, c, g, or t
  misc_feature (962)..(962): n is a, c, g, or t
  misc_feature (973)..(973): n is a, c, g, or t

SEQ ID NO: 389356 - DNA, 415 bp, Homo Sapiens; identical to SEQ ID NO: 371293

SEQ ID NO: 389357 - DNA, 1103 bp, Homo Sapiens; identical to SEQ ID NO: 371314
  misc_feature (980)..(980): n is a, c, g, or t

SEQ ID NO: 389358 - DNA, 607 bp, Homo Sapiens; identical to SEQ ID NO: 371315
  misc_feature (304)..(304): n is a, c, g, or t
  misc_feature (322)..(322): n is a, c, g, or t
  misc_feature (343)..(343): n is a, c, g, or t
  misc_feature (354)..(354): n is a, c, g, or t
  misc_feature (368)..(368): n is a, c, g, or t
  misc_feature (377)..(377): n is a, c, g, or t
  misc_feature (398)..(410): n is a, c, g, or t
  misc_feature (419)..(419): n is a, c, g, or t
  misc_feature (507)..(507): n is a, c, g, or t
  misc_feature (578)..(578): n is a, c, g, or t
  misc_feature (596)..(596): n is a, c, g, or t

SEQ ID NO: 389359 - DNA, 808 bp, Homo Sapiens; identical to SEQ ID NO: 371316

SEQ ID NO: 389360 - DNA, 498 bp, Homo Sapiens; identical to SEQ ID NO: 371317
  misc_feature (55)..(55): n is a, c, g, or t
  misc_feature (63)..(63): n is a, c, g, or t
  misc_feature (68)..(68): n is a, c, g, or t
  misc_feature (83)..(83): n is a, c, g, or t

SEQ ID NO: 389361 - DNA, 430 bp, Homo Sapiens; identical to SEQ ID NO: 371439

SEQ ID NO: 389362 - DNA, 554 bp, Homo Sapiens; identical to SEQ ID NO: 371440
  misc_feature (94)..(185): n is a, c, g, or t

SEQ ID NO: 389363 - DNA, 1315 bp, Homo Sapiens; identical to SEQ ID NO: 371480

SEQ ID NO: 389364 - DNA, 472 bp, Homo Sapiens; identical to SEQ ID NO: 371481

SEQ ID NO: 389365 - DNA, 235 bp, Homo Sapiens; identical to SEQ ID NO: 371482

SEQ ID NO: 389366 - DNA, 615 bp, Homo Sapiens; identical to SEQ ID NO: 371543
  misc_feature (265)..(382): n is a, c, g, or t
  misc_feature (525)..(561): n is a, c, g, or t

SEQ ID NO: 389367 - DNA, 469 bp, Homo Sapiens; identical to SEQ ID NO: 371544
  misc_feature (143)..(278): n is a, c, g, or t

SEQ ID NO: 389368 - DNA, 459 bp, Homo Sapiens; identical to SEQ ID NO: 371551

SEQ ID NO: 389369 - DNA, 350 bp, Homo Sapiens; identical to SEQ ID NO: 371552

SEQ ID NO: 389370 - DNA, 365 bp, Homo Sapiens; identical to SEQ ID NO: 371554

SEQ ID NO: 389371 - DNA, 323 bp, Homo Sapiens; identical to SEQ ID NO: 371555
  misc_feature (194)..(240): n is a, c, g, or t

SEQ ID NO: 389372 - DNA, 398 bp, Homo Sapiens; identical to SEQ ID NO: 371572

SEQ ID NO: 389373 - DNA, 412 bp, Homo Sapiens; identical to SEQ ID NO: 371573

SEQ ID NO: 389374 - DNA, 571 bp, Homo Sapiens; identical to SEQ ID NO: 371668

SEQ ID NO: 389375 - DNA, 450 bp, Homo Sapiens; identical to SEQ ID NO: 371669
  misc_feature (19)..(19): n is a, c, g, or t
  misc_feature (40)..(40): n is a, c, g, or t

SEQ ID NO: 389376 - DNA, 566 bp, Homo Sapiens; identical to SEQ ID NO: 371670

SEQ ID NO: 389377 - DNA, 634 bp, Homo Sapiens; identical to SEQ ID NO: 371671

SEQ ID NO: 389378 - DNA, 1087 bp, Homo Sapiens; identical to SEQ ID NO: 371672

SEQ ID NO: 389379 - DNA, 441 bp, Homo Sapiens; identical to SEQ ID NO: 371673

SEQ ID NO: 389380 - DNA, 389 bp, Homo Sapiens; identical to SEQ ID NO: 371674

SEQ ID NO: 389381 - DNA, 455 bp, Homo Sapiens; identical to SEQ ID NO: 371684
  misc_feature (93)..(131): n is a, c, g, or t

SEQ ID NO: 389382 - DNA, 572 bp, Homo Sapiens; identical to SEQ ID NO: 371685

SEQ ID NO: 389383 - DNA, 553 bp, Homo Sapiens; identical to SEQ ID NO: 371702
  misc_feature (153)..(210): n is a, c, g, or t
  misc_feature (255)..(312): n is a, c, g, or t

SEQ ID NO: 389384 - DNA, 689 bp, Homo Sapiens; identical to SEQ ID NO: 371703

SEQ ID NO: 389385 - DNA, 626 bp, Homo Sapiens; identical to SEQ ID NO: 371704
  misc_feature (26)..(26): n is a, c, g, or t
  misc_feature (48)..(48): n is a, c, g, or t
  misc_feature (56)..(56): n is a, c, g, or t

SEQ ID NO: 389386 - DNA, 587 bp, Homo Sapiens; identical to SEQ ID NO: 371745
  misc_feature (142)..(267): n is a, c, g, or t

SEQ ID NO: 389387 - DNA, 643 bp, Homo Sapiens; identical to SEQ ID NO: 371746
  misc_feature (306)..(431): n is a, c, g, or t

SEQ ID NO: 389388 - DNA, 644 bp, Homo Sapiens; identical to SEQ ID NO: 371747
  misc_feature (306)..(431): n is a, c, g, or t

SEQ ID NO: 389389 - DNA, 503 bp, Homo Sapiens; identical to SEQ ID NO: 371757
  misc_feature (85)..(152): n is a, c, g, or t
  misc_feature (162)..(204): n is a, c, g, or t
  misc_feature (419)..(427): n is a, c, g, or t

SEQ ID NO: 389390 - DNA, 427 bp, Homo Sapiens; identical to SEQ ID NO: 371758
  misc_feature (215)..(256): n is a, c, g, or t
  misc_feature (267)..(334): n is a, c, g, or t

SEQ ID NO: 389391 - DNA, 365 bp, Homo Sapiens; identical to SEQ ID NO: 371759

SEQ ID NO: 389392 - DNA, 469 bp, Homo Sapiens; identical to SEQ ID NO: 371760
  misc_feature (43)..(52): n is a, c, g, or t
  misc_feature (267)..(308): n is a, c, g, or t
  misc_feature (318)..(385): n is a, c, g, or t

SEQ ID NO: 389393 - DNA, 537 bp, Homo Sapiens; identical to SEQ ID NO: 371768

SEQ ID NO: 389394 - DNA, 545 bp, Homo Sapiens; identical to SEQ ID NO: 371769

SEQ ID NO: 389395 - DNA, 335 bp, Homo Sapiens; identical to SEQ ID NO: 371813

SEQ ID NO: 389396 - DNA, 497 bp, Homo Sapiens; identical to SEQ ID NO: 371814
  misc_feature (38)..(38): n is a, c, g, or t
  misc_feature (165)..(178): n is a, c, g, or t

SEQ ID NO: 389397 - DNA, 522 bp, Homo Sapiens; identical to SEQ ID NO: 371819
  misc_feature (284)..(400): n is a, c, g, or t

SEQ ID NO: 389398 - DNA, 516 bp, Homo Sapiens; identical to SEQ ID NO: 371820
  misc_feature (207)..(336): n is a, c, g, or t

SEQ ID NO: 389399 - DNA, 572 bp, Homo Sapiens; identical to SEQ ID NO: 371862

SEQ ID NO: 389400 - DNA, 500 bp, Homo Sapiens; identical to SEQ ID NO: 371863
  misc_feature (234)..(316): n is a, c, g, or t

SEQ ID NO: 389401 - DNA, 457 bp, Homo Sapiens; identical to SEQ ID NO: 371961

SEQ ID NO: 389402 - DNA, 839 bp, Homo Sapiens; identical to SEQ ID NO: 371962

SEQ ID NO: 389403 - DNA, 455 bp, Homo Sapiens; identical to SEQ ID NO: 372019

SEQ ID NO: 389404 - DNA, 492 bp, Homo Sapiens; identical to SEQ ID NO: 372020

SEQ ID NO: 389405 - DNA, 338 bp, Homo Sapiens; identical to SEQ ID NO: 372062
  misc_feature (209)..(269): n is a, c, g, or t

SEQ ID NO: 389406 - DNA, 697 bp, Homo Sapiens; identical to SEQ ID NO: 372063
  misc_feature (327)..(369): n is a, c, g, or t

SEQ ID NO: 389407 - DNA, 472 bp, Homo Sapiens; identical to SEQ ID NO: 372124

SEQ ID NO: 389408 - DNA, 632 bp, Homo Sapiens; identical to SEQ ID NO: 372125

SEQ ID NO: 389409 - DNA, 551 bp, Homo Sapiens; identical to SEQ ID NO: 372143
  misc_feature (428)..(476): n is a, c, g, or t

SEQ ID NO: 389410 - DNA, 573 bp, Homo Sapiens; identical to SEQ ID NO: 372144
  misc_feature (250)..(285): n is a, c, g, or t

SEQ ID NO: 389411 - DNA, 1089 bp, Homo Sapiens; identical to SEQ ID NO: 372177

SEQ ID NO: 389412 - DNA, 351 bp, Homo Sapiens; identical to SEQ ID NO: 372178

SEQ ID NO: 389413 - DNA, 359 bp, Homo Sapiens; identical to SEQ ID NO: 372179

SEQ ID NO: 389414 - DNA, 319 bp, Homo Sapiens; identical to SEQ ID NO: 372195

SEQ ID NO: 389415 - DNA, 479 bp, Homo Sapiens; identical to SEQ ID NO: 372196

SEQ ID NO: 389416 - DNA, 377 bp, Homo Sapiens; identical to SEQ ID NO: 372271

SEQ ID NO: 389417 - DNA, 482 bp, Homo Sapiens; identical to SEQ ID NO: 372272
  misc_feature (17)..(17): n is a, c, g, or t
  misc_feature (50)..(50): n is a, c, g, or t
  misc_feature (55)..(55): n is a, c, g, or t
  misc_feature (73)..(73): n is a, c, g, or t
  misc_feature (83)..(83): n is a, c, g, or t

SEQ ID NO: 389418 - DNA, 542 bp, Homo Sapiens; identical to SEQ ID NO: 372306

SEQ ID NO: 389419 - DNA, 604 bp, Homo Sapiens; identical to SEQ ID NO: 372307

SEQ ID NO: 389420 - DNA, 524 bp, Homo Sapiens; identical to SEQ ID NO: 372424
  misc_feature (187)..(187): n is a, c, g, or t
  misc_feature (335)..(345): n is a, c, g, or t

SEQ ID NO: 389421 - DNA, 601 bp, Homo Sapiens; identical to SEQ ID NO: 372425

SEQ ID NO: 389422 - DNA, 340 bp, Homo Sapiens; identical to SEQ ID NO: 372508

SEQ ID NO: 389423 - DNA, 481 bp, Homo Sapiens; identical to SEQ ID NO: 372509

SEQ ID NO: 389424 - DNA, 529 bp, Homo Sapiens; identical to SEQ ID NO: 372608

SEQ ID NO: 389425 - DNA, 694 bp, Homo Sapiens; identical to SEQ ID NO: 372609
  misc_feature (650)..(650): n is a, c, g, or t

SEQ ID NO: 389426 - DNA, 382 bp, Homo Sapiens; identical to SEQ ID NO: 372629

SEQ ID NO: 389427 - DNA, 568 bp, Homo Sapiens; identical to SEQ ID NO: 372630

SEQ ID NO: 389428 - DNA, 454 bp, Homo Sapiens; identical to SEQ ID NO: 372721

SEQ ID NO: 389429 - DNA, 355 bp, Homo Sapiens; identical to SEQ ID NO: 372722

SEQ ID NO: 389430 - DNA, 522 bp, Homo Sapiens; identical to SEQ ID NO: 372774

SEQ ID NO: 389431 - DNA, 825 bp, Homo Sapiens; identical to SEQ ID NO: 372775
  misc_feature (307)..(601): n is a, c, g, or t

SEQ ID NO: 389432 - DNA, 388 bp, Homo Sapiens; identical to SEQ ID NO: 372879

SEQ ID NO: 389433 - DNA, 390 bp, Homo Sapiens; identical to SEQ ID NO: 372880

SEQ ID NO: 389434 - DNA, 600 bp, Homo Sapiens; identical to SEQ ID NO: 372901

SEQ ID NO: 389435 - DNA, 387 bp, Homo Sapiens; identical to SEQ ID NO: 372902

SEQ ID NO: 389436 - DNA, 964 bp, Homo Sapiens; identical to SEQ ID NO: 372994

SEQ ID NO: 389437 - DNA, 275 bp, Homo Sapiens; identical to SEQ ID NO: 372995

SEQ ID NO: 389438 - DNA, 264 bp, Homo Sapiens; identical to SEQ ID NO: 373011

SEQ ID NO: 389439 - DNA, 202 bp, Homo Sapiens; identical to SEQ ID NO: 373012

SEQ ID NO: 389440 - DNA, 339 bp, Homo Sapiens; identical to SEQ ID NO: 373013

SEQ ID NO: 389441 - DNA, 526 bp, Homo Sapiens; identical to SEQ ID NO: 373014
  misc_feature (62)..(220): n is a, c, g, or t

SEQ ID NO: 389442 - DNA, 502 bp, Homo Sapiens; identical to SEQ ID NO: 373015

SEQ ID NO: 389443 - DNA, 425 bp, Homo Sapiens; identical to SEQ ID NO: 373022

SEQ ID NO: 389444 - DNA, 418 bp, Homo Sapiens; identical to SEQ ID NO: 373023

SEQ ID NO: 389445 - DNA, 517 bp, Homo Sapiens; identical to SEQ ID NO: 373033
  misc_feature (303)..(311): n is a, c, g, or t

SEQ ID NO: 389446 - DNA, 438 bp, Homo Sapiens; identical to SEQ ID NO: 373034
  misc_feature (335)..(344): n is a, c, g, or t

SEQ ID NO: 389447 - DNA, 706 bp, Homo Sapiens; identical to SEQ ID NO: 373038

SEQ ID NO: 389448 - DNA, 625 bp, Homo Sapiens; identical to SEQ ID NO: 373039

SEQ ID NO: 389449 - DNA, 658 bp, Homo Sapiens; identical to SEQ ID NO: 373040

SEQ ID NO: 389450 - DNA, 314 bp, Homo Sapiens; identical to SEQ ID NO: 373056

SEQ ID NO: 389451 - DNA, 445 bp, Homo Sapiens; identical to SEQ ID NO: 373057

SEQ ID NO: 389452 - DNA, 508 bp, Homo Sapiens; identical to SEQ ID NO: 373189

SEQ ID NO: 389453 - DNA, 485 bp, Homo Sapiens; identical to SEQ ID NO: 373190

SEQ ID NO: 389454 - DNA, 387 bp, Homo Sapiens; identical to SEQ ID NO: 373192

SEQ ID NO: 389455 - DNA, 401 bp, Homo Sapiens; identical to SEQ ID NO: 373193
  misc_feature (379)..(379): n is a, c, g, or t

SEQ ID NO: 389456 - DNA, 363 bp, Homo Sapiens; identical to SEQ ID NO: 373195
  misc_feature (209)..(233): n is a, c, g, or t

SEQ ID NO: 389457 - DNA, 276 bp, Homo Sapiens; identical to SEQ ID NO: 373196
  misc_feature (146)..(170): n is a, c, g, or t

SEQ ID NO: 389458 - DNA, 599 bp, Homo Sapiens; identical to SEQ ID NO: 373222
  misc_feature (184)..(201): n is a, c, g, or t

SEQ ID NO: 389459 - DNA, 575 bp, Homo Sapiens; identical to SEQ ID NO: 373223

SEQ ID NO: 389460 - DNA, 517 bp, Homo Sapiens; identical to SEQ ID NO: 373225

SEQ ID NO: 389461 - DNA, 467 bp, Homo Sapiens; identical to SEQ ID NO: 373226

SEQ ID NO: 389462 - DNA, 523 bp, Homo Sapiens; identical to SEQ ID NO: 373305

SEQ ID NO: 389463 - DNA, 523 bp, Homo Sapiens; identical to SEQ ID NO: 373306
  misc_feature (481)..(481): n is a, c, g, or t
  misc_feature (503)..(503): n is a, c, g, or t
  misc_feature (512)..(512): n is a, c, g, or t

SEQ ID NO: 389464 - DNA, 471 bp, Homo Sapiens; identical to SEQ ID NO: 373344
  misc_feature (188)..(335): n is a, c, g, or t

SEQ ID NO: 389465 - DNA, 248 bp, Homo Sapiens; identical to SEQ ID NO: 373345

SEQ ID NO: 389466 - DNA, 375 bp, Homo Sapiens; identical to SEQ ID NO: 373346
  misc_feature (177)..(324): n is a, c, g, or t

SEQ ID NO: 389467 - DNA, 631 bp, Homo Sapiens; identical to SEQ ID NO: 373517
  misc_feature (559)..(571): n is a, c, g, or t
  misc_feature (608)..(608): n is a, c, g, or t
  misc_feature (615)..(615): n is a, c, g, or t

SEQ ID NO: 389468 - DNA, 793 bp, Homo Sapiens; identical to SEQ ID NO: 373518
  misc_feature (33)..(33): n is a, c, g, or t
  misc_feature (143)..(143): n is a, c, g, or t
  misc_feature (148)..(148): n is a, c, g, or t
  misc_feature (400)..(412): n is a, c, g, or t

SEQ ID NO: 389469 - DNA, 377 bp, Homo Sapiens; identical to SEQ ID NO: 373541

SEQ ID NO: 389470 - DNA, 505 bp, Homo Sapiens; identical to SEQ ID NO: 373542

SEQ ID NO: 389471 - DNA, 524 bp, Homo Sapiens; identical to SEQ ID NO: 373623

SEQ ID NO: 389472 - DNA, 274 bp, Homo Sapiens; identical to SEQ ID NO: 373624

SEQ ID NO: 389473 - DNA, 366 bp, Homo Sapiens; identical to SEQ ID NO: 373660

SEQ ID NO: 389474 - DNA, 496 bp, Homo Sapiens; identical to SEQ ID NO: 373661

SEQ ID NO: 389475 - DNA, 272 bp, Homo Sapiens; identical to SEQ ID NO: 373671

SEQ ID NO: 389476 - DNA, 688 bp, Homo Sapiens; identical to SEQ ID NO: 373672

SEQ ID NO: 389477 - DNA, 139 bp, Homo Sapiens; identical to SEQ ID NO: 373677

SEQ ID NO: 389478 - DNA, 149 bp, Homo Sapiens; identical to SEQ ID NO: 373678

SEQ ID NO: 389479 - DNA, 479 bp, Homo Sapiens; identical to SEQ ID NO: 373749

SEQ ID NO: 389480 - DNA, 489 bp, Homo Sapiens; identical to SEQ ID NO: 373750

SEQ ID NO: 389481 - DNA, 436 bp, Homo Sapiens; identical to SEQ ID NO: 373804

SEQ ID NO: 389482 - DNA, 427 bp, Homo Sapiens; identical to SEQ ID NO: 373805

SEQ ID NO: 389483 - DNA, 253 bp, Homo Sapiens; identical to SEQ ID NO: 373815

SEQ ID NO: 389484 - DNA, 305 bp, Homo Sapiens; identical to SEQ ID NO: 373816
  misc_feature (295)..(295): n is a, c, g, or t

SEQ ID NO: 389485 - DNA, 474 bp, Homo Sapiens; identical to SEQ ID NO: 373989
  misc_feature (319)..(328): n is a, c, g, or t

SEQ ID NO: 389486 - DNA, 293 bp, Homo Sapiens; identical to SEQ ID NO: 373990

SEQ ID NO: 389487 - DNA, 248 bp, Homo Sapiens; identical to SEQ ID NO: 373991

SEQ ID NO: 389488 - DNA, 371 bp, Homo Sapiens; identical to SEQ ID NO: 374163
  misc_feature (158)..(189): n is a, c, g, or t

SEQ ID NO: 389489 - DNA, 339 bp, Homo Sapiens; identical to SEQ ID NO: 374164
  misc_feature (130)..(161): n is a, c, g, or t

SEQ ID NO: 389490 - DNA, 752 bp, Homo Sapiens; identical to SEQ ID NO: 374184
  misc_feature (14)..(14): n is a, c, g, or t

SEQ ID NO: 389491 - DNA, 506 bp, Homo Sapiens; identical to SEQ ID NO: 374185
  misc_feature (410)..(410): n is a, c, g, or t
  misc_feature (440)..(440): n is a, c, g, or t
  misc_feature (450)..(450): n is a, c, g, or t
  misc_feature (465)..(465): n is a, c, g, or t
  misc_feature (476)..(476): n is a, c, g, or t

SEQ ID NO: 389492 - DNA, 372 bp, Homo Sapiens; identical to SEQ ID NO: 374215
  misc_feature (22)..(22): n is a, c, g, or t
  misc_feature (346)..(346): n is a, c, g, or t

SEQ ID NO: 389493 - DNA, 540 bp, Homo Sapiens; identical to SEQ ID NO: 374216
  misc_feature (25)..(25): n is a, c, g, or t
  misc_feature (79)..(161): n is a, c, g, or t
  misc_feature (506)..(506): n is a, c, g, or t
  misc_feature (520)..(520): n is a, c, g, or t

SEQ ID NO: 389494 - DNA, 468 bp, Homo Sapiens; identical to SEQ ID NO: 374238
  misc_feature (114)..(221): n is a, c, g, or t

SEQ ID NO: 389495 - DNA, 1016 bp, Homo Sapiens; identical to SEQ ID NO: 374239
  misc_feature (652)..(759): n is a, c, g, or t

SEQ ID NO: 389496 - DNA, 481 bp, Homo Sapiens; identical to SEQ ID NO: 374240
  misc_feature (294)..(401): n is a, c, g, or t

SEQ ID NO: 389497 - DNA, 557 bp, Homo Sapiens; identical to SEQ ID NO: 374241
  misc_feature (156)..(263): n is a, c, g, or t

SEQ ID NO: 389498 - DNA, 890 bp, Homo Sapiens; identical to SEQ ID NO: 374242
  misc_feature (276)..(383): n is a, c, g, or t

SEQ ID NO: 389499 - DNA, 306 bp, Homo Sapiens; identical to SEQ ID NO: 374253

SEQ ID NO: 389500 - DNA, 401 bp, Homo Sapiens; identical to SEQ ID NO: 374254

SEQ ID NO: 389501 - DNA, 527 bp, Homo Sapiens; identical to SEQ ID NO: 374318

SEQ ID NO: 389502 - DNA, 586 bp, Homo Sapiens; identical to SEQ ID NO: 374319
  misc_feature (257)..(519): n is a, c, g, or t

SEQ ID NO: 389503 - DNA, 656 bp, Homo Sapiens; identical to SEQ ID NO: 374355

SEQ ID NO: 389504 - DNA, 563 bp, Homo Sapiens; identical to SEQ ID NO: 374356

SEQ ID NO: 389505 - DNA, 444 bp, Homo Sapiens; identical to SEQ ID NO: 374357

SEQ ID NO: 389506 - DNA, 375 bp, Homo Sapiens; identical to SEQ ID NO: 374358

SEQ ID NO: 389507 - DNA, 491 bp, Homo Sapiens; identical to SEQ ID NO: 374366
  misc_feature (81)..(165): n is a, c, g, or t
  misc_feature (476)..(476): n is a, c, g, or t

SEQ ID NO: 389508 - DNA, 534 bp, Homo Sapiens; identical to SEQ ID NO: 374367
  misc_feature (325)..(409): n is a, c, g, or t

SEQ ID NO: 389509 - DNA, 755 bp, Homo Sapiens; identical to SEQ ID NO: 374368

SEQ ID NO: 389510 - DNA, 372 bp, Homo Sapiens; identical to SEQ ID NO: 374372
  misc_feature (117)..(138): n is a, c, g, or t

SEQ ID NO: 389511 - DNA, 839 bp, Homo Sapiens; identical to SEQ ID NO: 374373
  misc_feature (694)..(711): n is a, c, g, or t

SEQ ID NO: 389512 - DNA, 498 bp, Homo Sapiens; identical to SEQ ID NO: 374374
  misc_feature (121)..(142): n is a, c, g, or t

SEQ ID NO: 389513 - DNA, 564 bp, Homo Sapiens; identical to SEQ ID NO: 374375
  misc_feature (94)..(113): n is a, c, g, or t

SEQ ID NO: 389514 - DNA, 913 bp, Homo Sapiens; identical to SEQ ID NO: 374390
  misc_feature (125)..(137): n is a, c, g, or t
  misc_feature (161)..(316): n is a, c, g, or t
  misc_feature (736)..(744): n is a, c, g, or t

SEQ ID NO: 389515 - DNA, 586 bp, Homo Sapiens; identical to SEQ ID NO: 374391
  misc_feature (196)..(351): n is a, c, g, or t
  misc_feature (375)..(391): n is a, c, g, or t

SEQ ID NO: 389516 - DNA, 546 bp, Homo Sapiens; identical to SEQ ID NO: 374412
  misc_feature (47)..(67): n is a, c, g, or t
  misc_feature (437)..(446): n is a, c, g, or t

SEQ ID NO: 389517 - DNA, 544 bp, Homo Sapiens; identical to SEQ ID NO: 374413
  misc_feature (201)..(221): n is a, c, g, or t

SEQ ID NO: 389518 - DNA, 396 bp, Homo Sapiens; identical to SEQ ID NO: 374414
  misc_feature (57)..(77): n is a, c, g, or t

SEQ ID NO: 389519 - DNA, 765 bp, Homo Sapiens; identical to SEQ ID NO: 374415
  misc_feature (54)..(54): n is a, c, g, or t

SEQ ID NO: 389520 - DNA, 581 bp, Homo Sapiens; identical to SEQ ID NO: 374581

SEQ ID NO: 389521 - DNA, 442 bp, Homo Sapiens; identical to SEQ ID NO: 374582
  misc_feature (20)..(20): n is a, c, g, or t

SEQ ID NO: 389522 - DNA, 679 bp, Homo Sapiens; identical to SEQ ID NO: 374606
  misc_feature (48)..(135): n is a, c, g, or t

SEQ ID NO: 389523 - DNA, 634 bp, Homo Sapiens; identical to SEQ ID NO: 374607

SEQ ID NO: 389524 - DNA, 225 bp, Homo Sapiens; identical to SEQ ID NO: 374618
  misc_feature (24)..(24): n is a, c, g, or t
  misc_feature (184)..(184): n is a, c, g, or t

SEQ ID NO: 389525 - DNA, 349 bp, Homo Sapiens; identical to SEQ ID NO: 374619
  misc_feature (30)..(30): n is a, c, g, or t

SEQ ID NO: 389526 - DNA, 483 bp, Homo Sapiens; identical to SEQ ID NO: 374789
  misc_feature (41)..(41): n is a, c, g, or t
  misc_feature (48)..(48): n is a, c, g, or t

SEQ ID NO: 389527 - DNA, 504 bp, Homo Sapiens; identical to SEQ ID NO: 374790
  misc_feature (110)..(110): n is a, c, g, or t
  misc_feature (286)..(286): n is a, c, g, or t

SEQ ID NO: 389528 - DNA, 438 bp, Homo Sapiens; identical to SEQ ID NO: 374839
  misc_feature (20)..(20): n is a, c, g, or t

SEQ ID NO: 389529 - DNA, 495 bp, Homo Sapiens; identical to SEQ ID NO: 374840
  misc_feature (399)..(399): n is a, c, g, or t

SEQ ID NO: 389530 - DNA, 645 bp, Homo Sapiens; identical to SEQ ID NO: 374848
  misc_feature (12)..(12): n is a, c, g, or t
  misc_feature (46)..(46): n is a, c, g, or t
  misc_feature (60)..(60): n is a, c, g, or t
  misc_feature (108)..(108): n is a, c, g, or t

SEQ ID NO: 389531 - DNA, 447 bp, Homo Sapiens; identical to SEQ ID NO: 374849

SEQ ID NO: 389532 - DNA, 507 bp, Homo Sapiens; identical to SEQ ID NO: 374902
  misc_feature (33)..(33): n is a, c, g, or t

SEQ ID NO: 389533 - DNA, 488 bp, Homo Sapiens; identical to SEQ ID NO: 374903
  misc_feature (32)..(32): n is a, c, g, or t
  misc_feature (37)..(37): n is a, c, g, or t
  misc_feature (71)..(71): n is a, c, g, or t
  misc_feature (103)..(103): n is a, c, g, or t

SEQ ID NO: 389534 - DNA, 459 bp, Homo Sapiens; identical to SEQ ID NO: 374913

SEQ ID NO: 389535 - DNA, 471 bp, Homo Sapiens; identical to SEQ ID NO: 374914
  misc_feature (27)..(27): n is a, c, g, or t
  misc_feature (32)..(32): n is a, c, g, or t
  misc_feature (39)..(39): n is a, c, g, or t
  misc_feature (51)..(51): n is a, c, g, or t

SEQ ID NO: 389536 - DNA, 546 bp, Homo Sapiens; identical to SEQ ID NO: 374940
  misc_feature (407)..(407): n is a, c, g, or t
  misc_feature (431)..(431): n is a, c, g, or t
  misc_feature (436)..(436): n is a, c, g, or t
  misc_feature (475)..(475): n is a, c, g, or t
  misc_feature (518)..(518): n is a, c, g, or t

SEQ ID NO: 389537 - DNA, 464 bp, Homo Sapiens; identical to SEQ ID NO: 374941
  misc_feature (134)..(160): n is a, c, g, or t
  misc_feature (422)..(422): n is a, c, g, or t

SEQ ID NO: 389538 - DNA, 363 bp, Homo Sapiens; identical to SEQ ID NO: 374963
  misc_feature (50)..(50): n is a, c, g, or t
  misc_feature (93)..(93): n is a, c, g, or t
  misc_feature (132)..(132): n is a, c, g, or t
  misc_feature (145)..(145): n is a, c, g, or t
  misc_feature (210)..(210): n is a, c, g, or t

SEQ ID NO: 389539 - DNA, 518 bp, Homo Sapiens; identical to SEQ ID NO: 374964
  misc_feature (85)..(85): n is a, c, g, or t
  misc_feature (157)..(157): n is a, c, g, or t

SEQ ID NO: 389540 - DNA, 474 bp, Homo Sapiens; identical to SEQ ID NO: 374976
  misc_feature (272)..(272): n is a, c, g, or t
  misc_feature (277)..(277): n is a, c, g, or t
  misc_feature (314)..(314): n is a, c, g, or t
  misc_feature (389)..(389): n is a, c, g, or t
  misc_feature (396)..(396): n is a, c, g, or t
  misc_feature (437)..(437): n is a, c, g, or t
  misc_feature (446)..(446): n is a, c, g, or t
  misc_feature (452)..(452): n is a, c, g, or t

SEQ ID NO: 389541 - DNA, 521 bp, Homo Sapiens; identical to SEQ ID NO: 374977
  misc_feature (406)..(406): n is a, c, g, or t
  misc_feature (442)..(442): n is a, c, g, or t
  misc_feature (461)..(461): n is a, c, g, or t
  misc_feature (510)..(510): n is a, c, g, or t

SEQ ID NO: 389542 - DNA, 551 bp, Homo Sapiens; identical to SEQ ID NO: 374990
  misc_feature (422)..(422): n is a, c, g, or t
  misc_feature (541)..(541): n is a, c, g, or t

SEQ ID NO: 389543 - DNA, 499 bp, Homo Sapiens; identical to SEQ ID NO: 374991

SEQ ID NO: 389544 - DNA, 412 bp, Homo Sapiens; identical to SEQ ID NO: 374997

SEQ ID NO: 389545 - DNA, 465 bp, Homo Sapiens; identical to SEQ ID NO: 374998
  misc_feature (36)..(36): n is a, c, g, or t
  misc_feature (51)..(51): n is a, c, g, or t
  misc_feature (57)..(57): n is a, c, g, or t
  misc_feature (104)..(104): n is a, c, g, or t
  misc_feature (195)..(195): n is a, c, g, or t

SEQ ID NO: 389546 - DNA, 605 bp, Homo Sapiens; identical to SEQ ID NO: 375049
  misc_feature (418)..(418): n is a, c, g, or t
  misc_feature (527)..(527): n is a, c, g, or t

SEQ ID NO: 389547 - DNA, 521 bp, Homo Sapiens; identical to SEQ ID NO: 375050
  misc_feature (391)..(391): n is a, c, g, or t
  misc_feature (422)..(422): n is a, c, g, or t
  misc_feature (445)..(445): n is a, c, g, or t
  misc_feature (450)..(450): n is a, c, g, or t
  misc_feature (479)..(479): n is a, c, g, or t
  misc_feature (499)..(499): n is a, c, g, or t
  misc_feature (507)..(507): n is a, c, g, or t

SEQ ID NO: 389548 - DNA, 437 bp, Homo Sapiens; identical to SEQ ID NO: 375052

SEQ ID NO: 389549 - DNA, 425 bp, Homo Sapiens; identical to SEQ ID NO: 375053
  misc_feature (34)..(34): n is a, c, g, or t
  misc_feature (391)..(391): n is a, c, g, or t

SEQ ID NO: 389550 - DNA, 432 bp, Homo Sapiens; identical to SEQ ID NO: 375141
  misc_feature (396)..(396): n is a, c, g, or t

SEQ ID NO: 389551 - DNA, 535 bp, Homo Sapiens; identical to SEQ ID NO: 375142
  misc_feature (28)..(28): n is a, c, g, or t
  misc_feature (67)..(67): n is a, c, g, or t
  misc_feature (78)..(78): n is a, c, g, or t
  misc_feature (83)..(83): n is a, c, g, or t
  misc_feature (91)..(91): n is a, c, g, or t
  misc_feature (122)..(122): n is a, c, g, or t
  misc_feature (135)..(135): n is a, c, g, or t
  misc_feature (180)..(180): n is a, c, g, or t

SEQ ID NO: 389552 - DNA, 279 bp, Homo Sapiens; identical to SEQ ID NO: 375148

SEQ ID NO: 389553 - DNA, 529 bp, Homo Sapiens; identical to SEQ ID NO: 375149

SEQ ID NO: 389554 - DNA, 579 bp, Homo Sapiens; identical to SEQ ID NO: 375188
  misc_feature (20)..(20): n is a, c, g, or t

SEQ ID NO: 389555 - DNA, 411 bp, Homo Sapiens; identical to SEQ ID NO: 375189
  misc_feature (66)..(66): n is a, c, g, or t

SEQ ID NO: 389556 - DNA, 833 bp, Homo Sapiens; identical to SEQ ID NO: 375191
  misc_feature (36)..(36): n is a, c, g, or t
  misc_feature (581)..(589): n is a, c, g, or t

SEQ ID NO: 389557 - DNA, 442 bp, Homo Sapiens; identical to SEQ ID NO: 375192
  misc_feature (26)..(26): n is a, c, g, or t
  misc_feature (44)..(44): n is a, c, g, or t
  misc_feature (190)..(198): n is a, c, g, or t

SEQ ID NO: 389558 - DNA, 649 bp, Homo Sapiens; identical to SEQ ID NO: 375228
  misc_feature (470)..(470): n is a, c, g, or t
  misc_feature (564)..(564): n is a, c, g, or t
  misc_feature (584)..(584): n is a, c, g, or t
  misc_feature (602)..(602): n is a, c, g, or t
  misc_feature (609)..(609): n is a, c, g, or t

SEQ ID NO: 389559 - DNA, 476 bp, Homo Sapiens; identical to SEQ ID NO: 375229

SEQ ID NO: 389560 - DNA, 430 bp, Homo Sapiens; identical to SEQ ID NO: 375246

SEQ ID NO: 389561 - DNA, 477 bp, Homo Sapiens; identical to SEQ ID NO: 375247
  misc_feature (395)..(395): n is a, c, g, or t

SEQ ID NO: 389562 - DNA, 508 bp, Homo Sapiens; identical to SEQ ID NO: 375272
  misc_feature (433)..(433): n is a, c, g, or t
  misc_feature (466)..(466): n is a, c, g, or t
  misc_feature (476)..(476): n is a, c, g, or t
  misc_feature (482)..(482): n is a, c, g, or t

SEQ ID NO: 389563 - DNA, 397 bp, Homo Sapiens; identical to SEQ ID NO: 375273

SEQ ID NO: 389564 - DNA, 332 bp, Homo Sapiens; identical to SEQ ID NO: 375286

SEQ ID NO: 389565 - DNA, 618 bp, Homo Sapiens; identical to SEQ ID NO: 375287
  misc_feature (30)..(30): n is a, c, g, or t
  misc_feature (36)..(36): n is a, c, g, or t
  misc_feature (41)..(41): n is a, c, g, or t
  misc_feature (80)..(80): n is a, c, g, or t
  misc_feature (92)..(92): n is a, c, g, or t
  misc_feature (137)..(137): n is a, c, g, or t
  misc_feature (144)..(144): n is a, c, g, or t
  misc_feature (173)..(173): n is a, c, g, or t
  misc_feature (199)..(199): n is a, c, g, or t
  misc_feature (208)..(208): n is a, c, g, or t
  misc_feature (236)..(275): n is a, c, g, or t

SEQ ID NO: 389566 - DNA, 349 bp, Homo Sapiens; identical to SEQ ID NO: 375352

SEQ ID NO: 389567 - DNA, 484 bp, Homo Sapiens; identical to SEQ ID NO: 375353
  misc_feature (12)..(12): n is a, c, g, or t
  misc_feature (28)..(28): n is a, c, g, or t
  misc_feature (379)..(412): n is a, c, g, or t

SEQ ID NO: 389568 - DNA, 482 bp, Homo Sapiens; identical to SEQ ID NO: 375354
  misc_feature (377)..(377): n is a, c, g, or t
  misc_feature (414)..(414): n is a, c, g, or t
  misc_feature (472)..(472): n is a, c, g, or t

SEQ ID NO: 389569 - DNA, 795 bp, Homo Sapiens; identical to SEQ ID NO: 375355

SEQ ID NO: 389570 - DNA, 930 bp, Homo Sapiens; identical to SEQ ID NO: 375358

SEQ ID NO: 389571 - DNA, 111 bp, Homo Sapiens; identical to SEQ ID NO: 375359

SEQ ID NO: 389572 - DNA, 482 bp, Homo Sapiens; identical to SEQ ID NO: 375465
  misc_feature (43)..(43): n is a, c, g, or t
  misc_feature (50)..(50): n is a, c, g, or t
  misc_feature (67)..(94): n is a, c, g, or t

SEQ ID NO: 389573 - DNA, 527 bp, Homo Sapiens; identical to SEQ ID NO: 375466
  misc_feature (509)..(509): n is a, c, g, or t

SEQ ID NO: 389574 - DNA, 540 bp, Homo Sapiens; identical to SEQ ID NO: 375501
  misc_feature (113)..(113): n is a, c, g, or t
  misc_feature (177)..(177): n is a, c, g, or t

SEQ ID NO: 389575 - DNA, 531 bp, Homo Sapiens; identical to SEQ ID NO: 375502
  misc_feature (28)..(28): n is a, c, g, or t
  misc_feature (54)..(54): n is a, c, g, or t

SEQ ID NO: 389576 - DNA, 504 bp, Homo Sapiens; identical to SEQ ID NO: 375528

SEQ ID NO: 389577 - DNA, 536 bp, Homo Sapiens; identical to SEQ ID NO: 375529

SEQ ID NO: 389578 - DNA, 365 bp, Homo Sapiens; identical to SEQ ID NO: 375530
  misc_feature (15)..(15): n is a, c, g, or t
  misc_feature (60)..(60): n is a, c, g, or t

SEQ ID NO: 389579 - DNA, 446 bp, Homo Sapiens; identical to SEQ ID NO: 375531
  misc_feature (37)..(37): n is a, c, g, or t
  misc_feature (49)..(49): n is a, c, g, or t
  misc_feature (167)..(167): n is a, c, g, or t

SEQ ID NO: 389580 - DNA, 521 bp, Homo Sapiens; identical to SEQ ID NO: 375539
  misc_feature (25)..(25): n is a, c, g, or t

SEQ ID NO: 389581 - DNA, 500 bp, Homo Sapiens; identical to SEQ ID NO: 375540
  misc_feature (76)..(76): n is a, c, g, or t
  misc_feature (88)..(88): n is a, c, g, or t
  misc_feature (450)..(450): n is a, c, g, or t

SEQ ID NO: 389582 - DNA, 535 bp, Homo Sapiens; identical to SEQ ID NO: 375551

SEQ ID NO: 389583 - DNA, 450 bp, Homo Sapiens; identical to SEQ ID NO: 375552
  misc_feature (19)..(19): n is a, c, g, or t
  misc_feature (59)..(59): n is a, c, g, or t

SEQ ID NO: 389584 - DNA, 511 bp, Homo Sapiens; identical to SEQ ID NO: 375631
  misc_feature (385)..(385): n is a, c, g, or t
  misc_feature (459)..(459): n is a, c, g, or t
  misc_feature (492)..(492): n is a, c, g, or t

SEQ ID NO: 389585 - DNA, 449 bp, Homo Sapiens; identical to SEQ ID NO: 375632
  misc_feature (396)..(396): n is a, c, g, or t
  misc_feature (401)..(401): n is a, c, g, or t
  misc_feature (410)..(410): n is a, c, g, or t
  misc_feature (433)..(433): n is a, c, g, or t

SEQ ID NO: 389586 - DNA, 731 bp, Homo Sapiens; identical to SEQ ID NO: 375647
  misc_feature (136)..(241): n is a, c, g, or t
  misc_feature (368)..(368): n is a, c, g, or t
  misc_feature (445)..(554): n is a, c, g, or t
  misc_feature (605)..(655): n is a, c, g, or t

SEQ ID NO: 389587 - DNA, 366 bp, Homo Sapiens; identical to SEQ ID NO: 375648
  misc_feature (148)..(222): n is a, c, g, or t

SEQ ID NO: 389588 - DNA, 513 bp, Homo Sapiens; identical to SEQ ID NO: 375656
  misc_feature (66)..(66): n is a, c, g, or t

SEQ ID NO: 389589 - DNA, 451 bp, Homo Sapiens; identical to SEQ ID NO: 375657
  misc_feature (22)..(22): n is a, c, g, or t
  misc_feature (50)..(50): n is a, c, g, or t
  misc_feature (60)..(60): n is a, c, g, or t

SEQ ID NO: 389590 - DNA, 370 bp, Homo Sapiens; identical to SEQ ID NO: 375687

SEQ ID NO: 389591 - DNA, 432 bp, Homo Sapiens; identical to SEQ ID NO: 375688
  misc_feature (363)..(363): n is a, c, g, or t
  misc_feature (374)..(374): n is a, c, g, or t
  misc_feature (384)..(384): n is a, c, g, or t
  misc_feature (414)..(414): n is a, c, g, or t

SEQ ID NO: 389592 - DNA, 483 bp, Homo Sapiens; identical to SEQ ID NO: 375809
  misc_feature (53)..(53): n is a, c, g, or t
  misc_feature (117)..(217): n is a, c, g, or t

SEQ ID NO: 389593 - DNA, 457 bp, Homo Sapiens; identical to SEQ ID NO: 375810

SEQ ID NO: 389594 - DNA, 371 bp, Homo Sapiens; identical to SEQ ID NO: 375816
  misc_feature (247)..(247): n is a, c, g, or t
  misc_feature (278)..(278): n is a, c, g, or t
  misc_feature (297)..(297): n is a, c, g, or t
  misc_feature (328)..(328): n is a, c, g, or t
  misc_feature (348)..(348): n is a, c, g, or t
  misc_feature (361)..(361): n is a, c, g, or t

SEQ ID NO: 389595 - DNA, 431 bp, Homo Sapiens; identical to SEQ ID NO: 375817
  misc_feature (391)..(391): n is a, c, g, or t

SEQ ID NO: 389596 - DNA, 372 bp, Homo Sapiens; identical to SEQ ID NO: 375845

SEQ ID NO: 389597 - DNA, 593 bp, Homo Sapiens; identical to SEQ ID NO: 375846
  misc_feature (87)..(87): n is a, c, g, or t

SEQ ID NO: 389598 - DNA, 475 bp, Homo Sapiens; identical to SEQ ID NO: 375850

SEQ ID NO: 389599 - DNA, 498 bp, Homo Sapiens; identical to SEQ ID NO: 375851
  misc_feature (444)..(444): n is a, c, g, or t

SEQ ID NO: 389600 - DNA, 405 bp, Homo Sapiens; identical to SEQ ID NO: 375864

SEQ ID NO: 389601 - DNA, 457 bp, Homo Sapiens; identical to SEQ ID NO: 375865
  misc_feature (96)..(96): n is a, c, g, or t

SEQ ID NO: 389602 - DNA, 392 bp, Homo Sapiens; identical to SEQ ID NO: 375900
  misc_feature (16)..(16): n is a, c, g, or t

SEQ ID NO: 389603 - DNA, 463 bp, Homo Sapiens; identical to SEQ ID NO: 375901

SEQ ID NO: 389604 - DNA, 499 bp, Homo Sapiens; identical to SEQ ID NO: 375915
  misc_feature (481)..(481): n is a, c, g, or t

SEQ ID NO: 389605 - DNA, 484 bp, Homo Sapiens; identical to SEQ ID NO: 375916
  misc_feature (29)..(29): n is a, c, g, or t
  misc_feature (51)..(51): n is a, c, g, or t
  misc_feature (103)..(103): n is a, c, g, or t
  misc_feature (127)..(127): n is a, c, g, or t

SEQ ID NO: 389606 - DNA, 569 bp, Homo Sapiens; identical to SEQ ID NO: 375945

SEQ ID NO: 389607 - DNA, 434 bp, Homo Sapiens; identical to SEQ ID NO: 375946
  misc_feature (18)..(18): n is a, c, g, or t
  misc_feature (33)..(33): n is a, c, g, or t

SEQ ID NO: 389608 - DNA, 451 bp, Homo Sapiens; identical to SEQ ID NO: 375977

SEQ ID NO: 389609 - DNA, 490 bp, Homo Sapiens; identical to SEQ ID NO: 375978
  misc_feature (467)..(467): n is a, c, g, or t
  misc_feature (475)..(475): n is a, c, g, or t

SEQ ID NO: 389610 - DNA, 475 bp, Homo Sapiens; identical to SEQ ID NO: 376037
  misc_feature (368)..(368): n is a, c, g, or t
  misc_feature (449)..(449): n is a, c, g, or t

SEQ ID NO: 389611 - DNA, 720 bp, Homo Sapiens; identical to SEQ ID NO: 376038
  misc_feature (648)..(648): n is a, c, g, or t
  misc_feature (683)..(683): n is a, c, g, or t

SEQ ID NO: 389612 - DNA, 685 bp, Homo Sapiens; identical to SEQ ID NO: 376086
  misc_feature (300)..(300): n is a, c, g, or t
  misc_feature (576)..(576): n is a, c, g, or t
  misc_feature (592)..(593): n is a, c, g, or t
  misc_feature (643)..(643): n is a, c, g, or t

SEQ ID NO: 389613 - DNA, 776 bp, Homo Sapiens; identical to SEQ ID NO: 376087
  misc_feature (733)..(733): n is a, c, g, or t

SEQ ID NO: 389614 - DNA, 683 bp, Homo Sapiens; identical to SEQ ID NO: 376115
  misc_feature (59)..(83): n is a, c, g, or t

SEQ ID NO: 389615 - DNA, 432 bp, Homo Sapiens; identical to SEQ ID NO: 376116
  misc_feature (23)..(23): n is a, c, g, or t
  misc_feature (210)..(210): n is a, c, g, or t
  misc_feature (220)..(220): n is a, c, g, or t

SEQ ID NO: 389616 - DNA, 446 bp, Homo Sapiens; identical to SEQ ID NO: 376117

SEQ ID NO: 389617 - DNA, 537 bp, Homo Sapiens; identical to SEQ ID NO: 376236
  misc_feature (68)..(68): n is a, c, g, or t

SEQ ID NO: 389618 - DNA, 516 bp, Homo Sapiens; identical to SEQ ID NO: 376237

SEQ ID NO: 389619 - DNA, 1533 bp, Homo Sapiens; identical to SEQ ID NO: 376313
  misc_feature (544)..(544): n is a, c, g, or t

SEQ ID NO: 389620 - DNA, 463 bp, Homo Sapiens; identical to SEQ ID NO: 376314

SEQ ID NO: 389621 - DNA, 415 bp, Homo Sapiens; identical to SEQ ID NO: 376378
  misc_feature (35)..(35): n is a, c, g, or t

SEQ ID NO: 389622 - DNA, 501 bp, Homo Sapiens; identical to SEQ ID NO: 376379

SEQ ID NO: 389623 - DNA, 464 bp, Homo Sapiens; identical to SEQ ID NO: 376405
  misc_feature (313)..(313): n is a, c, g, or t
  misc_feature (324)..(324): n is a, c, g, or t

SEQ ID NO: 389624 - DNA, 417 bp, Homo Sapiens; identical to SEQ ID NO: 376406
  misc_feature (107)..(107): n is a, c, g, or t
  misc_feature (281)..(306): n is a, c, g, or t

SEQ ID NO: 389625 - DNA, 635 bp, Homo Sapiens; identical to SEQ ID NO: 376476
  misc_feature (32)..(32): n is a, c, g, or t
  misc_feature (35)..(35): n is a, c, g, or t
  misc_feature (443)..(493): n is a, c, g, or t
  misc_feature (545)..(545): n is a, c, g, or t
  misc_feature (572)..(572): n is a, c, g, or t
  misc_feature (585)..(585): n is a, c, g, or t
  misc_feature (593)..(593): n is a, c, g, or t
  misc_feature (599)..(599): n is a, c, g, or t
  misc_feature (606)..(606): n is a, c, g, or t
  misc_feature (620)..(620): n is a, c, g, or t

SEQ ID NO: 389626 - DNA, 511 bp, Homo Sapiens; identical to SEQ ID NO: 376477
  misc_feature (176)..(227): n is a, c, g, or t
  misc_feature (430)..(430): n is a, c, g, or t
  misc_feature (458)..(458): n is a, c, g, or t
  misc_feature (491)..(491): n is a, c, g, or t
  misc_feature (497)..(497): n is a, c, g, or t

SEQ ID NO: 389627 - DNA, 540 bp, Homo Sapiens; identical to SEQ ID NO: 376500

SEQ ID NO: 389628 - DNA, 400 bp, Homo Sapiens; identical to SEQ ID NO: 376501
  misc_feature (373)..(373): n is a, c, g, or t

SEQ ID NO: 389629 - DNA, 561 bp, Homo Sapiens; identical to SEQ ID NO: 376620

SEQ ID NO: 389630 - DNA, 497 bp, Homo Sapiens; identical to SEQ ID NO: 376621
  misc_feature (32)..(32): n is a, c, g, or t
  misc_feature (59)..(59): n is a, c, g, or t
  misc_feature (120)..(120): n is a, c, g, or t

SEQ ID NO: 389631 - DNA, 305 bp, Homo Sapiens; identical to SEQ ID NO: 376725

SEQ ID NO: 389632 - DNA, 453 bp, Homo Sapiens; identical to SEQ ID NO: 376726
  misc_feature (34)..(34): n is a, c, g, or t
  misc_feature (69)..(69): n is a, c, g, or t
  misc_feature (80)..(80): n is a, c, g, or t
  misc_feature (123)..(155): n is a, c, g, or t
  misc_feature (161)..(161): n is a, c, g, or t

SEQ ID NO: 389633 - DNA, 445 bp, Homo Sapiens; identical to SEQ ID NO: 376901

SEQ ID NO: 389634 - DNA, 561 bp, Homo Sapiens; identical to SEQ ID NO: 376902

SEQ ID NO: 389635 - DNA, 149 bp, Homo Sapiens; identical to SEQ ID NO: 376903

SEQ ID NO: 389636 - DNA, 353 bp, Homo Sapiens; identical to SEQ ID NO: 377176

SEQ ID NO: 389637 - DNA, 424 bp, Homo Sapiens; identical to SEQ ID NO: 377177

SEQ ID NO: 389638 - DNA, 473 bp, Homo Sapiens; identical to SEQ ID NO: 377206

SEQ ID NO: 389639 - DNA, 621 bp, Homo Sapiens; identical to SEQ ID NO: 377207
  misc_feature (230)..(270): n is a, c, g, or t

SEQ ID NO: 389640 - DNA, 164 bp, Homo Sapiens; identical to SEQ ID NO: 377419

SEQ ID NO: 389641 - DNA, 165 bp, Homo Sapiens; identical to SEQ ID NO: 377420

SEQ ID NO: 389642 - DNA, 804 bp, Homo Sapiens; identical to SEQ ID NO: 377563
  misc_feature (55)..(152): n is a, c, g, or t

SEQ ID NO: 389643 - DNA, 513 bp, Homo Sapiens; identical to SEQ ID NO: 377564

SEQ ID NO: 389644 - DNA, 727 bp, Homo Sapiens; identical to SEQ ID NO: 377626

SEQ ID NO: 389645 - DNA, 477 bp, Homo Sapiens; identical to SEQ ID NO: 377627
  misc_feature (30)..(30): n is a, c, g, or t
  misc_feature (69)..(69): n is a, c, g, or t
  misc_feature (92)..(92): n is a, c, g, or t
  misc_feature (162)..(162): n is a, c, g, or t
  misc_feature (169)..(169): n is a, c, g, or t

SEQ ID NO: 389646 - DNA, 575 bp, Homo Sapiens; identical to SEQ ID NO: 377656
  misc_feature (494)..(525): n is a, c, g, or t

SEQ ID NO: 389647 - DNA, 595 bp, Homo Sapiens; identical to SEQ ID NO: 377657
  misc_feature (109)..(125): n is a, c, g, or t
  misc_feature (445)..(462): n is a, c, g, or t
  misc_feature (485)..(529): n is a, c, g, or t

SEQ ID NO: 389648 - DNA, 493 bp, Homo Sapiens; identical to SEQ ID NO: 377680
  misc_feature (72)..(174): n is a, c, g, or t

SEQ ID NO: 389649 - DNA, 375 bp, Homo Sapiens; identical to SEQ ID NO: 377681

SEQ ID NO: 389650 - DNA, 667 bp, Homo Sapiens; identical to SEQ ID NO: 377840
  misc_feature (31)..(31): n is a, c, g, or t
  misc_feature (95)..(95): n is a, c, g, or t

SEQ ID NO: 389651 - DNA, 576 bp, Homo Sapiens; identical to SEQ ID NO: 377841
  misc_feature (430)..(430): n is a, c, g, or t
  misc_feature (519)..(519): n is a, c, g, or t

SEQ ID NO: 389652 - DNA, 604 bp, Homo Sapiens; identical to SEQ ID NO: 377860

SEQ ID NO: 389653 - DNA, 419 bp, Homo Sapiens; identical to SEQ ID NO: 377861

SEQ ID NO: 389654 - DNA, 461 bp, Homo Sapiens; identical to SEQ ID NO: 377965

SEQ ID NO: 389655 - DNA, 459 bp, Homo Sapiens; identical to SEQ ID NO: 377966
  misc_feature (415)..(415): n is a, c, g, or t

SEQ ID NO: 389656 - DNA, 522 bp, Homo Sapiens; identical to SEQ ID NO: 378186

SEQ ID NO: 389657 - DNA, 463 bp, Homo Sapiens; identical to SEQ ID NO: 378187
  misc_feature (29)..(29): n is a, c, g, or t
  misc_feature (34)..(34): n is a, c, g, or t
  misc_feature (48)..(48): n is a, c, g, or t
  misc_feature (130)..(130): n is a, c, g, or t

SEQ ID NO: 389658 - DNA, 202 bp, Homo Sapiens; identical to SEQ ID NO: 378247
  misc_feature (89)..(149): n is a, c, g, or t

SEQ ID NO: 389659 - DNA, 435 bp, Homo Sapiens; identical to SEQ ID NO: 378248
  misc_feature (311)..(371): n is a, c, g, or t

SEQ ID NO: 389660 - DNA, 742 bp, Homo Sapiens; identical to SEQ ID NO: 378385

SEQ ID NO: 389661 - DNA, 371 bp, Homo Sapiens; identical to SEQ ID NO: 378386

SEQ ID NO: 389662 - DNA, 1051 bp, Homo Sapiens; identical to SEQ ID NO: 378509

SEQ ID NO: 389663 - DNA, 643 bp, Homo Sapiens; identical to SEQ ID NO: 378510

SEQ ID NO: 389664 - DNA, 529 bp, Homo Sapiens; identical to SEQ ID NO: 378592

SEQ ID NO: 389665 - DNA, 458 bp, Homo Sapiens; identical to SEQ ID NO: 378593
  misc_feature (27)..(27): n is a, c, g, or t
  misc_feature (48)..(48): n is a, c, g, or t
  misc_feature (54)..(54): n is a, c, g, or t
  misc_feature (71)..(71): n is a, c, g, or t
  misc_feature (82)..(82): n is a, c, g, or t

SEQ ID NO: 389666 - DNA, 572 bp, Homo Sapiens; identical to SEQ ID NO: 378641
  misc_feature (43)..(43): n is a, c, g, or t
  misc_feature (101)..(101): n is a, c, g, or t
  misc_feature (364)..(364): n is a, c, g, or t

SEQ ID NO: 389667 - DNA, 393 bp, Homo Sapiens; identical to SEQ ID NO: 378642
  misc_feature (24)..(24): n is a, c, g, or t
  misc_feature (360)..(360): n is a, c, g, or t

SEQ ID NO: 389668 - DNA, 527 bp, Homo Sapiens; identical to SEQ ID NO: 378682

SEQ ID NO: 389669 - DNA, 426 bp, Homo Sapiens; identical to SEQ ID NO: 378683
  misc_feature (347)..(347): n is a, c, g, or t

SEQ ID NO: 389670 - DNA, 566 bp, Homo Sapiens; identical to SEQ ID NO: 378696
  misc_feature (59)..(59): n is a, c, g, or t
  misc_feature (66)..(66): n is a, c, g, or t
  misc_feature (113)..(113): n is a, c, g, or t
  misc_feature (183)..(183): n is a, c, g, or t
  misc_feature (458)..(509): n is a, c, g, or t
  misc_feature (537)..(537): n is a, c, g, or t

SEQ ID NO: 389671 - DNA, 391 bp, Homo Sapiens; identical to SEQ ID NO: 378697

SEQ ID NO: 389672 - DNA, 553 bp, Homo Sapiens; identical to SEQ ID NO: 378704
  misc_feature (538)..(538): n is a, c, g, or t

SEQ ID NO: 389673 - DNA, 416 bp, Homo Sapiens; identical to SEQ ID NO: 378705
  misc_feature (352)..(352): n is a, c, g, or t

SEQ ID NO: 389674 - DNA, 541 bp, Homo Sapiens; identical to SEQ ID NO: 378717
  misc_feature (15)..(15): n is a, c, g, or t

SEQ ID NO: 389675 - DNA, 408 bp, Homo Sapiens; identical to SEQ ID NO: 378718
  misc_feature (27)..(27): n is a, c, g, or t
  misc_feature (119)..(119): n is a, c, g, or t

SEQ ID NO: 389676 - DNA, 503 bp, Homo Sapiens; identical to SEQ ID NO: 378719
  misc_feature (31)..(31): n is a, c, g, or t
  misc_feature (41)..(41): n is a, c, g, or t

SEQ ID NO: 389677 - DNA, 381 bp, Homo Sapiens; identical to SEQ ID NO: 378727
  misc_feature (204)..(204): n is a, c, g, or t
  misc_feature (219)..(219): n is a, c, g, or t

SEQ ID NO: 389678 - DNA, 441 bp, Homo Sapiens; identical to SEQ ID NO: 378728
  misc_feature (27)..(27): n is a, c, g, or t

SEQ ID NO: 389679 - DNA, 479 bp, Homo Sapiens; identical to SEQ ID NO: 378732

SEQ ID NO: 389680 - DNA, 505 bp, Homo Sapiens; identical to SEQ ID NO: 378733
  misc_feature (411)..(411): n is a, c, g, or t
  misc_feature (445)..(445): n is a, c, g, or t
  misc_feature (473)..(473): n is a, c, g, or t
  misc_feature (481)..(481): n is a, c, g, or t

SEQ ID NO: 389681 - DNA, 368 bp, Homo Sapiens; identical to SEQ ID NO: 378740
  misc_feature (16)..(16): n is a, c, g, or t
  misc_feature (194)..(194): n is a, c, g, or t

SEQ ID NO: 389682 - DNA, 340 bp, Homo Sapiens; identical to SEQ ID NO: 378741
  misc_feature (249)..(249): n is a, c, g, or t

SEQ ID NO: 389683 - DNA, 436 bp, Homo Sapiens; identical to SEQ ID NO: 378753
  misc_feature (89)..(89): n is a, c, g, or t
  misc_feature (171)..(270): n is a, c, g, or t
  misc_feature (423)..(423): n is a, c, g, or t

SEQ ID NO: 389684 - DNA, 441 bp, Homo Sapiens; identical to SEQ ID NO: 378754
  misc_feature (390)..(390): n is a, c, g, or t

SEQ ID NO: 389685 - DNA, 427 bp, Homo Sapiens; identical to SEQ ID NO: 378773
  misc_feature (26)..(26): n is a, c, g, or t
  misc_feature (213)..(213): n is a, c, g, or t

SEQ ID NO: 389686 - DNA, 2171 bp, Homo Sapiens; identical to SEQ ID NO: 378774

SEQ ID NO: 389687 - DNA, 402 bp, Homo Sapiens; identical to SEQ ID NO: 378786
  misc_feature (61)..(61): n is a, c, g, or t
  misc_feature (83)..(100): n is a, c, g, or t

SEQ ID NO: 389688 - DNA, 486 bp, Homo Sapiens; identical to SEQ ID NO: 378787
  misc_feature (15)..(15): n is a, c, g, or t
  misc_feature (26)..(26): n is a, c, g, or t
  misc_feature (33)..(33): n is a, c, g, or t
  misc_feature (41)..(41): n is a, c, g, or t
  misc_feature (63)..(63): n is a, c, g, or t
  misc_feature (131)..(131): n is a, c, g, or t
  misc_feature (286)..(303): n is a, c, g, or t
  misc_feature (436)..(436): n is a, c, g, or t
  misc_feature (453)..(453): n is a, c, g, or t

SEQ ID NO: 389689 - DNA, 483 bp, Homo Sapiens; identical to SEQ ID NO: 378854
  misc_feature (12)..(12): n is a, c, g, or t
  misc_feature (28)..(28): n is a, c, g, or t
  misc_feature (452)..(452): n is a, c, g, or t

SEQ ID NO: 389690 - DNA, 504 bp, Homo Sapiens; identical to SEQ ID NO: 378855
  misc_feature (437)..(437): n is a, c, g, or t
  misc_feature (489)..(489): n is a, c, g, or t

SEQ ID NO: 389691 - DNA, 444 bp, Homo Sapiens; identical to SEQ ID NO: 378880
  misc_feature (309)..(309): n is a, c, g, or t
  misc_feature (392)..(392): n is a, c, g, or t

SEQ ID NO: 389692 - DNA, 453 bp, Homo Sapiens; identical to SEQ ID NO: 378881
  misc_feature (205)..(205): n is a, c, g, or t

SEQ ID NO: 389693 - DNA, 1139 bp, Homo Sapiens; identical to SEQ ID NO: 378961
  misc_feature (275)..(275): n is a, c, g, or t
  misc_feature (467)..(467): n is a, c, g, or t
  misc_feature (775)..(775): n is a, c, g, or t

SEQ ID NO: 389694 - DNA, 1163 bp, Homo Sapiens; identical to SEQ ID NO: 378962
  misc_feature (643)..(805): n is a, c, g, or t
  misc_feature (918)..(1079): n is a, c, g, or t

SEQ ID NO: 389695 - DNA, 459 bp, Homo Sapiens; identical to SEQ ID NO: 379056
  misc_feature (34)..(34): n is a, c, g, or t

SEQ ID NO: 389696 - DNA, 385 bp, Homo Sapiens; identical to SEQ ID NO: 379057
  misc_feature (89)..(89): n is a, c, g, or t
  misc_feature (344)..(344): n is a, c, g, or t
  misc_feature (371)..(371): n is a, c, g, or t

SEQ ID NO: 389697 - DNA, 487 bp, Homo Sapiens; identical to SEQ ID NO: 379058
  misc_feature (92)..(92): n is a, c, g, or t
  misc_feature (105)..(137): n is a, c, g, or t
  misc_feature (175)..(243): n is a, c, g, or t
  misc_feature (421)..(421): n is a, c, g, or t
  misc_feature (429)..(429): n is a, c, g, or t
  misc_feature (465)..(465): n is a, c, g, or t

SEQ ID NO: 389698 - DNA, 462 bp, Homo Sapiens; identical to SEQ ID NO: 379059
  misc_feature (19)..(19): n is a, c, g, or t
  misc_feature (61)..(128): n is a, c, g, or t
  misc_feature (166)..(264): n is a, c, g, or t
  misc_feature (391)..(391): n is a, c, g, or t
  misc_feature (399)..(399): n is a, c, g, or t
  misc_feature (411)..(411): n is a, c, g, or t
  misc_feature (429)..(429): n is a, c, g, or t
  misc_feature (434)..(434): n is a, c, g, or t
  misc_feature (449)..(449): n is a, c, g, or t

SEQ ID NO: 389699 - DNA, 529 bp, Homo Sapiens; identical to SEQ ID NO: 379234

SEQ ID NO: 389700 - DNA, 469 bp, Homo Sapiens; identical to SEQ ID NO: 379235

SEQ ID NO: 389701 - DNA, 542 bp, Homo Sapiens; identical to SEQ ID NO: 379322

SEQ ID NO: 389702 - DNA, 536 bp, Homo Sapiens; identical to SEQ ID NO: 379323
  misc_feature (423)..(423): n is a, c, g, or t
  misc_feature (435)..(435): n is a, c, g, or t
  misc_feature (440)..(440): n is a, c, g, or t
  misc_feature (451)..(451): n is a, c, g, or t
  misc_feature (469)..(469): n is a, c, g, or t
  misc_feature (497)..(497): n is a, c, g, or t
  misc_feature (503)..(503): n is a, c, g, or t
  misc_feature (517)..(517): n is a, c, g, or t

SEQ ID NO: 389703 - DNA, 375 bp, Homo Sapiens; identical to SEQ ID NO: 379620

SEQ ID NO: 389704 - DNA, 407 bp, Homo Sapiens; identical to SEQ ID NO: 379621
  misc_feature (38)..(38): n is a, c, g, or t

SEQ ID NO: 389705 - DNA, 484 bp, Homo Sapiens; identical to SEQ ID NO: 379629
  misc_feature (17)..(17): n is a, c, g, or t
  misc_feature (30)..(30): n is a, c, g, or t
  misc_feature (36)..(36): n is a, c, g, or t
  misc_feature (97)..(97): n is a, c, g, or t
  misc_feature (113)..(113): n is a, c, g, or t

SEQ ID NO: 389706 - DNA, 530 bp, Homo Sapiens; identical to SEQ ID NO: 379630
  misc_feature (26)..(26): n is a, c, g, or t
  misc_feature (42)..(42): n is a, c, g, or t
  misc_feature (61)..(61): n is a, c, g, or t
  misc_feature (167)..(167): n is a, c, g, or t

SEQ ID NO: 389707 - DNA, 459 bp, Homo Sapiens; identical to SEQ ID NO: 379759

SEQ ID NO: 389708 - DNA, 475 bp, Homo Sapiens; identical to SEQ ID NO: 379760

SEQ ID NO: 389709 - DNA, 470 bp, Homo Sapiens; identical to SEQ ID NO: 380031
  misc_feature (18)..(18): n is a, c, g, or t
  misc_feature (41)..(41): n is a, c, g, or t

SEQ ID NO: 389710 - DNA, 592 bp, Homo Sapiens; identical to SEQ ID NO: 380032
  misc_feature (86)..(86): n is a, c, g, or t
  misc_feature (94)..(384): n is a, c, g, or t

SEQ ID NO: 389711 - DNA, 872 bp, Homo Sapiens; identical to SEQ ID NO: 380227
  misc_feature (88)..(107): n is a, c, g, or t
  misc_feature (646)..(659): n is a, c, g, or t
  misc_feature (714)..(758): n is a, c, g, or t

SEQ ID NO: 389712 - DNA, 510 bp, Homo Sapiens; identical to SEQ ID NO: 380228
  misc_feature (41)..(41): n is a, c, g, or t
  misc_feature (49)..(49): n is a, c, g, or t
  misc_feature (73)..(73): n is a, c, g, or t
  misc_feature (86)..(86): n is a, c, g, or t
  misc_feature (416)..(416): n is a, c, g, or t
  misc_feature (418)..(418): n is a, c, g, or t

SEQ ID NO: 389713 - DNA, 452 bp, Homo Sapiens; identical to SEQ ID NO: 380356
  misc_feature (22)..(22): n is a, c, g, or t
  misc_feature (254)..(254): n is a, c, g, or t

SEQ ID NO: 389714 - DNA, 458 bp, Homo Sapiens; identical to SEQ ID NO: 380357
  misc_feature (17)..(17): n is a, c, g, or t
  misc_feature (418)..(418): n is a, c, g, or t
  misc_feature (423)..(423): n is a, c, g, or t

SEQ ID NO: 389715 - DNA, 465 bp, Homo Sapiens; identical to SEQ ID NO: 380522
  misc_feature (375)..(390): n is a, c, g, or t
  misc_feature (436)..(436): n is a, c, g, or t

SEQ ID NO: 389716 - DNA, 460 bp, Homo Sapiens; identical to SEQ ID NO: 380523
  misc_feature (374)..(389): n is a, c, g, or t
  misc_feature (408)..(408): n is a, c, g, or t
  misc_feature (425)..(425): n is a, c, g, or t
  misc_feature (442)..(442): n is a, c, g, or t

SEQ ID NO: 389717 - DNA, 425 bp, Homo Sapiens; identical to SEQ ID NO: 380789
  misc_feature (30)..(30): n is a, c, g, or t
  misc_feature (63)..(63): n is a, c, g, or t

SEQ ID NO: 389718 - DNA, 610 bp, Homo Sapiens; identical to SEQ ID NO: 380790

SEQ ID NO: 389719 - DNA, 591 bp, Homo Sapiens; identical to SEQ ID NO: 380791
  misc_feature (467)..(467): n is a, c, g, or t
  misc_feature (501)..(501): n is a, c, g, or t
  misc_feature (508)..(508): n is a, c, g, or t
  misc_feature (515)..(515): n is a, c, g, or t
  misc_feature (542)..(542): n is a, c, g, or t
  misc_feature (558)..(558): n is a, c, g, or t
  misc_feature (566)..(566): n is a, c, g, or t

SEQ ID NO: 389720 - DNA, 601 bp, Homo Sapiens; identical to SEQ ID NO: 380792
  misc_feature (496)..(496): n is a, c, g, or t
  misc_feature (507)..(507): n is a, c, g, or t

SEQ ID NO: 389721 - DNA, 505 bp, Homo Sapiens; identical to SEQ ID NO: 380845

SEQ ID NO: 389722 - DNA, 483 bp, Homo Sapiens; identical to SEQ ID NO: 380846
  misc_feature (48)..(48): n is a, c, g, or t
  misc_feature (56)..(56): n is a, c, g, or t
  misc_feature (144)..(144): n is a, c, g, or t
  misc_feature (287)..(287): n is a, c, g, or t

SEQ ID NO: 389723 - DNA, 1482 bp, Homo Sapiens; identical to SEQ ID NO: 380961
  misc_feature (1032)..(1040): n is a, c, g, or t

SEQ ID NO: 389724 - DNA, 1604 bp, Homo Sapiens; identical to SEQ ID NO: 380962
  misc_feature (1023)..(1031): n is a, c, g, or t

SEQ ID NO: 389725 - DNA, 1175 bp, Homo Sapiens; identical to SEQ ID NO: 380963
  misc_feature (1025)..(1033): n is a, c, g, or t

SEQ ID NO: 389726 - DNA, 1513 bp, Homo Sapiens; identical to SEQ ID NO: 380964
  misc_feature (1035)..(1043): n is a, c, g, or t

SEQ ID NO: 389727 - DNA, 1240 bp, Homo Sapiens; identical to SEQ ID NO: 380965
  misc_feature (104)..(112): n is a, c, g, or t

SEQ ID NO: 389728 - DNA, 1287 bp, Homo Sapiens; identical to SEQ ID NO: 380966
  misc_feature (1042)..(1050): n is a, c, g, or t

SEQ ID NO: 389729 - DNA, 1380 bp, Homo Sapiens; identical to SEQ ID NO: 380967
  misc_feature (1032)..(1040): n is a, c, g, or t

SEQ ID NO: 389730 - DNA, 1291 bp, Homo Sapiens; identical to SEQ ID NO: 380968
  misc_feature (999)..(1007): n is a, c, g, or t

SEQ ID NO: 389731 - DNA, 1404 bp, Homo Sapiens; identical to SEQ ID NO: 380969
  misc_feature (1021)..(1029): n is a, c, g, or t

SEQ ID NO: 389732 - DNA, 1034 bp, Homo Sapiens; identical to SEQ ID NO: 380970
  misc_feature (545)..(553): n is a, c, g, or t

SEQ ID NO: 389733 - DNA, 1224 bp, Homo Sapiens; identical to SEQ ID NO: 380971
  misc_feature (1001)..(1009): n is a, c, g, or t

SEQ ID NO: 389734 - DNA, 914 bp, Homo Sapiens; identical to SEQ ID NO: 380972
  misc_feature (227)..(236): n is a, c, g, or t

SEQ ID NO: 389735 - DNA, 1533 bp, Homo Sapiens; identical to SEQ ID NO: 380973
  misc_feature (1013)..(1021): n is a, c, g, or t

SEQ ID NO: 389736 - DNA, 1223 bp, Homo Sapiens; identical to SEQ ID NO: 380974
  misc_feature (987)..(995): n is a, c, g, or t

SEQ ID NO: 389737 - DNA, 471 bp, Homo Sapiens; identical to SEQ ID NO: 380978

SEQ ID NO: 389738 - DNA, 637 bp, Homo Sapiens; identical to SEQ ID NO: 380979
  misc_feature (556)..(572): n is a, c, g, or t

SEQ ID NO: 389739 - DNA, 523 bp, Homo Sapiens; identical to SEQ ID NO: 380980

SEQ ID NO: 389740 - DNA, 484 bp, Homo Sapiens; identical to SEQ ID NO: 380981
  misc_feature (261)..(273): n is a, c, g, or t

SEQ ID NO: 389741 - DNA, 544 bp, Homo Sapiens; identical to SEQ ID NO: 380982

SEQ ID NO: 389742 - DNA, 723 bp, Homo Sapiens; identical to SEQ ID NO: 380947

SEQ ID NO: 389743 - DNA, 382 bp, Homo Sapiens; identical to SEQ ID NO: 380983

SEQ ID NO: 389744 - DNA, 883 bp, Homo Sapiens; identical to SEQ ID NO: 380984

SEQ ID NO: 389745 - DNA, 640 bp, Homo Sapiens; identical to SEQ ID NO: 380985

SEQ ID NO: 389746 - DNA, 504 bp, Homo Sapiens; identical to SEQ ID NO: 380986

SEQ ID NO: 389747 - DNA, 477 bp, Homo Sapiens; identical to SEQ ID NO: 380987

SEQ ID NO: 389748 - DNA, 517 bp, Homo Sapiens; identical to SEQ ID NO: 380988

SEQ ID NO: 389749 - DNA, 879 bp, Homo Sapiens; identical to SEQ ID NO: 380989

SEQ ID NO: 389750 - DNA, 730 bp, Homo Sapiens; identical to SEQ ID NO: 380990
  misc_feature (697)..(707): n is a, c, g, or t

SEQ ID NO: 389751 - DNA, 602 bp, Homo Sapiens; identical to SEQ ID NO: 380991

SEQ ID NO: 389752 - DNA, 710 bp, Homo Sapiens; identical to SEQ ID NO: 380992

SEQ ID NO: 389753 - DNA, 541 bp, Homo Sapiens; identical to SEQ ID NO: 380993

SEQ ID NO: 389754 - DNA, 1649 bp, Homo Sapiens; identical to SEQ ID NO: 381004

SEQ ID NO: 389755 - DNA, 1104 bp, Homo Sapiens; identical to SEQ ID NO: 381005

SEQ ID NO: 389756 - DNA, 844 bp, Homo Sapiens; identical to SEQ ID NO: 381009
  misc_feature (92)..(141): n is a, c, g, or t

SEQ ID NO: 389757 - DNA, 869 bp, Homo Sapiens; identical to SEQ ID NO: 381010
  misc_feature (94)..(156): n is a, c, g, or t

SEQ ID NO: 389758 - DNA, 853 bp, Homo Sapiens; identical to SEQ ID NO: 381011
  misc_feature (114)..(179): n is a, c, g, or t

SEQ ID NO: 389759 - DNA, 925 bp, Homo Sapiens; identical to SEQ ID NO: 381012

SEQ ID NO: 389760 - DNA, 1351 bp, Homo Sapiens; identical to SEQ ID NO: 381013

SEQ ID NO: 389761 - DNA, 920 bp, Homo Sapiens; identical to SEQ ID NO: 381024

SEQ ID NO: 389762 - DNA, 1002 bp, Homo Sapiens; identical to SEQ ID NO: 381025

SEQ ID NO: 389763 - DNA, 922 bp, Homo Sapiens; identical to SEQ ID NO: 381060

SEQ ID NO: 389764 - DNA, 865 bp, Homo Sapiens; identical to SEQ ID NO: 381061

SEQ ID NO: 389765 - DNA, 1210 bp, Homo Sapiens; identical to SEQ ID NO: 381076
  misc_feature (254)..(316): n is a, c, g, or t
  misc_feature (1020)..(1058): n is a, c, g, or t

SEQ ID NO: 389766 - DNA, 850 bp, Homo Sapiens; identical to SEQ ID NO: 381077

SEQ ID NO: 389767 - DNA, 950 bp, Homo Sapiens; identical to SEQ ID NO: 381081

SEQ ID NO: 389768 - DNA, 1809 bp, Homo Sapiens; identical to SEQ ID NO: 381082
  misc_feature (1762)..(1770): n is a, c, g, or t

SEQ ID NO: 389769 - DNA, 412 bp, Homo Sapiens; identical to SEQ ID NO: 381083
  misc_feature (191)..(236): n is a, c, g, or t

SEQ ID NO: 389770 - DNA, 616 bp, Homo Sapiens; identical to SEQ ID NO: 381094

SEQ ID NO: 389771 - DNA, 476 bp, Homo Sapiens; identical to SEQ ID NO: 381095

SEQ ID NO: 389772 - DNA, 931 bp, Homo Sapiens; identical to SEQ ID NO: 381158

SEQ ID NO: 389773 - DNA, 1275 bp, Homo Sapiens; identical to SEQ ID NO: 381159

SEQ ID NO: 389774 - DNA, 1236 bp, Homo Sapiens; identical to SEQ ID NO: 381198

SEQ ID NO: 389775 - DNA, 1056 bp, Homo Sapiens; identical to SEQ ID NO: 381199

SEQ ID NO: 389776 - DNA, 1598 bp, Homo Sapiens; identical to SEQ ID NO: 381205

SEQ ID NO: 389777 - DNA, 875 bp, Homo Sapiens; identical to SEQ ID NO: 381206

SEQ ID NO: 389778 - DNA, 1000 bp, Homo Sapiens
ggcaactgcctgctggtgctggtgatcgcgcgggtgccgcggctgcacaacgtgacgaacttcctcatcggcaacctggccttgtccgacgtgctcatgtgcaccgcctgcgtgccgctcacgctggcctatgccttcgagccacgcggctgggtgttcggcggcggcctgtgccacctggtcttcttcctgcagccggtcaccgtctatgtgtcggtgttcacgctcaccaccatcgcagtggaccgctacgtcgtgctggtgcacccgctgaggcgcgcatctcgctgcgcctcagcctacgctgtgctggccatctgggcgctgtccgcggtgctggcgctgccgcccgccgtgcacacctatcacgtggagctcaagccgcacgacgtgcgcctctgcgaggagttctggggctcccaggagcgccagcgccagctctacgcctgggggctgctgctggtcacctacctgctccctctgctggtcatcctcctgtcttacgtccgggtgtcagtgaagctccgcaaccgcgtggtgccgggctgcgtgacccagagccaggccgactgggaccgcgctcggcgccggcgcaccttctgcttgctggtggtggtcgtggtggtgttcgccgtctgctggctgccgctgcacgtcttcaacctgctgcgggacctcgacccccacgccatcgacccttacgcctttgggctggtgcagctgctctgccactggctcgccatgagttcggcctgctacaaccccttcatctacgcctggctgcacgacagcttccgcgaggagctgcgcaaactgttggtcgcttggccccgcaagatagccccccatggccagaatatgaccgtcagcgtggtcatctgatgccacttagccaggccttggtcaaggagctccacttcaactggcctcctagggcaccactcgaggtcaatctggtgcttattcttcagcaccagagctagctaagccaacatagggc

SEQ ID NO: 389779 - DNA, 723 bp, Homo Sapiens
gatctctaatagaatatccctctacaaaagagttactcattgagaattgtaaaacaggaggcactcacgaatattagactggactgcagcatggagaagacaagctgagtgttgtccatggcctagaatgctaggtgtaagggaaccatttactttcttctctgctcaagaggcattatcagaatgtaagtgattgaaatgcttggaatactctgcctgataagaatgtctttgtataccacgtgggtgccccacgtctatatgactgaccctcatagaaatcctggacatcaaggcttgggtgagcttccatggctggtaatattttgtgcataggcacgtatcattgcagagacaattaagccctgtctgtgtttttccactgagagaggacaactggaagctcatgtctggtttctcttgtacgccaccctatgccatttttattttatttttgcagattttgaatctgaatccttacagtgtaataaaccatagccatgaatataacagcttttctgagttttgtgagtccttctagtgaatcactgaacctgagggtggtcctggggaccctcaccacaactgagaacccgcaaagagagagatgccacctcttgccaagtctcagtctccctggcctttaaacatttattccagttggctttaggctggttcttcttcacgttaccgcttctgggaagttaaattttccttgtgatc

SEQ ID NO: 389780 - DNA, 1000 bp, Homo Sapiens
aattcattattaatatacaatgtatgtatctgagatatgaaacagtagaaaataaaattttgggaggaagataatttctatgttttgtaacaggcatctagaatagaaatagaaatcaatgtaacagaagatgtctcatatggtcttttaagaggtggccatctagccaggtatcatccagccatctaagaaacagtctaatcagctcatgttataagtcctgtttttattgcttatttgaggattccccaatattttcatctttctaaagtatagaaatttagcccaacactgtatattaattgggcttttatatttggaaagttcagtaaacactacaatttcatgttagctttgaaactaacagcattatattgctgacatatttagctgatgattattaaatttctttttatacggcacaaatactaacctgcttattttttacttttaatcttctcagtgtctttggttccatttgacagattatttaaattgcatagtttctgaaatcttgtgattgtgattattacccaaaggttttatttaaatccaactcatttttcttattaactgaaaatcttaaaagagtacacttatcaattctataataaacatcacttgataagggtaagaaggaagctattaggtaagaatgggcacatccctcttaataaggtacaggacacaaccttatggaacattacttcataaattttgaagaaggtataacatggtccttgaagtcaatgaccttattaaggtaatctataagccaaaaacaacttccactacaaaatgcactcctccttaattagaaaaagtcaaagcaaaaagctgtaccttctaaaaatctttcttgaattaatctcaactttatacaagtccacactgtagaaaatgtgcaaagaattggacacatctatgtcaaaccaaaccatttcaaaatacaaaagccaatggactttgcgtttcaaaattaacatagagataatggatc

SEQ ID NO: 389781 - DNA, 1000 bp, Homo Sapiens
gttatttaatgaaacattgcttccccactagctctctactttctcagtatatatcttgcctccttcattactcgggtaatcactatcacttgtttcttttttcacttataaagaatttttatataaatacaaaccaataaaacaggaaatttcatttcctcttttaaaactacaagtaataacatattatacacgttttattcaacaacagattggtattcaaccttctgctgttaagaagagttgcaataaataacctcatacatgcatcacttcacacatattaattatatctcaagataattcctaggtgtcactttgataaatattaccaaaatgctcaccaaagatgctgtaccaatttatactctcatcagccatagattaaaatctatcccaaaattcttccagttgaatatgtcatgaacttttggatttttaccaatctgaatgggaagagggaaacatgttttttcagtgttgtttaaatctgtatttctgtgttgtgaataaggttaaatatcttttaaaatatttttaaaaaactatatttgcatttctgtgaactgtctttgcatattctttgcccactttttttcttttggggggttgatgattttcttatcaaggtggtagggtctttatatgccaggaagattaagcttttgtgacaaaaattgggaatatatttttaaatttagtttgccatttgcctttttgactacattgataatgtttattttatgtgttgccatgcaaaaatttaatttttatgtagtcaaatgtattcatttttttctccctacagcctctgaatattatatcataatgagaaagtttttgtttctaaactgaggctataaattaattctttcatgttttcttctatgattttgtattccataataaatatttaacttatttaaatatttcttctaggccaggtgtggtggctcacacctgtaatcccagcactttgggaggctgaggcaggtggatc

SEQ ID NO: 389782 - DNA, 1000 bp, Homo Sapiens
acctcagaacttaaaataaatgttgaagaaaaaaaattatgttggataacaattttacatatctaaacctcagttgcttcatctataaaatgaagcttcaatgggttgtcaacaaaacatcttagagtctgaatatttccaacccccaatctgccaccactgcttaccagctctataatctttattatgttactgaacctttctatactttggttttctttctcagtacataggaataatagtaccaagtcatagatattttgtgaatattaatgacataaagctttacagttcctgttgcctagtaaattctcagtatatattagttgccatcattattacagtactaataatagaatgttggaaactgaaaaaagtggggggtcttgattgacaatatgacattgaatagatttgaactgtgggttggattatgattgacagagggtggggaaaaggcacaacttgaaatgaagcgtgttctgaagaataccaagttatcctctgtagtgttgacatatattttatggcaggtaataagagggggcaattagtctggagaattgtgatgccctttgaatggtagtttagaaggttggtaggtaattttgtagccatttagagacccctaggcacgttgtcatcaacagttgattttgccagactttgaaatatttgtcagtctgattggtgtaaaattgtatattgtggttttaatttgttttttctttattaccaatgagactgtaattttttttttgagatggagtctcgctggtatccctaaaacctatcactgtttctttgtgtgcataatcgtttaataaatatttgttgaataaatgagtaaatatatgaatgactgaaatgagctccaggtacacatatcaaaggtacttttaacacgcatgtgtagagaccatgtgcttaccgtctaagccaaagaggtaacttcggtgatgaccctctcaggctgagggagatgtaactgtgaaagatc

SEQ ID NO: 389783 - DNA, 817 bp, Homo Sapiens
gatctcatactgtttaatcaaattcaaatgtttgatacttctagacttagtacagagctgaatacacagtagatatccaatagattcctatcttccctccctctcccttcaccacactatacacataccacacagcaggtggggactgaataacatgaagaaaaatgctgctacctacccaattcttttcaatagcaagaaacagaggaaggcagtggtcaagggaatttcaagtcagtaagtcaagtcaacaagtacttaagggactacagtgaatttccgattacattccagatgtaacattccattttctattcttgttgagaaaaattaaaggaaaattaatagccatgactttacttggcataaggagacttgtattgtttgtaccccaaacagatggaattcaacatttcaaataggtcaagtacagcactatcccttatagttagtgtttttccactagaactaactactctttgcacagatgtaaccaagttaggtattcaccactggataagacttgttactatttatgttaaagttcctttcaagcaacataagaggccatgatgctaaaggaaaactgggggctctttcaaacccaatataagttaccataaaagaaaaccaaggtattttaaaaacaaacaagcaaaaaatctaaattcatatttaacagtaatcaccactctggaccacaactgacaaaaatattgaagccaataaaacaaatttagtttaagaaaaagaaattgctatcacaagggtgctagtgaaatttttcctacaaccaatcataaccacaaattagatc

SEQ ID NO: 389784 - DNA, 997 bp, Homo Sapiens
gatcaccttggtttatgcaaggtgtaatgataggagattttcttttcttctttttaaaagaacttaaaaaaaaccttattacagcttataaaatatatttgggcacccctccccaaaggcttaaaactttcacatatccttggctaaattgtgaacgtggactatgtgggattggccaggggcaggctggaatttgctgaaggaactacctgtcataccagttcccttttagcttatctaatcactccatttcatccagactgagatagatggctcacattttgttgttattgttttctgtaatccttgggtaaattttttttccccactagggaagagaattgagtttggtcggccctttcccaggactgaacatgaagagttatgccggcttcctcaccgtgaattagacttacaacagcaacctcttcctctgggtcttcccagctcaggtaggtgcccaacaggaaggacaccagtgttcaagacctggcttgccgtttgagggtagaaatgttagcctaccgagctacagggctttaaaaaaaaaatctcatagattttttctaaaaataagattttggttttcctaaaaataggcaaaccctgcatggtgtccctatttatgggcaggaaacaaatggttttctgcgggagtgggaagtgtccaacttctaaatttcttgcagccttaatttggagtgttaatactaccaccttcttcctgccaacagtcttctcctatcatttgttgtattttgttctaaaaatacttagggcaggaatggtcagggagcccaaggaggataggaagtaaggagattcctgaagtgaacaggtaatgcgtggctaagtatgtttatatctagtcagccatggcccttgtatagctgcgctgtctgtggactccttcatgcactcagtacccacttattgagcatattctgttctgtgggggccacagaggagacagaactgaactcagactctatggatc

SEQ ID NO: 389785 - DNA, 1000 bp, Homo Sapiens; identical to SEQ ID NO: 281056

SEQ ID NO: 389786 - DNA, 1000 bp, Homo Sapiens
aaggcctgaacatgtgcaccctcccagggacactggatgcgctgggagccccggggaccccatggggtgctgtaatcatggaccgtaggccatgtgatgggcctgaagtggaggctgctcagcacagagccctttctggtgcctctcgaactcagtacgatgcaagttctagacacacagatggcctgtggaggcctctccctggtgtgggcccacaggtacttccatggttgactcctggcttcaggaatcccttcctccctccagaggcttcccagggccctcggtgcccacgcctctgcccatctggaggcctgagtaaggagtggctcagccccacgttcccacactgctcctgctctttgccctgtatcccatgaggctaggagacaggagtcctgggtttgagccctgcctccccccactgcctaatgtgggaacccaagcaaggcccttctaccttttgggcctcagtttccatgtctgtaccacaagagggttgaccagatggccccaggttttcctttaggtctgacatcctgagggtcattcatcccatgcccagtcccccccatcctactcctaacagatgtgaccctacttgaggccgccttggcttttgggtcaccctgtctcatcccatcaccccaaacataccctagtccttcagcctggggctctggcatctgagcccgagctcctgcccctgctgtgggaaaggtggggaagaaggggatctccctcccgggcccacccagctgcccagcctttgcccactcggggagcagatcatgcatgccaatccctgttgccgcatggagctcctcagcccactgacctctccgtgcctggtgcaggccaggcccccgtcttccgcctgcctctgcttccccgtcatgcatggtggtggtgtttctacggtgtctggttctgtgcccgtctctgagacagtctctgtgtggaatttgccttaaactgaagtaaatttggttcttttagt

SEQ ID NO: 389787 - DNA, 1000 bp, Homo Sapiens
gagaactcatgcagctcttccacactgcctgtgaagccagctctgaggatgaggatgatgcaaccagtaccagcaatgcagaccagctgtctgaccatggggaccttctgtctgaagaggagctggatgaatgagactctgggaatcatctacacaggaccaaacccaacaggcgccctggcaccggggagggggtagttgtactctgcttgtacagtccttgagcccagtttacagatctggagagcaggaggccaggacaaggacaaaggctggaggatggagtaggacccaggggctctgccatcctaggcatcattcaaggtcttttatgaagactttacagatgtcctctgtaaatagcatcgagagtggagttcagctcctttctctactttttttttggtctgatggcacatatttattgttctgtggtctaatcacagtgtttctaaatgtaaaaagtgcatatgttggtgtagctagtcccgcgacattgagctcctctgcatgaagacactgggctcctgcatccagctgtttttattgcaaactagctcctttctcccacactgggaactttagtccacgaggctgtcaccaccctggtagcactgggccaggctttgtagctcctgcagcagctctgctacgtcatcgtgctccactccagcatccatgaagctggcccagcgccgcaagtcgagtttggtgaggtctctggccaaggcttccagggtctggtgcagggacgaagaggaacacagtgccccaaacactgggatgctctccactgctgtggagggagaggaaacagagacctgtagatggatgattattctgccctgggactcgccaaactgataaggaagtccaaccttagtagacttgattgtaaactcaacaaatttggtgtattgtccccttagtacaccagtactccagaggaagaatgcttttcttgggagccatagggtgaataaaggaatgtttaactgtg

SEQ ID NO: 389788 - DNA, 1000 bp, Homo Sapiens
tatagtggacagcttgctgctctgacagatgaaaacacaacgctccgttccaaactggagaagcaaagagagagcaggcaaagactggaaacagaaatgcaatcataccattgtagactgaatgctgctcgatgtgatcatgatcaaagtcactcatcaaaaagagaccaagagcttgctttccagggcacagtagataaatgtcgtcacttacaggaaaatttgaattctcatgttctgattctttctctgcaactttctaaagctgagagtaagtccagagtcctcaaaactgagctccattacacaggagaggctctgaaagaaaaggctttggtttttgaacacgtgcaaagtgagctaaagcaaaaacagagtcaaatgaaggacattgaaaaaatgtacaaaagtggatacaatacaatggaaaaatgcatagaaaaacaggaaagattttgtcaactaaaaaaacaaaatatgttgcttcaacagcaactggatgatgctcgcaacaaagctgacaatcaagaaaaagcaatacttaatattcaagccagatgtgatgctagagtacaaaaccttcaagctgagtgcagaaagcaccgtcttttactagaagaagacaataaaatgttggtcaatgaactgactcattcgaaagaaaaagaatgccaatatgaaaaagagaaagcagaaagagaagtagctgtgagacagcttcaacaaaaacgagatgatgtcttaaacaaaggatcagcaacaaaagctctgctggatgcttcatcgcgtcactgcacctatttagaaaatgggatgcaggattcaaggaagaaattagaccagatgagaagtcaagtatgtatgcaactttgcacaccaacaactgttaatctgtagctagttaactaatataaagtgttttggggtactaattttagtggatggctttcttttgtatttttatgataattaatgttattaaaattttatagtggatggc

SEQ ID NO: 389789 - DNA, 1000 bp, Homo Sapiens
ccccgtcccggggcaaggggaggccgcctttcctctgagcgccccccggcctgggcaccgcttctctgactccccgccacggctccgtgcggccgccggggctggctggggaaagaagccagtccagaggagcgagaaggggccaaggggtcctaggccagctccatggcacctgcgggctccgactcggaggatggggtgacatggattcgttgcggtctgaaaagacttccggttagggccccctgatcaggactgagggtcgtaagcttagtgggtgcctcctccccaagaaacaggacgcacagctgttgtgtcccctgggaaggacacctcagaggaaacctcgaggtgcctaagraacctcgaggttctaaggaaacctcacagctccttggaggcatcagtcaggagttgggggggtaacttcccacctgctccacccagagaagggtcaccctgaggagctgctggctggcctgtgcccaccccgcctcccctctacacggacggagaggaagccaaggtcggcgggaggtgggggagagactccactgtccgactccctccggcctccccagaggagggaaggaaagggagaaggggctcctgactcctgcaggtcctgaccccgcagaggggcgctcagcacctcttcggaaaccccatttggggccaatattgcacctgggcttctctttcagaaaaccccagaaatttactccgtggagctcagcggaactaaggacatcgtgaaaacagacaagggggatggcaaggagaagtataggggtctgaagaacaactgcctggaactcaaaaagaaaaatcacaaagaggagtttcagaaagaactccatctggtcagtagccttaagcccaccggggtcctgccggctatggcccttccccgcaagagctttgcccctagaaccccaccttcttaccaaccaagaaccaatttcagtctgagggatttgaaatcccttgagatgtgtgt

SEQ ID NO: 389790 - DNA, 1000 bp, Homo Sapiens
aaacctagactctcagtggtattgtgttatgagccctaagtcttatttacatcttcagttttagcttgtctactgtgatgccacgccagcaagtagtggggcatattagtcctttctcacactgctatgaagaaatacctgagaccaggtaatttataaaggaaagaggtttaattgactcatagtttcacattgctgaggaggcctcaggaaacttaaaatcatggcggtaggcaaaggagaagcaggcaccttcttcacagggtggcaggacagagtgagcgcaagacacttaataagaccatcctatctcgtgagactcactatcacgagaacagcataggggaaaccacccccatgatccaattacctccatctggtctctcccttgacacgtggggattatagggattacaatttgaggtgagatttgggtggggacacaccaaaccatattacaggggttgtagagagttgccccattattgacagatgggaatagaagtatggattcttcacttgagttccactgacattctaggggagaaggattactcattactgctaggctgggctgggagttttagctccccactaggcttccattcataccggcctgactgggagagataggagtatcttgttactgttccccagctggctggccttgacacagtggagatagaccttatcacctccrggtagcagtagaagtcctgactttccactagggcttgctccattgagtaagaggaagagrttgtctcattcctgctgggtgagacgtgacgtctaggctccccgtgtgatctctactggcattgtgtgtattgggggtcttgttaccactagatagggatgaaagtccctgctcccacttggctctctctcagaccaccctagcaggggctttgggatggtggtgagggtggaagtctaggctccccacccagtttctgctggtataagtggargtagggtcatagtttttttttttttt

SEQ ID NO: 389791 - DNA, 1000 bp, Homo Sapiens
gcttctgagaacgggggccgccttaggaggaaatctctcctagacactgctggcccggcctcagtagggtcgtgggaggtccagtccccagaacctgctaattcctgcgtccctgacaggtagaggcagctgcctgggtctgtcctggctttttcttggaggggccctgattgaggccctctggttctgtacttctgcttgcttctgtgcctggaattttctttccccgacttcctgccttgccgtccctgctctgcatgagttttcctgtctgctgctttctgggtagcattgatatgtctgtctctatggctctccctccctccctccctccctccttccctccctctccccttgtttgtcttagtccaccatgcctcttgcattgcctctgtattcgtccgactttttctctttcttactctccttcccctcttctgtcttcccgctgtcggtttcacgtcagcgggaggaatgttaggacggctgaggagatctgtagggcagaggccagacaggtcccctttacctccctctagccagcccaaaaagcaaggaaaaaagcccttccagaagattctcgccctagaaacgtgcttgtgggctcccacttctgggtctgcagtcctcgtgcgggtctcttctgtcctcttaatcctggaatctggggtgggaggggtgtcaggggtgatggttcttctccttgtgcaccagatgctgctgccctagccccagctcctgtccttagatgaggcccgggccaggcagcccctgggaagagtcatggtggcctgtggcacctgcagggcaaggcctctctgctcctgggtcctccaccctggagtctgagacaaaatgcacaggggagcaggactcagaccctggggggccacgtgggagctgggcacacccatgcctcctgcctgtctgcatctgtggcttctcccttctagaggatccaaagggaaagacatcaataccatcaagtctctgagagtcc

SEQ ID NO: 389792 - DNA, 1000 bp, Homo Sapiens; identical to SEQ ID NO: 201586

SEQ ID NO: 389793 - DNA, 867 bp, Homo Sapiens
ccctcactaaagggacaaaagctggagctccaccgcggtgcggccgctctagaactagtggatcccccgggctgcaggtccggtcttgtccacgctagggggtgcacgtactcccaactgtggtcgcgctctcaccccttctgctgctctcgtggccccctcgcgatggcgggcatcctgtttgaggatattttcgatgtgaaggatattgacccggaggccaagaagtttgaccgagtgtctcgactgcattgtgagagtgaatctttcaagatggatctaatcttagatgtaaacattcaaatttaccctgtagacttgggtgacaagtttcggttggtcatagctagtaccttgtatgaagatggtaccctggatgatggtgaatacaaccccactgatgataggccttccagggctgaccagtttgagtatgtaatgtatggaaaagtgtacaggattgagggagatgaaacttctactgaagcagcaacacgcctctctgcgtacgtgtcctatgggggcctgctcatgaggctgcagggggatgccaacaacctgcatggattcgaggtggactccagagtttatctcctgatgaagaagctagccttctgaacctcgcctgaagccagcctctctgccaagtcactcaggtcatgggcattgttcaagcctgagtggcagccgctcttgctcacctgttgaggaagggctggctcactgtccaccgtggcggcatctttaactggcctccactcaatgggaaactgactcgcctgtgaaagacacagtgggagagctgaaaatgaatcagaagctttatgtatatgatttttaaattaaactttactttttcagactgcc

SEQ ID NO: 389794 - DNA, 1000 bp, Homo Sapiens
  misc_feature (630)..(630): n is a, c, g, or t
ttgctaaccctcagtttgtccatctgtaaaacaggagtaaagattcccttcctaacagggttagagtggggacaaggtgagggagtagaatgtgcggtgacgtccaaacttagctgtacattggaatcatctgaggatctttgaagagtatcagggcttgcctcctgccctcagacattctgatttaattgttacggagtgtggcctggtatcggaagttctcaaagctcctgccggcataacggtttgaagccaggactgctgggtgtgagtctgggctccattgcttactaatcaagtggccccgtgcaactgactggacctttccggcccccgtttccccatctctgaaataggaataataaggactgcagggaggcttaaatgagataatggatgaaagcactgatagggggtacccggacagagtgctcggtccatcacagctgctgttgaactgctctttgaagcactttgtaaacagctctagtggggtccaaataggagggagcttttccctcatccattgccgtgattctaatattctgcacttccacattacagaatcccaaggtttctaatactttaagagtctcatgctccaccgactgagctagtcaggcatattcnaatgtttcaagagctcctccctccagcctctgcctgcctcacagacacacttctacagatctagaaactgagaccaggacagagggccagggaggagggatatggccaaagttaccaagctgaggctggaatccaggctcctggtccccacccccaccccacaccaatggctgccctgctgaccccacagtgacagtgctcccattctcttcctgagcagagaatggggaggaggccgaggccgcctggcccttgtttactaaccctccctcaaacgtttcctgggtggctccccagggacggcagggctgggggcttctctccagggagctgctgctgaggcctgtgtctcccgtggctcctctgacag

SEQ ID NO: 389795 - DNA, 1000 bp, Homo Sapiens; identical to SEQ ID NO: 281060

SEQ ID NO: 389796 - DNA, 1000 bp, Homo Sapiens; identical to SEQ ID NO: 281061
  misc_feature (784)..(784): n is a, c, g, or t
  misc_feature (806)..(806): n is a, c, g, or t
  misc_feature (899)..(899): n is a, c, g, or t
  misc_feature (936)..(937): n is a, c, g, or t
  misc_feature (968)..(969): n is a, c, g, or t
  misc_feature (971)..(971): n is a, c, g, or t
  misc_feature (975)..(975): n is a, c, g, or t
  misc_feature (986)..(986): n is a, c, g, or t
  misc_feature (988)..(988): n is a, c, g, or t

SEQ ID NO: 389797 - DNA, 1000 bp, Homo Sapiens
aactactctgatccctccagcctgcatagccgtaccttcacctctggatgccccgcagttgctgcactttgtggaccagtatcgagagcagctgatagcccgagtgacatcggtggaggttgtcttggacaaactgcatggacaggtgctgagccaggagcagtacgagagggtgctggctgagaacacgaggcccagccagatgcggaagctgttcagcttgagccagtcctgggaccggaagtgcaaagatggactctaccaagccctgaaggagacccatcctcacctcattatggaactctgggagaagggcagcaaaaagggactcctgccactcagcagctgaagtatgaacaccagcccttgacccttgagtcctggctttggctgacccttccttgggtctcagtttctttctctgcaaacaagttgccatctggtttgccttccagcactaaagtaatggaactttgatgatgcctttgctgggcattatgtgtccatgccagggatgccacagggggccccagtccaggtggcctaacagcatctcagggaatgtccatctggagctggcaagacccctgcagacctcatagagcctcatctggtggccacagcagccaagcctagagccctccggatcccatccaggcgcaaagaggaataggagggacatggaaccatttgcctctggctgtgtcacagggtgagccccaaaattggggttcagcgtgggaggccacgtggattcttggctttgtacaggaagatctacaagagcaagccaacagagtaaagtggaaggaagtttattcagaaaataaaggagtatcactgctcttttagaatttgtctagcagactttccagtttttaccagaaaacccctataaattaaaaattttttacttaaatttaagaattaaaaaaatacaaaaaagaaaaaatgaaaataaaggaataagaagttaaaaaaaaaaaaaaaaaaaaaaaaa

SEQ ID NO: 389798 - DNA, 1000 bp, Homo Sapiens
tcctgactttcctaagtttgaagacagcaagcttgtagatcaaatctgtgatcaaacccattatcttgaaaaaaatgtgtttgccttttctagctccacccctctttccaacttggtcgcagagagtaccagatcatctaaacaacagattttaagacaagtagtcatcgtagcgcctagtaaagcaggacacaccaggtgactagagagcaagaatctcctaggcatggagattcttgagtctcggggcacaaaaccaagtggggaataactgtccatgagcctgagaatcacttggtgctatggtctgagtgcccttcaaacttcatgtgttggaatttaatcctcactgccgtagcattaagaggtggggtcttttgagaagtgattaagtgatgagagctccaccctcaaagcaagcgcctttccaatgccttcatacatggtctgagctcccatccacctcccagccaggccctgctgatcagaacggctatgtgaagcaggaggcagcaaacagggccccaggctcaaataggcacttcgtagtggtctagttttgcccgactagttacccttagccttgattaaggtacttagttttaccaaaaaaatcatcagaaatactctggctgccatggaatgtaacatgtcctcattacgagtttcacgtggggaaggccctgaggtgaggagaggcccagcctcttcgtgccacttttacctgctgtccctaggtcaacaccccggacacaaagagtcccccattcagtcgctcccttgtgagctggactctgaaggtcctctcccagaggagggcaaggccttaccgttacatctcactctccatgcaaacagaccgtgagatagtcatctgtttgcctgagagtatgtggtgtgtgagggtcttctgatatttcaggcagccctctcctactctccacgctgcctctggaggtcaggagaaaactatgtggcttccctaacacagacagggctt

SEQ ID NO: 389799 - DNA, 841 bp, Homo Sapiens
ctcgagatcacttgagtcaggatgcagaggttgcagggagccatgtttgcaccactgcactccagcctgtgcaacagggcacaaacctttctcaaaaaatgaaaaaaaaaagagaaaatttcctctgttaaactgtctatagtttataacaatttggtaaagtgtacttttgtaaactaagatggaaagatttgctttttctttctgctcgattcctccagaatttggaaactatttgggaaatattcttacggcagtatggttatttacacaggtccagtaaaaacctgctcttggtgtctcattcaactccaacatggcaaaaatctccagccctacagagagtccgattgctgttttccagaaatagactggaaaggatggttacgatagcattcactccaagatggagttcccaagcttcatgaatacagaactggatgccttcacgaagaaccagaaggccccagtgtccttgaccacatgatgaagaaactggacctcactagtgatgggcagctagatttccaagaatttctgcatctgatggatggcatgactgtggcttaccatgactcttttctcaaggctgcccattccaagaagcagatctgaggatcccctgggcctggtttccaagccaccccctttccttccaacctcaccattcaccatctgctcacagcccacacataccctggggccagcacacctaccacctcatgcaggccctgcttgcaggtagtaataaaaccattcttcctgactgcagttttccactccctctcccccttctcctcctcccccgcccttcctctgcccttgtcttctcctcccctcc

SEQ ID NO: 389800 - DNA, 1000 bp, Homo Sapiens; identical to SEQ ID NO: 281063

SEQ ID NO: 389801 - DNA, 1000 bp, Homo Sapiens
ctgctctcagggaactcacatcctagggtggagagaaagaaacgtgaacagatggtcactgcaattctgcaaatgcagcacgggagaaccatggaaggcgggtgaggacaggggacacctagccctacttgggcagccctggaggattggaaaacactccctgcagtagcgaggctcagaggagtttggaaatgaggaaatgaggccgcagaatgcaggagggggtagattatgcatatctatggccagaccaagggagtggcctttctttttttcttttttttcttttctttttttttttttttttttttttgagacgaggtctctgtctcccaggctaatgtgcaaaggcatgatcatggctcactgcagcctcaacctcctgggctcaggccatcctcccgcttcagcctgtaggagtatttgggactacaggcatgcaccaccacgcctggctaatttttaaatttttttttgtggagatgggttcttactatgttgtccaggctggtctggaacttctaggctcaagcgatcctcccacctcagcctctgaaagtcctgggattgcaggtgtgagccaccgcgcctggctgggagtagcctttttcttgcaggcagagggtgcctttgaggaaccctgagcaggagtgagctgtgctgaaacctggcagctgcacgttggaagctaaattaggcgtacaaggatacaagaccctattgggagaccacaggcgtggtcccaaacatggaggatgaagacctgaacttaggcagaataaagaggaaaggaaggggccgggtgcagtggctcacacctgtaatcccagcactttgggaggccgaggcgggcagattgcctgagctcgggagttcaaaaccagcctgggcaaaatggcgaaaccccatctctactacaaattcaaaaaaaaaaaaaaaattagcctgccgtggtggcaggcgcctgtaattccagctactcaggaggctgaggcaggag

SEQ ID NO: 389802 - DNA, 1000 bp, Homo Sapiens
ccctcccagcgctttgaaatcccatcccggctttgttgtctccctcccaaggggccggaatgctccgggcccgcggtataaaggcagccgcggtggcggtggcggcgcagagctctgtgctccctgcagtcaggactctgggaccgcagggggctcccggaccctgactctgcagccgaaccggcacggtttcgtggggacccaggcttgcaaagtgacggtcattttctctttctttctccctcttgagtccttctgagatgatggctctgggcgcagcgggagctacccgggtctttgtcgcgatggtagcggcggctctcggcggccaccctctgctgggagtgagcgccaccttgaactcggttctcaattccaacgctatcaagaacctgcccccaccgctgggcggcgctgcggggcacccaggctctgcagtcagcgccgcgccgggaatcctgtacccgggcgggaataagtaccagaccattgacaactaccaggtgagaggggtcgggcactcagaggatgctctgaccttgaaagggtcctatctggagacgagggagtagaacgtgctgaatgtgtgcggttcagggagcatttggtaaccctgcatttgggagcagtgggcagtaacaggttttggagaggtggacagataaggactgtgatcagcgcccgggtccaagagggcgggtacctggacgtctgggtgcctcaccctctccccgaacccttcccacagccgtacccgtgcgcagaggacgaggagtgcggcactgatgagtactgcgctagtcccacccgcggaggggacgcaggcgtgcaaatctgtctcgcctgcaggaagcgccgaaaacgctgcatgcgtcacgctatgtgctgccccgggaattactgcaaaaatggtgagtcctgaaagctccctttcacactaaaactgtccagcctttgagcgtctatgaattgggcgggggcggggggttggggggggtgg

SEQ ID NO: 389803 - DNA, 1000 bp, Homo Sapiens
ccgtgttctcagccacccacccagggcccccagcatctctccagcgtctcctccatttgagttcaaacatgggccctttctacaatcagctttgtttgtgtggtgtttggaattgccatcctggaggccctgggtactgttgtgattcctaggctggtttcctggggctccgtgtggtgggggcctctggccaagctgctgtaacaaagaccacaaacctggtagcttgcaacggcacacagtcaccatctcacagtctgcagggcaaggtctcgctctgtcacccagacttgggtgcagtggtacagtcgtggctcactgcagcctccaccccctgggctgaagtgatcctcccacctcagcctcccagagtgccaggaccacaggtgtgagccaccaccatggctggcccaaatcaccccttatttatttatttatttatttaggagacggagtcttgctctgccacccaagctagagtgcagtggtgcaatctgggctcactgctacctccgctccccaggttcaagcaattctactgcctcagcctcccgagtagctgggattataggtgcccaccaccacgcctaactttagtatttttagtagaaatgtggtttcacatgttggccaggctggtctcaaactcctgacctcaggtgatccgcccaccttggcctcccaaagtgctggcattacaggtatgagccaccacgcccggccaaatttcccatctttataaagaaaccaggcatattggatcaggatccactgtactcccgaatgacctcgtgttaactgattacatctgcagagaccctatttccaggtaaggtcctggggttacaactgcagtctgtggatgatttgtgggggacgtggttccaccctagtgcctgccacctgccatctctctgggggtttgatgcccttggggtgcctggcacctcactctcagctgctgccaaagcccttcttgagctcgtcaaggtcaccctgg

SEQ ID NO: 389804 - DNA, 1000 bp, Homo Sapiens
gaaaaggacaatctcccaagaggtcagctgaagccccagcctcagggtgttgagagaggggctgggggaagcgggacgctgttcctaggagacactgtctactggacacctcatcctagacggcttccatgagttctgacactgtcccaggagtaggaatacattatcccacgctgtggagaaggaaaccaaggccgggtaaagttatgtagggcccttaaagtcgcagagccaggaataaagtccggattgggactcgggtctgtgggtaatccaaggctgccccgcttacccttcaaatgctctttccccctccggaagccctcgcgtcctcatccttaccccacctcttgttccccaagcgtggccagggctaaggctccagggatgcgccaagcaccttcggttttcccggggagaatttcccccggcccggggactagggtctggcgctggggcgcccctcggacctgcgggatcgcccctacactctggcgcgctgagggcggtgagcgagggcgccaaggcacaggtggggcgggagtcgagcgcggaggctcggggggcgggacgcgggcctgggagcggccagggaccgcggcagcgcctcagtgccagcctggcgcccgcgactgcctgccccagcccctcagtggcggcttgctctcttctctcgctccgaaccagacacagccgctgccgctgccgtccggcgcgctacagactcccgagaacagccctggctgtcagcgagcaccagccgcttcctgtccccatcgccgagactggaggggcgcaccacggccatggagccagaggcgcttcaggaggcaagagaagtccccgcctccgcagcccgcgcagctcatggtgagccctctggggctcgagggtcccttggctgagggggcgcatcctcggggtgcccgatggggctgcctgggggtcgcagggctgaagttgggaccgcgcacagaccgcccctgcagtccagcccgaa

SEQ ID NO: 389805 - DNA, 1000 bp, Homo Sapiens
caagcgtcctggggccgcaggaggaactgtgtacagatggcttgaaggccagaggcttgggttgttgtactggcccttccactggccagctgtttgaccttgaacaatcaagttccactctgtggacttcagggtcctcacccagaagaagagcagccatatggtctctactgcctggtaaacaccctggctcactctcgcgagatggtggttctccaagtgtagtgtgtagtccacacaacacctgcattgcaaccactgggtatttatttatttatttaatttatttatttaatttatgatggagtctcactctgtcgcccaggatggagtgcagtggcacgatcttggcttactgcaacctctgcctcctgggttcaagtgattctcatgcctcagcctcccgagtagctgggactacaggtgcctgccacatcacccggctaattttttgtatttttagtagagatgaggtttcaccatgttggccattctggtctcggacgcctgacctcaagtgatcttcccacctcggcctccccaagttctggggttacaggcgtaaaccaccgcccctggccaaggggaggttttttcctttccttttttcctttttcctttcctttccctcctttttttttttttttttttttttttttttaacacaggtttctgagcctcaattccagatcagctgagcctggagtttctgaagacaagggctagaaatctgcactttaaagtcttgaaaaccactgtgtgccttcatctaagctgcccctgcttctctcccctccatccctcgcctggccctgtcctccctactctcccctgcaccctcccccgccccaagctccccacaaacggccaaagcagcagtgtgaggcaatcgctctatccttgaccccttcctttgcacagtgagtgatggcgtttttatctcctgatgatgatgcacagccttcagcgggggacatttaagacgcagaacaccaggtcc

SEQ ID NO: 389806 - DNA, 1000 bp, Homo Sapiens
tgactgcctgggccatgtagtgcttgtggactgggaacaaacagcggggtggccagggccatagaaactcgcccagatcctctaggtgttgtcagcagggccacctgagtgggccctaggcattaggtggggacagggctgaagggcaagatttggttttccagatacactcatgggatttgtctcctgaaggaaggttcacggggtccaatgacaaggggtaccgccctaagtgcatttcaggaaggggtgtgctctggcagctgcattagagtgggatgtgtatcccagcagcctctgcctcacctaggggtccccacagacttggaacacctctgagccagggggccagcccccagcagaggctcagctgggttttgtgtatttagctggttgataggcacattcctattcctgttgcataaccggttctagccgcagagccctgcgggaggccaggtgctaatcacacacctcgctgttctgttctcggtatacagtgttggcaggcagcgtggcgtcttgtgatgtcttgcacctggggctcccagcacctcggagcagtgctgggagtcagtgtgttccacaccttggccagggccagcgctgtgctggcacacctgtcggtgcaattccacagcccagacccattccaggcagctgggatcagccctcatgacatttaatccgttgagtcgtcagaatcccactcactcaagacattccccctagatttgtatttctcaaagcttttttaaactttcaatttcataagtaatacatggatacactcttgtgaaaagaagaaattggagcattgtacttaaagctgatgtccttaggagctgggcgtggtggtacgtgcctgtagtccctcggctacttgggaggctgagatgggaggatccttgagccccagaagtcgaggttgcagtgagccatgatcatgccactgcactccagtccaggcaacagagcaagatccttgtctctctctctc

SEQ ID NO: 389807 - DNA, 1000 bp, Homo Sapiens
gaatgtgattgaatgattcatttatgtagcaaagttgtacttattaaatatttactcagtgtaaggtactgagccaaggaatacaaagaaagctaacactcatttcttctcctccaaaagtttataatctactagatgaagcaagtgcgtagcacaaaaatagctaaatctgtttctttgggaagacagcttattggaagttcacctaacttcaagcttgaggagcttttactgaaactaactaaggtctggctcaggtgtctggtattaaaaagggccactcagaagctccaaatcccaggaaaggttctagatactggggaggggctatagagtttcagggattcttttgcttcaaaattaagtaagaattttttgactgctctgaaagaagctatgtgaaacccagtgggaaaaaaatgactaaattattcttgatcttttggcatttaacagagcaaaatgtaagtggaaaggaagcaggaatatcagattattaatggcacattaactatttgaagaacgtgttggtccatagagtgtgcagagaatccagtaaagggaatgtatcatgtgacgtcagaacagatggatgtcacattgagtcagcaatgatgaggggacaggtgttggacattgacagggtctgctatagtcaccagggagaagctgtctcaaagacttgagccccaagtctaaacatctctggaaagggccctgatttggcctatctttcgtcacaagtcacccttgggccaatcaccttgggcccaaaatagctgatgattctgtagtagccatgggagctactggggtgggaacatgtggggaaagtaactgtgaggggtgtgttctaactggggagttagtcctagaaaaagcgtgtccagtatgcctgactttagctggagacatttctgtagctcagctttaattttccagtatttggcattgagttactattgttgcttctacaactctgacatgaagtcccagttct

SEQ ID NO: 389808 - DNA, 1000 bp, Homo Sapiens; identical to SEQ ID NO: 281069

SEQ ID NO: 389809 - DNA, 1000 bp, Homo Sapiens; identical to SEQ ID NO: 281070

SEQ ID NO: 389810 - DNA, 1000 bp, Homo Sapiens
atgagggtgctggggacagtgctgcggtggccagtggtggtgcccagaccttggcccttgccgggtcccctgccccatcggggcaccccaaggctggacacagtgagaacggggttgaggaggacacagaaggtcgaacggggcccaaagaaggtacccctgggagcccatcggagaccccaggccccagcccagcaggacctgcaggggacgagccagccgagagcccatcggagaccccaggcccccgcccagcaggacctgcaggggacgagccagccgagagcccatcggagaccccaggcccccgcccagcaggacctgcaggggacgagccagccaagaccccatcggagaccccaggccccagcccggcaggacctacaagggatgagccagccgagagcccatcggagaccccaggcccccgcccagcaggacctgcaggggacgagccagccgagagcccatcggagaccccaggcccccgcccggcaggacctgcaggggacgagccagccgagagcccatcggagaccccaggccccagcccggcaggacctacaagggatgagccagccaaggcgggggaggcagcagagttgcaggacgcagaggtggagtcttctgccaagtctgggaagccttaaggaaaggagtgcccgtcggcgtcttggtcctcctgtccctgctgcaggggctggggcctccggagctgctgcgggctcccctcaggctctgcttcgtgacccgtgacccatgacccacagtgctggcctcctgtggggccactatagcagccaccagaagccgcgaggccctcagggaagcccaaggcctgcagaagcctcctggcctggctgtgtcttccccacccagctctcccctgcgcccctgtctttgtaaattgacccttctggagtggggggcggcgggcagggctgcttttcttagtctgatgccaagcaaggccttttctgaataaattcatttgactttg

SEQ ID NO: 389811 - DNA, 1000 bp, Homo Sapiens
gggtgccagcccgtcttcatccagggcccgggccagaggggatgactgagtccggctctccggtggcagggcctgatctccgcagcccagtattacaagagttgccgggacctgctgggggagaatttccagaaggtctttaatgagctgctggtcctgctgcccgacacggccaagcagcaggagctcctgtctgcacacacggacttctgcaaccgcgagaagcctctgagcaccaagtccaagaagaacaagaagagcgcgtggcaggccaccacccagcaggcgggcctggactgccgtgtgtgccccacctgccagcaggtgctcgcgcatggcgatgccagcagccaccaggcgctgcatgctgcccgggacgacgacttcccctccctgcaagccatcgccaggatcatcacgtagctcccgccagcgtggccagagctgtcgcaccgtgagcgtccttcctccttcctctccgggctgccaggcagccaggtaaggcctggtgaggccacttggcctcttggttggccaggcccaccaggaagtcaccaggacagtccacccgccctgttggcacactcaagcgggagtccacccctgcctcagtggtgggccagtctcggtttgcattcttgtgcttttgggaggtgccaggggagggaagggctgggatgctgggacctgttgttgctggcaaagccagaggtcacagtggcctgatctgggccctcccaaagctgagggctgcagcccgtggggcctcagagctgaaagctgcggcgccactggtgccagagtcagatgtcacagatgtgttgtgtaaacagttggctgtttcgtgcttcaagaatgttcaggattaaaagcagacaagaaattgtgctacttgaagttgaatctttttatgagacaagctgaatctgggatctcaaattgcctctgaccttttataagacagtttatcttcaaataaatttattttgcaataccacgc

SEQ ID NO: 389812 - DNA, 1000 bp, Homo Sapiens; identical to SEQ ID NO: 114722

SEQ ID NO: 389813 - DNA, 1000 bp, Homo Sapiens
ctgccacgatgtgggagttccaccaccacagggacttgagcggcagctccggctcttacgtagaaacgcgcaactccagtccctaggttgtgtccgaggttgctatggtgccatcccatcttgccgctcactctgcgactgtgcggagaaacgcaagtgcccccgaagggtgggcgtggcctctgatgaatgcacacgttggtgggaggtggcttccgtttgtacgaagcgcctcttcacgcaagcgttcacctcggtctcccctttgcttggtccagttccagaaacgccgctggactgcgaggtctccctgtggtcgtcctggggactgtgcggaggccactgtgggaggctcgggaccaagagcaggactcgctacgtccgggtccagcccgccaacaacgggagcccctgccccgagctcgaagaagaggctgagtgcgtccctgataactgcgtctaagaccagagccccgcagcccctggggccccccggagccatggggtgtcgggggctcctgtgcaggctcatgctgcaggcggccgagggcacagggggtttcgcgctgctcctgaccgcggtgaggccgcgccgaccatctctgcactgaagggccctctggtggccggcacgggcattgggaaacagcctcctcctttcccaaccttgcttcttaggggcccccgtgtcccgtctgctctcagcctcctcctcctgcaggataaagtcatccccaaggctccagctactctaaattatgtctccttataagttattgctgctccaggagattgtccttcatcgtccaggggcctggctcccacgtggttgcagatacctcagacctggtgctctaggctgtgctgagcccactctcccgagggcgcatccaagcgggggccacttgagaagtgaataaatggggcggtttcggaagcgtcagtgtttccatgttatggatctctctgcgtttgaataaagactatctctgttgctcac

SEQ ID NO: 389814 - DNA, 1000 bp, Homo Sapiens; identical to SEQ ID NO: 281072

SEQ ID NO: 389815 - DNA, 1000 bp, Homo Sapiens
ttcattcttatattcctgcagtcaacataagattgccatcataccatcagtgtgcaaacttaaacagcagtgttttttttttttttcattttaatgaaaaagatttcaaacccataagactcaaaaacttttacaggtttgaggtctcaggcttttcatacttaacttccagaaaatgatttgaatgttctattcctttattctagaatttacaaaagcagtaaatacaaatattttataacaagtgcttccctctttagaaatctgtcctgacgcatattttgtctcagtccattcagtgtattttgatgaacattgatgacattgagagagtcctaaagagtcaccattttgttttaggaccttgttttgaacaccagtaaccaactagtggtgtttcacctcattaaacacagttttgagggccctgctgtcatggaaagacaaagttggtacaaatgtacagaagttgctaagataatatgacttggctaacaggaagcagagtcagggataaggtatcaaatagaaagatttacctgggaacgggctttgaagtcatatcaggacttaagaacatctccctcactattaaactcctggaatggaacgtaataaattctgccagttacatacagaatttattcaccacttctgggatacccaagagtacatactgtgggagttcagggtattattgagttttctttagaaatgattaagcaaagtaattggaaagaaatatttctaaaaggtgagagcagtctgttttctaaaacaggacagaagaagtaattattttaagacttaaatagtctaggaatgaaataatcttaattcccttttcacttctcattcagtccttttgattaagccaaaaagcaaagtgtccatctggatataacgtgacttcaaacacataatcttactgatacccccttgctgtatgttaaatacagcaagtggccccaggcccattagactttgggcaggcaaaaat

SEQ ID NO: 389816 - DNA, 1000 bp, Homo Sapiens
tagtctgcccttggagggctttattccagtgtcagccagaagaatctgctcagttcacaaacttttgctgtatttcctagttgactttagctttcaatctttgttttaatggagtcaagtattaagaaagtattgaaattaaatttcctgtcatggtggagtgagtcagcctccgatcagaactagaactttgaaacagagctttaattttatttcagtgctgattacaaaccaaaagctccttttattaccattttgctgatctcaagagaagcaaggccttgccattctgaaatttctctgtgttagcattatgaacacgatttcagtccatgagccaggtttatgagtgccctctaataaaacaagggcctttctcaaataagacgtttacaattcaaaatgcatggactacataacacagaaaggagagaatcgagtccccagtggctgggccacctccttgggcaaagttcttctgcaacatagctttcatctccctgtgggatgaaaccagtatgccttaattggtttacttcagaagagttacatccctaaacccattttaaaagactatcacttttttttttttttttttgaagacagagtctcactctgtcacccaggctggagtgcagtgacacgatcttggctcactgcaacctctgcctcccgggttcaagtgatactcctgcctcagcctcccgagtagctgggatcacaggcctgtgccaccacatctggctaatttttctaattttagtagaatggtgttttgccacgttgctcaggctggtctcaaactcctggcctcaaatgatccacctgcctcagccttccaaagtgctgggtttacaggcgtgagccaccgcacccagtcataaaagactatcactttttaaatatttaaacgaattgaaaaattataacatgccattcagcactcttccaaaatcctccaaagcatgcatgtgggtaggtggataggtgggtgttggtg

SEQ ID NO: 389817 - DNA, 1000 bp, Homo Sapiens
tagtgtgtaatattatcactcgtgaattttatagcaaagtaactgtttagaaatgcagagatgtggtgctccagccctgctcttttagttcccagtcactcctgctgtgttagtgctttgcatgctcctatttccctcttgggctacttctgggcagggctatctccctcgcttctccctttcaccccactcctgctatctgcctcacctggtttgcctcttcactctagcacctgatgatccttaccttatccatttgatccccaagtaacaagaaaagctgtgtcaaatgtactgctttagatctggactgtgaatatgccaagggcaccgggcctgaggttgtgtatctgccagtttaggtttactcttttcagccaccgactactccctaatcctgggcaaatgcttaccattaccttgtaagagtgtgtgggtgggtgagcagtcagttcggagctcctgatgtgggagtggtgagcaggggaatctgactggtgctggcagggcatgagaggtatcctacattttggaatcacacactctagctggttgggatgtgatctgacgggtaacacaggtatggatggagacttactgacagaggctgggacaggagtcagtaaccgagaggaatgggctggggaagtcaccaatagccttgtgaaaagtaggctcctgtgtagctataataaggacttccttagtgctcaagcctgccttttgctcctgcagttacgttatgatgatgaagtgaagcgggtggtggcagagccggtggagttggcccaagagttccgcaaatttgacctgaacagcccctgggaggctttcccagtctatcgccaacccccggagagtctcaagcttgaagccggagacaagaagcctgatgccaagtagctccagggaacgcatgtggatcctagacagcgccttatctatgattgagtgtccgtgtaaataaattcctacttagacttaccaccttgtgtgtgct

SEQ ID NO: 389818 - DNA, 1000 bp, Homo Sapiens
aaggtgaagtgttttcttcactctaaaatgctatcctagaaagccatttttcttttaatttctggcctttaaacttctttaaataggctcatttatctactatgactgtgttgggaagttatgtcaattaagaagacactatctttgagttatagaagattaatccatttggaactagtcatactggtttgagtaaagctttctgacttttctgttattgttgttagaaattattcctgcttttcctttccttttagctttccaaggaatcccttcaatctgtggatgtcctccgagaggaagtgagtgagatcttagatgaaatgagtcacaaactgcgtcttggagccattcggttttgtgccttcaccctgagcaaagtatttaaacaaattttctcgaaggtgtgtgtaaatgaagaaggtattcagaaagtgagtattgattattaaaaaaataaagaaataaaagtctcatcttaaaattaaacaaaaaaaaaaacagtctctttttcaacccctcacaatttaatcaactcaaggacagctcacttggtcaatcaaaagcctagggcctaatcatcaggcctccagtctaggcagaagaggatgtgcatctctgagggttgttttctgtttctttgtttccttttaactgcagacctacaggcttcagactaacttagtcaagtaagacttatagactaacttaatgccagatattcagtaacgttacaaaagaaatacaaagaattcctgtatatacttcacctagattcccttacagcatttcctttatccttttcctaatactctgctgtgtgttttcctataattaagggcattatcttatggtacaagtatcaaaataaggaaattaacattgaacaaatactagtaatactgacctgactcatatttcaccagttgtcccagtcatgtcctgtctagctaaagaaaatcgtagctcatgtgttgcgctagaaatcctagaaagtgtt

SEQ ID NO: 389819 - DNA, 1000 bp, Homo Sapiens; identical to SEQ ID NO: 114724

SEQ ID NO: 389820 - DNA, 1000 bp, Homo Sapiens
  misc_feature (910)..(910): n is a, c, g, or t
tattctggtccttcatcttgtatatgacctatttcatcctctttgcccacttcttctgccagacctacatcaggcccaaggtcaaagccaagaccaagagccagtgaaggtttggagagaacaatgaagctccaggctctctcttctccagggcaccaagaggctgggcttagttttgggagaatgattaggttgccttacctgcatggtttccccagaggatgtgtgccccaaggtggctggaatttttgacagacaagaagggtgaccttgggatgggggtgtggtctgttactttaatgtttctgtttttaatgtgaaggccaagcaggccctgggatgggagtggggcggaggagggtcctaagagctgattatttaatttctatccagaaatctttcttcttcttgctctgtttttttaaattaaagatttcaacaaaattttgagagttgggggatttggggggaaagagggctgctgtgatggcaggaggctgctaccaaggggatgatctgcaggtgggacgcctgagggtgtgtggaagggtgagaggcacacacacagacactgaaagaatcctaggcctggtaggcacttaacaaatgtctgttacagaccagaattttattgctgttagagacccaagcccctcataggaacagtgagaaacaggtgcagaaaggcggagtaactttatctaaagtcataggctccctgaatagcagagctgacacctacaaggaagcgttggagaccagatctaccagctagcctccctgagaccacgaggtggcgccgcagcaccggctgtggccgatgccagccaggtagccggtttcccacgtcccccgcacgcacgcacctctttgctgcaggaatcccgggctgccccgacctggagtaggnggggtggtgagtgggactgagtccctagaagcctggaccctcasttcgttccctgtacatccagctcgcctgtagacagtgggggaggat

SEQ ID NO: 389821 - DNA, 1000 bp, Homo Sapiens
gcaaataattattttctgtaacacggaagacttttatcctatttatttacaagggaaaccctcgattacaacttgtctattaggttctgagaccttttgtgaaatcagacccccaaaaaagccggggggatctgtgaaaaacagatccaagtgtatttgatatttggcattctccggtgtccctcccacttgtcactttcttttctgatccgtttcagattcattccatatccttttcatattcattttatgttgatcctcttgtccctcctccctcattttcgtggttccttctccctcctcgtctcattaaaactcttgcaaatctccctttctgcttgctcttctgtttgcggtagctgctgaaatcttaccgaagtgatgtatattctgaaattctgcgggtttctaagtgacattgagcatgctcagtagctagggccggttttgttcgcttggaaatctccctttctgcttgctcttctgtttgcggtatctactgaaatcttaccgaagtgatgtatattctgaaacttctgtgggtttctaagtgacactgagcatgctcagtagctagagccggttttgttcgccagcagatggcctgattcgacctctccaaaaatagacattttaactctctgaactcctgtttaaggaaggatgtaattcgctttgctctctcctcattttcaaggttcaaagggaagctgcgaggattccaaggtcccaccgccctcacagccaatgaggggcctgggagggaggagcttggtgcagcttgagcttctgagagaatcattcccggtagatgcagcggagtctgagctctgctgcatctgtcacagcagaacaaaattaaaaacacaacagtggaagagaaacgctgcagactatgggacgctgtaggactttctaaaacatttgctggggatttctgtgaagcatgatcttttaaaacgaattcttttggaagccggtttgggtaactgggaaaatg

SEQ ID NO: 389822 - DNA, 1000 bp, Homo Sapiens; identical to SEQ ID NO: 207032

SEQ ID NO: 389823 - DNA, 1000 bp, Homo Sapiens
agctgactgcgggggccccattcatggtttctgaccaagaaatgcatacctgatgaccccactagtccagagggtgggaataaaagcaatgtgttcatagtctcccctgctctatggataaacacagaatttctccttcctttgtggaaagacagatttcctttcagggtcacaaggaggaggatggaggggaggagacagactatgttcaccatcatagtatggctatgatatcttcacaagatttcagagtgttgtttcaacttgcaaaaaaaaaatcaatgttatatgctattatataatcattatattttatattgttatatttgtagtactccctaattattacattattacaatgtaatattatattgtaattattctacatctggttaggatttgcaatgtggaggatgcatctgctgaattttgcattattgtcatatatgaataggccagtggaaacaatgccagaaccaaatatttgctctttttggattggcaagtgtacatttggtagcagctgaatatttctggagcaaattctgctaaacatgattaggttttaggtttaactttttgtttaaggcccaattcatgcccagggtttaagattaaaatgattaatcttaattgaattttattgaatgtcataatcatactatatcctttaaatggaaaaatattcattgggttcttcctgactgatttgaaaattagacaaaatttcagcactggaacactgcacattggctgtccattgaaaaatgctcaggtgtgcaattattttgaccgtcaattataactgacagtattgtcttgcctccaaattcacctctctgaaagaagattgagaagaactcacttgtctaaacaaaagtgtgatttgtgaaaaggcatgtgtctgtggcaaagattgccagtttactcccaaaatctattctccttttcagagagtacaagaatttctaaatattagtgaggcacatagccttctaga

SEQ ID NO: 389824 - DNA, 1000 bp, Homo Sapiens; identical to SEQ ID NO: 281076

SEQ ID NO: 389825 - DNA, 1000 bp, Homo Sapiens
ccagaccttcgcgtctctgcagctcggagcagttctgctcttcagcagatgcttgaccggctgtagccaagcctgaggggtggcaggctcgggggtcccactgccttctgaggtgtctccgtgttgcagatccggcactccacccagagcctctttgagtacatgaagggcattcagagcgacccgcaggccctgggcagcttcagcgggacccttctgcagatctttgaggacaaccttctgaatgagagggtgtccgtgccgctgctgaagacgctggaccacgtgctcacccacggctgcttcgacatcttcaccacggaggaggaccacccctttgctgtgaagttgcttgcgctctgtaagaaagaaatcaagaattcaaaagatatccagaagctcctgtcaggcatcgcagtgttctgcgggatggtgcagttccccggcgacgtgaggaggcaggccctcctgcagctgtgtctgctcctctgccaccgtttcccgctgatccggaagaccacggccagccaggtgtacgagacattgctcacctacagtgacgtcgtgggcgcggatgtgctggacgaggtggtgactgtgctcagtgacactgcgtgggacgcagagcttgcagtggtgagagagcagcgcaaccgtctgtgtgaccttctgggcgtacccaggccccagctggtgccccagcctggtgcctgctgaagccagtcctggagcccatacctcacccctgcctggtgaggatgtcttgttcctgagggaggccggtgtggaaagcctcgcacagtggtgcctccagctgttgaagggtagcgctggcccttggaggctggcactagctgacagcttttcctctctgcacctgcgctctggtgacttggggtggacgcctctgccttcacttgaacacaaatgtgcttcctataaaatcatgtcccagaaaaaaaaaaaaaaaaaaaaaaaaaaaaaaaaaaaaaaaaaaaaa

SEQ ID NO: 389826 - DNA, 1000 bp, Homo Sapiens; identical to SEQ ID NO: 114725

SEQ ID NO: 389827 - DNA, 1000 bp, Homo Sapiens
gcaaactgatgttactttttgtgctgtggaagagcatttgggaaagctgggtattatagaggccaatgaaagatgaatttgcattgtagatgtacgaattaaatatgttcttcaaaatcttggggagaattatgttcttagaacatagttggtgccagataattgcattctctccacctgagtggtttaaaaaggacttttaagtattcttcagtgcaatcttcagttttgtgattaagttcatttctcttttacacttttgtactcctcagagcagtgctcccagcattgttttctttcaggatccttcagagctcagtccctggacctctgcccatgtggatttgttgttaggtcactccaacttctaaggttcttggaaagataaggaccagaacaagctcatagcaaattgaggggcagagattttatgaagattacatgagaagatttccatgaaagaattgcagccctgaggtccatgggttgacttatgctcacaaatatgtttcgtttgctcaacatggtttactactaacattttaaaaatataaatactttagcaaaaacattcactcttgagtttgacataggcctgccttatctgtggttgccacctgccatctccaagcatttggacaactagccctgatgcattaggctgcaactctgatatacagagactagcaccttgaatatgccagaaattgaattaccatctgtattagaacttaagactcagcctaaatttacagttactttaagaaaatgggcagtcagaattagggactagaatgtatatgagaaacccccactctactaaaaatataagaaattagccggacatggtggcgaatgactgtaatcccagctactcaggaggctgaggcaggagaatcgcttgaatccaggaggcggaggttgcagtgagccgagattgccactgcactccagcctgggcaacaagagcgaaactccgtctcaaaaaaaaaaaaaaaaa

SEQ ID NO: 389828 - DNA, 1000 bp, Homo Sapiens; identical to SEQ ID NO: 281079

SEQ ID NO: 389829 - DNA, 1000 bp, Homo Sapiens; identical to SEQ ID NO: 281082

SEQ ID NO: 389830 - DNA, 1000 bp, Homo Sapiens
gcgttgctggcggcagggcccgggctgcccggcgccgcgggtgcgccacacctgccgctcgagttgcacgtccgcgggaagctggaggcggcaggccctggggagccaggcaccaaagccaagaaggggcgtcggagccgcactgtgttcaccgagctgcagctgatgggcctggagaaacgcttcgagaagcagaagtacctttccacgccggacagaatagatcttgctgagtccctgggcctgagccagttgcaggtgaagacgtggtaccagaatcggaggatgaagtggaagaaaatagtgctgcagggcggcggcctggagtctcccaccaagcccaaggggcggcccaagaagaactcaattccaacgagcgagcagcttactgagcaggagcgcgccaaggatgcagagaaaccggcggaggtgccgggcgagcccagcgacaggagccgcgaggactgagggcggtatacggtgcggggcctgggatgcccgcgccacccgcagccccctcactcggcggaaacccgcgagccggcccttccgcgtccaagaagtttacttcctaaacctttttattatgatcttgaatgcggacaattggggccaaacggaaggacacagacccaaaagccagacccaggtcccagcgcgcttctgggctctaacctgggagactcgcatccagcccggcggaagctacagtctctaccctgagctccgtgcgcacgagctccacgcgcattcacgccccgctcctcgcctgcacccccaccccgtctggagcctgccctcccggccggggagcctccaggcacacacccgcttctggacgtcggggacccagcggttgggctcagccacaacggcctgagattgccccggggcaacccgtcggcatgcctggaggccgggtccccgatgtcgctggggcccctaccccctgttgcgaagacggtgactttttttccaataaaatattttatgacacaaa

SEQ ID NO: 389831 - DNA, 1000 bp, Homo Sapiens
ccttgtgtagtacagggaagtctgacacagcctctccagcctataaacagccggggggctgtggcacaggttggggcaatgttcccttgttggtgggcccccaagctggcaaggcctcttggctgaaggccagggactctgcccctggagtcctggagttaagggatgaaggcaaggctgcaggtctggcccaggggaattaaaagccagccactccagtggtatcagtctctttattggatgtgagggccaaaagggactgtaactcctgtctcaggaatggggatagatgggaggttcttgaagccccaggcgaagctggtacctctggctacagcttgctctctgagacctggggcttcactcggatcacgccctcctgggcacaggtcacagctaggactccatcctgacgccacagccgcccatggaccagcccccgagagccacctgtgggtgaggtgaagggtgatgatggcctgcttcagaacagccaaatacactttttttttttttcctgaaacagagtcccactaagttgccaggctggtctcaagccgcctgggttcaagggatcctcccgcctcagcctcctgagcagctgggattacaggcgcacatcaccatgcccaacctccaagtggacttcttgcaaagggtctggcccagggcagggctgccccacacaagggtgcactgagtgtcgtggctgctccaaatgccccttcatgagcttattatggaccgtcattgaggggtaactcctcccacaggaaccccagttgacagtttaaaagcacttttacacctctcctcgcttcctcaaaaagatcacagagggaggagctctgagaacagtctccttcaacagctcggccaagcagaactgctgtacctctgaccacttgtgttaggaaaactatcggctccctgtataataaatcaagccaggtcctccccaaaaaaaaaaaaaaaaaaaaaaaaaaaaaaaaaaaaaaaa

SEQ ID NO: 389832 - DNA, 1000 bp, Homo Sapiens; identical to SEQ ID NO: 281083

SEQ ID NO: 389833 - DNA, 1000 bp, Homo Sapiens
gtttcctgttccttcttctgcgcggctgcagctcgggacttcggcctgacccagcccccatggcttcagaagagctacagaaagatctagaagaggtaaaggtgttgctggaaaaggctactaggaaaagagtacgtgatgcccttacagctgaaaaatccaagattgagacagaaatcaagaacaaggtgcaacagaaatcacagaagaaagcagaacttcttgataatgaaaaaccagctgctgtggttgctcccattacaacgggctatacggtgaaaatcagtaattatggatgggatcagtcagataagtttgtgaaaatctacattaccttaactggagttcatcaagttcccactgagaatgtgcaggtgcatttcacagagaggtcatttgatcttttggtaaagaatctaaatgggaagagttactccatgattgtgaacaatctcttgaaacccatctctgtggaaggcagttcaaaaaaagtcaagactgatacagttcttatattgtgtagaaagaaagtggaaaacacaaggtgggattacctgacccaggttgaaaaggagtgcaaagaaaaaaaaaagccctcctatgaccctgaaacagatcctagtgagggattgatgaatgttttaaagaaaatttatgaagatggagcgatgatatgaagcgaaccattaataaagcctgggtggaatcaagagagaagcaagccaaaggagacccggaattttgagactttaaagtcgttttgggaactgtgatgtgatgtggaaatactgatgtttccagtaagggaatattggtgagctgcatatataaatttgacagatagctatttacatagccttttaagtaaaggcaatgaattttccatttcctactggaggatttatttaaataaaatatgcttattaaactctcctgcaaagatggaaaaaaaaaaaaaaaaaaaaaagtaaaaaaaaaaaaaaaaaaaaaaaaaaaaaaa

SEQ ID NO: 389834 - DNA, 1000 bp, Homo Sapiens
tcttatgactgcattgtattctgtcttctcagtattatactaactagtcctccacttatttccaatttttaagtttttttcaacttttcactgttataaacaactgtgaaaacctacatcatttgcagatttttgtatgtatctttgattatttctttaggaaaagctcctagatatcgaatttcttggtcaaggtttgtacattctaatagcttttgattagttgagtcagattgtcatccaggaaagtgttatcagtgattgctccattaatattgtgttggaatatttaataccagccaaagatgggaaaaaataggcagtttgcttgataactcccaagatcctttttaaaaaagtaaactttttggccaggcacagtgtctcacgtctgtaatcccagcattttgggtggctgaggcaggcggatcacttgaggtcaggaggttgagaccagcctgaccaacatggtcaaacctgtctctactaaaaatacaaaaaaaattagctgggtgtggtggcgggcacctgtaatcccagctactcaggggggctgaggcaggaatatcacttgaacccgggaggcagagattgcagtgagcccacatcgtgcctttgcactccagcctggcgacaagagtgaaactccatctcaaaaaaaaaaaaaaacaaccttcttgccttgaaataattgtagcctcacaagaagttacaaaaatagtaggtcctgtgtacccatcactgagcctccactgacagtagtataactatagtaaaattgcaaaaccaggaaatagtttgattacgattcttttatcagataaatgatttccaaatattttctcccagtctgtggcttgtcttttcattctcttagcagtgtattttgcagagtaaagttgttaattttgatgagatctaattatctttttttttcctcttttttggatcattctttttgatgcaacatctaaggactttgcctaaccccaggtctaga

SEQ ID NO: 389835 - DNA, 1000 bp, Homo Sapiens
ggcatggaccaggtaattgagacgtcctgcaattcttttttcacaagcagttttacagaaggctcagctattttggagaaggtccttacagagagggaagcttatgtggaaagataccgtcttgatcttatggaagaacacactttgcacagtgtctactccgtatatgacggggcagttacctctgcgctctgacaacaaggttgcaaatataaccggatattggagattcctttccacagagttattaacgctacattgacacagacacatgacatttagagatctcactgaatttcattaacaaaggctgttttaaaattcctatttctagacagtatacgtaaagcattttttggcaaggtgagaaacgttatggaaactcctcatgtgaggtttggtgttatgtttccatcttagtctgacgtttcctcaaggggtgccacacaaccccctcacagcctactgtatactcccttccaatccatgctcccccaactcctacacagcctactgtatactcccttccaatccatcctcccccaactccctcagccgactgtatactcccttccaatccatcctccccatctcctacacagcctgctgtatactcccttccaatccatcctccccatctcctacacagcctgctgtatactcccttccaatccatcctccccatctcctacacagcctactgcatactccctttcaatccatcctcccccaactccctcacagccgactgtatactcccaatccatcctccccatctcctacgcagcctactgtatactcccaatccatcctcccccaactccctcgcagccgactgtatactcccttccaatccatcctctccacctccctcacagcctactgtatactcccttccaatccatcctccccatctcctacacagcctactgtatactccctcccaatccatcctccccacctccctcacagcctactgtatactcccttccaattcctc

SEQ ID NO: 389836 - DNA, 1000 bp, Homo Sapiens; identical to SEQ ID NO: 201570

SEQ ID NO: 389837 - DNA, 1000 bp, Homo Sapiens; identical to SEQ ID NO: 201569

SEQ ID NO: 389838 - DNA, 1000 bp, Homo Sapiens
gtctcttgctccctcagaacggccctcttacccacaccctccagtttcacacagtatcttgatgctgtctagcagtctgattggagattgaagacccctgattccagcatgcatgaagttctgcccatctgggtcttagcatcactggtattttcctggcctgaggccactggttcacctccactgctccacagtcatctcctgtccctggttctggctgtcagggtcccaaccaggaccaacttttggccttggtatttctatctgttggctctgatagaaggatgtgtgagtcccaaggccaatgttcttggcatagccatggagttcccctggctatgttctgaaccactcagaacatggggaccacacttgcctgtcacataccacaagaggtcctctgtgggcagggagggcatagaaggatgctgttcctaccatcaggcttcactgaggagaggaaactttcatctgaggagatgcccacaggtcacctgccccttctgagggatgataagggcttccgtaagctttcaaaccagccgtacttccataggccagagatcattcccactcaggctatctcttccaggagcagcatcaaggattccccgtcatcactgtcaacatttgggtatgatcactcattgttcaggtgtgaacgttgctgatggcaaggatggagtctatcatgtcagaggcagacccatttggagatgggaggttgtaggtggcacacactgtttcacttgagatgagagctgtcactcagtgaaaacacaccttcaggttagctgttcttaggaaacacctctcgaggaacaccatcgtgtctaggagtgacgtttgaggcttttgagagctcctgactaaggacttggctggggcagcaaccaactttccttcttcctcccctacttccatcccccagcctcctgtgccttaacctcctgcacgtgagccaaccctggctcagcctgaataaagagttctactccag

SEQ ID NO: 389839 - DNA, 1000 bp, Homo Sapiens
agctctgaagaacaaatgaaaggttaatactgagaaatgggaggaggattcaaggcaagttttctaattgccagtggtttttgactcacagaacatggggaattcctgccagaaagtagagaggtatttagcactctgccagggccaacgtagtaagaaatttccagagaaaatgcttacccaggcaagcctgtctaaaacaccaaggggaagcaaactccagttaattctgggctgggttggtgactaaggttgaggttgatctgaggttgagaccttcctctttggatcaccagctttcagctcagggcctgccaatgagtaaatgatagttaacaggtcctggaggggaatcagctgcccagatacaaagatgggattcaggtggcagatggacccgaagaggacatggagagaaagaggaagctcctacagacacctgggtttccactcattctcattccctaagctaacaggcataagccagctggcaatgcacggtcccatttgttctcactgccaccgaaagcatgtttatagtcttccagcagcaacgccaggtgtctaggcacagatgaacccctccttaggatccccactgctcatcatagtgcctacctttgttaaagtactagtcacgcagtgtcacaaggaatgtttacttttccaaatccccagctagaggccagggatgggtcatctatttctatatagcctgcacccagattgtaggacagagggcatgctcggtaaatatgtgttcattaactgagattaaccttccctgagttttctcacaccaaggtgaggaccatgtccctgtttccatcactccctctccttctcctgagtatggtggcagcgtcttactcagaaactgtgacctgtgaggatgcccaaaagacctgccctgcagtgattgcctgtagctctccaggcatcaacggcttcccaggcaaagatgggcgtgatggcaccaagggagaaaagggggaaccag

SEQ ID NO: 389840 - DNA, 1000 bp, Homo Sapiens; identical to SEQ ID NO: 281090

SEQ ID NO: 389841 - DNA, 826 bp, Homo Sapiens
gggcggggcgcggggaggcgcagcgggggttttgctggtttcggacccgagcggccggatggtgaaatcctccctgcagcggatcctcaacagccactgcttcgccagagagaaggaaggggacaaagcccgcgccgcgcacgccagccacaccatgccgcgcctgagcctgcccggcggcagcggcggccgcagcgccgagagggcctccccccacggctgtcgtcacccgggtccggggcctcggtggtgctcctgatgtccctcacccacccctgaagatcccaggtgggcgaggggatagccagagggatcccagcctcgcggccgcgccgctgtactcggaccagcggctgagcgtgaccgaggagctgacgccgagcggccagacgcgggtcctgcacgtgcgctcgcggctctcggacgcccggcaggtcagctggagggccgtgctgagcgccaaccgcctgtacgtggagctgccggccggcgcgctgcccgagggctgcaaggacagcctcgcggtgctgctggagttcgcggaggagcagctgcgcgccgagcacgtcttcatctgcttccccaagaaccgcgaggaccgagccgccctgctccgcaccttcggcttcctgggcttcgagctggtgaggccggggcacccgctggtgcccgcgcggcccgacgcctgcttcctggcctactcgctgcagggctagcgccgcccgcgctgtgcccgccatgaacgcccgcggccccgtgtcgtgtttgtgatactgaagtgtttgctttaattctaaataaaagtttatattttccccgccctcaa

SEQ ID NO: 389842 - DNA, 1000 bp, Homo Sapiens
gacaatcactgaacgccgaagcctgcagccatgcgaccccacgccaccccgtgcctcctgcctccgcgcagcctgcagcgggagaccctgtccccgccccagccgtcctcctggggtggaccctagtttaataaagattcaccaagtttcacgcatctgctggcctccccctgtgatttcctctaagccccagcctcagtttctctttctgcccacatactggccacacaattctcagccccctcctctccatctgtgtctgtgtgtatctttctctctgcccttttttttttttttagacggagtctggctctgtcacccaggctagagtgcagtggcacgatcttggctcactgcaacctctgcctcttgggttcaagcgattctgctgcctcagtagctgggattacaggctcacaccaccacacccggctaatttttgtatttttagtagagacgagctttcaccatgttggccaggcaggtctcaaactcctgaccaagtgatccacccgccggcctcccaaagtgctgagattacaggcctgagccaccatgcccggcctctgcccctctttcttttttagggggcagggaaaggtctcaccctgtcacccgccatcacagctcactgcagcctccacctcctggactcaagtgataagtgatcctcccgcctcagcctttccagtagctgagactacaggcgcataccactaggattaatttggggggggggtggtgtgtgtggagatggggtctggctttgttggccaggctgatgtggaattcctgggctcaagcgatactcccaccttggcctcctgagtagctgagactactggctagcaccaccacacccagctttttattattatttgtagagacaaggtctcaatatgttgcccaggctagtctcaaacccctgggctcaagagatcctccgccatcggcctcccaaagtgctgggattccaggcatgggctccgagcggcctgcc

SEQ ID NO: 389843 - DNA, 1000 bp, Homo Sapiens; identical to SEQ ID NO: 281091

SEQ ID NO: 389844 - DNA, 805 bp, Homo Sapiens
  misc_feature (777)..(777): n is a, c, g, or t
tgataatgaaatcccccaagtccatggctcagttatttcaagtagcagaaaaaaatacaacaaaataatttgaggccaggcatggtggctcatgcctataatcctaacactttgggaggtggagataagaggattgcttgagccaaggagttcaagacctgcctgggcaacatagcaagaccccttctctacaaaaaaaattaaagacttagccagatatggtggcacatgcctgtagttctagctactcaagtagctgaggtgagacatcacttgagccctagagttggaggccacagtgagctacgattgcatcagtgtactccagcctgggcaacagagcaagatcccatctctaataataatttggatgaccctctggtgtttgttataacaggacctaaccattatttatcctaggacttccagtatagtcaggtaagctaattcacagtgaattctatatagccaagccctgttctccacccttgcaggtgacgggggaagtgacagatccatcaggaaaagtccactttgctcttctggggacgtgggatgagaaaatggaatgtttcaaagtacagccagtcattggggaaaatgggggtgatgctcgacagagaggccatgaagcagaggaaagcagggtcatgctgtggaaaaggaatcctttaccgtgagtatcagcatgcatgctgcccagataccactttgaccttgactgtggtagcaatattgaaggcatttcttgcctggccctctcacttaattatgtgnggggaattgagcaaggggaaaattggag

SEQ ID NO: 389845 - DNA, 1000 bp, Homo Sapiens
cagtttccttggctgtgaggtgggagacctactcttcctgtatctatggttgctgtgggggtcagatgagctaatgcatgttaatgtgctttgtaaactgtggcactccagacaatgcagggggatggggggagattatctggtttgaaggagacctggaggctaggtcttaccctttaagccctgggaggccccagtgcttgacagggatggggagcagcgggctgcagccatattcctctctgctaggcagggaagtcaggctttgagaaaacagaaaagcgctgcttctaatgagatgcctcatctgcagctcagagggtttcactttccccttcatcttgaatacttaatcctaatagtccttgagtatatttgatgttaaatatatcattttgctcagactcaccagcctcaggactgcgagcttgatctctcccctgccactgccgccagacccatgccctcagggtctgagggaggctttggcaccgctgccaccggcatatttggtgccagcccctcacacccaccagagctgggggctagacagtgtagcaagcacagggcctgacaggctggcaaggggcaacttcttgccgtagaaacctctgtgctactggaggcgttcactccatcggggctgcatgcagccttactactgacctccaggggcagattctcctcactttcaggggctggccctgacccacaaaccaggactgggctagctgtggccactcttccactctcttgtccacgagtttgtctgaataccagctcacctcagcctccaaggtacctaattggcagccacatgactggcatccctttggggagtcagggccctgtgccccaaacccagggactggagcaggcctggggtgctgagcaatgggctgcagaagcaggtagggcatgccagcaggggactggtgctgtgtgtgcccacaggtggctctttctgcacccccagctgtgagcatggtgctcccaaact

SEQ ID NO: 389846 - DNA, 1000 bp, Homo Sapiens; identical to SEQ ID NO: 201587

SEQ ID NO: 389847 - DNA, 1000 bp, Homo Sapiens
taattgtattggtttggtttcaagtattttttaactagggctgattttaagaagtgttttcatttaagctgtaattatagtcgatagaacttccacctaatatgtgactttttttaatttttaatttttttgagatgaagcctcactctgtcacccaggctggagtgcagtggcacaatcttggctcactgcaacctccgcctcttgggttcaagtgattctctcgcctcagccacctgagtagctgagactacaggcgtgtgccaccacgcccagctaatttttgtatttttagcagaggtggggttttaccatgttggccagactggtctcgaacttctggccacaagtgatccgcctgcctcggcctcccaaggtgctgggattacaggcgtgagcccccgcacccagcctcctatgtaacattataaatttattgtcattacttgtaagcctgccctttattttaaaatacaagatatgacaagatcagaaaccagtcttgtttctccatttctttctctagaaataattctttaggaattcaaatccatagtaacaaaaacaaaggaaaaaaaaacatgcttttttttatataatgaacaaaggttaagaaatgactccaggtctcttatttattttgttgatatttgtgttggttagttaagaagatgatttgctcgattatttcaacatttatttattcaacaaactgtggactttggagatgaacagctgaagctagaatcctgactatcccttaatagctgtgtaactttgggcaagttatttaacctccctatacctctgtttcctaatctgtaaaatgaagataatattagtatctaactcatagggttgttgggagggttaactaagcaaatatacaaaaagctgagaatagtcctggtatatagtaagtgctcaataaattatggatgggaggatcctgacccacatggagtttacagtcttggcagtatggatcgggcaggtagaa

SEQ ID NO: 389848 - DNA, 1000 bp, Homo Sapiens; identical to SEQ ID NO: 195318

SEQ ID NO: 389849 - DNA, 1000 bp, Homo Sapiens; identical to SEQ ID NO: 281094

SEQ ID NO: 389850 - DNA, 859 bp, Homo Sapiens
gcattattttctcctttcaatttattgttgttagaaatgttatacattttctctcatttcccaaggtctcagaacctttgggtaaggtatcccataccctggcattctattatatttttctttcatatttttttcctacttacagattgtttggtcatgaccaatgcttttgatagagggtagtcagcttggaccaagttataaaatcattcttttcaagtgtgaggggtgctgtgttggagatccctgattcctattctttggagaagttggtccccagagggagaaacctgaagggaccctcagcatggagggacccacagggctctacaatggtccacgcagggctgtgggtccaccagaggctgttccattgcagccactcccgtaacaggtcccctgtgtgtttgcaggaaaggtctgggttcctaagcagaagccactggatcctgtgctggaaagtgtgacgctggaaccggagctggaggaagccttggcaaatgcttcagatgcagaactctgtgacattgcaggtaagaggcgttccaggagctttccacatcctccacaaggatttgacccacatctgcagggagccttgtagggctcatttcagcatgaacaccttctctatttctaacaagaactagaggagaccgagagtgttcaaacaacaatccattctcaaaaaccaaaacaaggaaaatagagagaaaaccacgcaaacccaccacaccagggagccatctgctgttgccatgagaccccatgccagagggacgtgggtgtatctcagggagagcccacagacgcccttttccaacctttagcgttgaattctgcccaaccatttggaaga

SEQ ID NO: 389851 - DNA, 1000 bp, Homo Sapiens; identical to SEQ ID NO: 114727

SEQ ID NO: 389852 - DNA, 1000 bp, Homo Sapiens
aatattttgttgtggatttctgcatctatgttcatcacagatattggcctgtagttttctttttttgttgtgttcttgtctggtttttctatcagggtaatgctggccttgtagtatgagtttggcagtattccctccttatccatctctttttttgaatagtttgggtagaattggtatttgcttttatttaatgtttggtagaattcagcagtgaatccatccggtcctgggcttttctttgataagaaactttttattactgtcaatctcattattcgatactggttcatcggagttttctatttcttcgttgttcaatcttggtagtctgtatatgtccaagaatttatctgtttcctataggttttcaaatttgttggcatgtagttgtttgtaactctaataactctaataattctttgtatttatttatttattttggtgacaagagtctcacactgttgcccaggctggagtgaagtggcacaatcttggctcactgcaacctctgcctcccgggttcaagcgattctcctgcctcagcctcccaagtagctgggattacaggcacgcaccaccatgcccggctaatttttgtatttttggtagagacgggccatgttggccaggctggtctcaaactcctgacctcaagtgatctgcccacttcggccgcccaaagtgctggggttacagacgtgagtgccgggattacagacataagccaatgtgcccagccagttctttgtatttctgccagtctcagttatgcatcctttcatttctgattttatttatttgggtcttcactcttttttttttatttatttactctagctaaatatttatcaattttgtttgttttttcaaaaactcaacttttcttttgttctcctgtattgttttattactcttgattttgtttatgtctgcactgatcccaagcttcttctagaggtaccgcatgcgatatcgagctcgccccctcgaggctaga

SEQ ID NO: 389853 - DNA, 1000 bp, Homo Sapiens
ccaatagtccccacacttccaggcctggggtcacagagacagagcctgctgggaggcctggatggggggaggtgcatttcctttccttgctcctgagtacctggccagctgtcagtcttgtgccctggcagctaagcccagtgtgcttcattctaggctgggccatttgttacacatccgagatgagaaaaagagccttgggagggtgtatggctacttcccaccaaacggccaaagctggtttaccatttctggagacaaggtatgacaagccctccccacacaggagagtggacactccaaggaagttttctcacctatacaatattgatttattgtgtctcacaggcaatggggaaactgggtacttccctttccagtggccacgtactgatgaatgggactctgaaacaagtgctgctggttggagcccctacgtacggtaggtcacacactgtgaaactgtgcttcctttcagtcatgtggctgcttgtacacgtcgtattggaggaaagtgatgagatctggagctgaacagatctaggtttcaatatttccttttttcattaataacattctgtgtaactttggggaagttacttaacctctcagaacttttgtatcaccatctacaaaactgaaattgtaaatacctatttcaggccgggtgcggtggctcacacctgtaatcccagcactttgggaggccaaggtgagagaatcacttgaggtcaggagttggagaccagcctggcaacatggtgaaactttgcctctactaaaaatacaaaaattagccaggtgtggtggtgcatacctgtaatcccagctactcgggaggctgaggcaggagaatcgcttgaatctgggaggcagaagttgcagtaagccaagatcatgccactgcactccagcctgggcaacagagcaagacttcatctcaaaaataaaataaaaataaaataaaataagataaaataaaatttgtgtttcaaagctt

SEQ ID NO: 389854 - DNA, 1000 bp, Homo Sapiens; identical to SEQ ID NO: 204997

SEQ ID NO: 389855 - DNA, 1000 bp, Homo Sapiens; identical to SEQ ID NO: 201584

SEQ ID NO: 389856 - DNA, 1000 bp, Homo Sapiens; identical to SEQ ID NO: 201662

SEQ ID NO: 389857 - DNA, 1000 bp, Homo Sapiens
atttttgttaaataatgtattttctttgagtatgattatgctacctatctagatagcaagtgcctccaggacagagatgtattatagcatttttatcacatttccttcaatgaaaccctctttttctttggtctctgatgtttttcttgattatacccaaccaggactaagcaatattaaaaaagcacttggcaggtcaaatacagcagctcagacctgttattccagcactttacaggctgaggcggaaggatcacttgagcccaggagttcgagaccagcctgagcaacagagtggacccatgtctctacaaaaaaaaaaaaaaaaaaaaattcagctgggcatggtggcacatgcctgtagctccagctgcttgggaggctgaggcaggaggatcccttgatctagggaggtagaggctgcagtgagccatgatcagaccacagcactccagctggggtgacagagtgagaccctgcctcaaacaaaaacaaaaacaaaaaaataaaaacaaaaacaaaaaacaagtaaaaagaaaaaaaataaagaaaaatctactgacaaactagagcatctgtgtttctgaaattcttgatgagaaaactgaccaagcaacatgtcaatgccatggaaaatcttattcagcatctgtttgatatatttgctacttgtagtgatgattactagatacatctatgactacatatgtagtctatgatatatctacatagactatcatagacatatctatcatatgtatatctatgacaacatataaatgtaatgattcagtgggcatactttaaacagattctacgagacactatgttgttctagtagttttcctttaacatggttggttatgaaaaaaatatacatttctccctcaggctttttattgatttaatcctattccttgatattttgcttttgtcctgtctcttttatgcttcaatctgtcttttttttttttacatcttaattcctagttattttgga

SEQ ID NO: 389858 - DNA, 1000 bp, Homo Sapiens; identical to SEQ ID NO: 201650

SEQ ID NO: 389859 - DNA, 1000 bp, Homo Sapiens; identical to SEQ ID NO: 281106

SEQ ID NO: 389860 - DNA, 1000 bp, Homo Sapiens; identical to SEQ ID NO: 281107

SEQ ID NO: 389861 - DNA, 1000 bp, Homo Sapiens; identical to SEQ ID NO: 205014

SEQ ID NO: 389862 - DNA, 1000 bp, Homo Sapiens; identical to SEQ ID NO: 281109

SEQ ID NO: 389863 - DNA, 1000 bp, Homo Sapiens
ggaaactgaaagcaacccaaatatacaactggtgaatggataaacaagttgtgatattccatactatggaagactgctcagcaatagaaaggaatgaacttagggcagggcacagtggctcaaacctgtaatcccagcactttgggaggccgaggcgggcagatcacctgaggtcgtgagttcgagaccagcctgaccaacatggagaaaccccatctctactaaaaatacaaaattagccgggcatggtggtgcctgcctgtagtcccagctactcgggaggctgaggcgggagaaccgcttgaacccgggaggtggaggttgtgatgagccgagatcgtgccattgcactccagcctgggcaacaagagtgaaagtccatctcaaaaaaaaaaaaaaaaataaaataatagaaaggaagaaagaaagaaaagaaaggagtgaacataaacttggatggcggtctcacgatgtcacgatgttgtccaggctgccaagcagttaatctagacctgacttaacccctggggtccttaaaccccataaagccaccattgccatgcggaaggcccctaaccatgacaatactgatttgaagctctctggaggaaaaaaaaaaaaaaatcaagtataaatataaacagagtagagaggacccaatctcactccaaaatatatccagtaatcattaaaaaaaaaaaagattaaaaaatttcagcattgtgtgggtataccacaacttgtttttccattcaccggttgttgtatatttaggttgcttccagtttctgacaatgataaataaggctgctatgaatattcatgtacaaatcattgtgtggacatgttttcctttctcttaggaagacacctcagagtgggactgctggattgtacgataagcatatgtttaactttataagaagttgataatactgatttgaggctctctggaggaaaaaaaatcgagtataaatataaacagggtagagaggactca

SEQ ID NO: 389864 - DNA, 1000 bp, Homo Sapiens
agacagaagtgaaggaccttcctggagcagggccccttcgctttcagaagggccgtattgagtttgagaacgtgcacttcagctatgccgatgggcgggagactctgcaggacgtgtctttcactgtgatgcctggacagacacttgccctggtgggcccatctggggcagggaagagcacaattttgcgcctgctgtttcgcttctacgacatcagctctggctgcatccgaatagatgggcaggacatttcacaggtgacccaggcctctctccggtctcacattggagttgtgccccaagacactgtcctctttaatgacaccatcgccgacaatatccgttacggccgtgtcacagctgggaatgatgaggtggaggctgctgctcaggctgcaggcatccatgatgccattatggctttccctgaagggtacaggacacaggtgggcgagcggggactgaagctgagcggcggggagaagcagcgcgtcgccattgcccgcaccatcctcaaggctccgggcatcattctgctggatgaggcaacgtcagcgctggatacatctaatgagagggccatccaggcttctctggccaaagtctgtgccaaccgcaccaccatcgtagtggcacacaggctctcaactgtggtcaatgctgaccagatcctcgtcatcaaggatggctgcatcgtggagaggggacgacacgaggctctgttgtcccgaggtggggtgtatgctgacatgtggcagctgcagcagggacaggaagaaacctctgaagacactaagcctcagaccatggaacggtgacaaaagtttggccacttccctctcaaagactaacccagaagggaataagatgtgtctcctttccctggcttatttcatcctggtcttggggtatggtgctagctatggtaagggaaagggacctttccgaaaaacatcttttggggaaataaaaattggactgtgaaaaaaaaaaaaaaaaa

SEQ ID NO: 389865 - DNA, 1000 bp, Homo Sapiens
tttatctcacaagtggaatcacagtcaagacggatcaataatatggttggctcagcaaagccagctgtgctcttttagggtttaaacaagccacacgttagaaagcaacactgtttttatgtagttcatatatattaccacgacatttaacatcaatattgtatatgttgaaggaggtataataaactcagtcatatatagtgaacagttcaaatgggaaagtgttctaaaacatattatttgaggtttgtcatattcatctttggtttactaaatttacttagaaatatttgaaatgcaaaattgtgtgaaatcaccttatcaaattaaaatgggaagaaagtaattttaataatttttaataatcatatgtcagcattctgactacttaccacatcaaatctgggcccaaacagcctcagttaactgcataattcaggaacaaaaccagcttgctttgttgcacgcctgggcaatttcagccaggacattaggaccacttgttgtacatctgaataattatggaagttgggacatgttaaggaaaacaaatatgttcatcaccaacaatcagctgtcattttattaatctatcccttttgtgcatgcaccatttctctcttactaacagtttcatctgttcacattttccttgattcaaatattaaagttcagacaactattctgagttttttttcttctgtctctggtttccttgcatacctccttgagaacgttgtaacagaggatatggtattccaaagcactagtgatgaaagtaacttcttcttgctggctttatctaattttagtttgtacagttatttctactttatataattaaataaggcccacataccagcatcaaagagaaataggtaaaatttcctttctgtaagtgttggggaataagttacaacaacagagagctgagaatttcccttttggggtggggctggaggggggatgcttttctaagtctctgtcaaaaaggtcttct

SEQ ID NO: 389866 - DNA, 1000 bp, Homo Sapiens
ccctggagggtgcaagtagccctgctgcatccaccttgttccccatggagcccactcccacctgtcatccgtgagccccagagcagcagaatcagagtacaagatgcttgacactgtgtccttcttccatccaggattggggagtcagaggactgtgcaggaatcgtgtccttcctgtgctctccagatgccagctacgtcaacggggagaacattgcggtggcaggctactccactcggctctgagaggagtgggggcggctgcgtagctgtggtcccaggcccaggagcctgagggggtgtctaggtgatcatttggatctggaggcagagtctgccattctgccagactagcaatttgggggcttactcatgctaggcttgaggaagaagaaaaacgcttcggcattctccttaggacttatctgcttgtagatttggctgatccaattaacatgtggggttcttggtgtgggtctggggagctgaaggattttatggagctggtgctttggaggaatcttaagggaaaggagtagaagctcaggcctttgaaggatttcagctcctcctctctgtaatttgtgctttaagcattttttttcctaaaataaactcaaatttatcctcaagtctggaagcatctgtcaagggtagagcccagggcagcatggtgggaagaggcctctaccgccagctgccctgagctcgtcgcagacacacagaggcgggagtgagtgtgctgccttgcagaaggctttgtgtgtgctccattgtctgaactgggcctgctgggggctcagcaaggtggtggtgggtgacagtggaaagattctggggttctcccaggggtcctccaggctaatacttcttaatgttttctgggccacacaggcctttgagaacccagagaaaacagttataccgaatcttgtgcataattccagttagaggagagtagtcagagctgaagttcctcttggggtgaacacatggcttt

SEQ ID NO: 389867 - DNA, 1000 bp, Homo Sapiens
cacctgtgttcaatctgggagccttcctggccagtctgagtggcagccagaagggagctcatagtgtctaggagtctcaggcaaggtaggtcagggtactgtgggcaggggggatgtgtgtgataggagagggtaccctaaaccccataccttccctccctgacctgaaaagctgatctcaacagggattcacacagaattaggctgtgtttttgcattagctggtaggtgactttctcaaaattcttaaattcagaaagtatttagtaaacttgaggaaggtatgaaatctggaggaggcatccaggacccaggggtttgatagctttacaggtaggatcataccacaccaaaagagcagtggacaataagactatatgagctatatgaagcttttaggaatcatttaggacagacagagccctaaacaacccattcatgacttaagttgttggctcagtgtatgctggggacaaagaaaaactaacaagccgacctgcctttatgataaattctagtgtgcttacaagggatgacttcctgaggtgtgatctgtccaccttgaagaactccacaactgaagaaggggagctgtgagaacgtggattgttctacaacttgcacagggtaacagaggaagtggctgaggcctagagtcacgttttccagttcccttcgcaaactatatttcttggaacgcgaaaggaagctttacctatttcatagaagacctggaatccataacctcagaaggcaatattattgatagaaaatgtggaaggatcaggaagttcttagattcttggatgacagatgcatgttgatgccctatggagatgtccttgtgttttgaggtcactgaggtaggaagacctgtctactcttggtttcaccactagaacagtcttgggctggatgggttatagagctgagcggctgtgatggttctgtttttacattaacaaaaacaattaaaaacaccaaaaacaaaaaaaaaaaa

SEQ ID NO: 389868 - DNA, 1000 bp, Homo Sapiens
ggccaggacttgctgtgcagcgcatgtcatcctaaacaccatcatcgctctgaggaaggctctgttacaattctcgcgtgcagatgagggagtgggggcacagagaagctaagtaacttgtctaccagcacacagccaattaacggcaaaggtggatttgaacccaggctattcttggcttacccacacttacgtggatgcacagaggaagggcctgagacagcaagacaccacgccaccttctccacctgggacctgcccccgcaggcgcctgcccacctcacaccctcccatagtcatcatgtcccagcagcctccccccaccaccacctcacagtgcccacagctgccgaacacccacctggcacccccctcccacctcatcagggacacacacaccagacgatctgatacccgccccatgcagacccgcactggccatccctgcatccagccacctcccatcattcacctgagaggccctccaagtccctggccactcttcccagaccttccctggacccagagcagcatggacctgcccgccctggacacagcaggacacggtgccaaagggagtgagctggcagattctggaatcaccaaggccacttccaggccattttactgagccaccagtcaatacctctccacacttcccttcttggggtgcagcgtggactggagacagcccttgccttggccttccaggccccagctcctctcccgcccggttcccctcagaggacacctgccatttcccgggtcccagctcctccccgacacggttcccctcagcggacacctgccattcccgggtcccagctcctcctcaacacggttcccctcagcagacacctgccattcccgggtcccagctcctcctcaacacggttcccctcagaggacacctgccatttcccgggtcccagctcctcccccacacggttcccctcagcggacacctgccattcccaggtcccagctcctcctcaacaca

SEQ ID NO: 389869 - DNA, 1000 bp, Homo Sapiens; identical to SEQ ID NO: 281110

SEQ ID NO: 389870 - DNA, 1000 bp, Homo Sapiens; identical to SEQ ID NO: 281112

SEQ ID NO: 389871 - DNA, 1000 bp, Homo Sapiens
aaataacaagtctctatccatgttaccaaatttaaccttttgaaaataataaactttaaaatatcagatgtgttattacaggatgatacttggaatcaagtgaaatgagttatatggtcatcactaaatttagaaatctattgtgaaacaaagacaaacaggaaagtacagaatagagacttttagtaaataaatggaatttaaaagaaagtgtttatttacagtgtcacgacagaaaaggatgtctttgttgtcatagtctttgagggatctccgtaaaatctggggcacaggtacaagaaatagccaatatttagttcccagaccatgtttagtagtgtccagtttcagatcatgctgccaagaggtatctccccctcaggtgggtcatcactgagccctggaattggagactcatacttgcccagcacaatgttacgggcagacaggccgacatctatgattagctagaagccataaagaaaagctgctaagtggccactaggtgccacttttctgtttttgtaatgctttcattagcagatcttttttttccaagctccatggggcctatgagaggcatttatgatttttgtgcctacaataagtcagcctgtctggtgtgagttgttttatgagaaatgctttccaagggaggtctaggaagatcctgacacataagaactttggcttagagagctttccaggtgtagtgccaataaaaactgacctggaaagaaaacctgcccagcacggaacatgctttctgaactcacttgagagtgtatggtgtatgtcacttctcatatattcttgagtttagatttgtcttttatacaatttttagctcttttccagttcacttgtgctcgtctgtatattggtatttttaaatttttgtggtaaataatgaaaagagtgaaattatattttataattactcatttgtagtttttttttttaatttaataaacttcctccaaaaagtgctcccttaaaa

SEQ ID NO: 389872 - DNA, 1000 bp, Homo Sapiens
tcttatcatttcaagatcttaaacctcttcaagccaaaggttttcagaacatgcccaccacctttgagaagaaactgaaatagcttgtcctacaagcacaatgattacatgacagccacagggtctgactccagtgcttaaagcccagctccattatttctgggggaccttaaactaggtactgaacttctctacagcctagattctcaatctatggaataggaaaaaatcacagtatccacctcacagaaactttgtgagaacgaagtaagggaattaatacaaaacactgaaaacagtgattggcataaaaataagtgcgaaataaatattagttattatcactattattagtactcattaattcataccccaaatacatttttttatatcctggcaagtaacaaaaattttaaaatgcaaccaatgttccctgactcttacaaaatgaaaatacttcctaggttcaaaaaacagtattaaatcagactcagaattaaaagtaagggtgtgctgcacctgggtttgggagaaacaatttccaatatttggcagctctcttcgtataggttagtacaacagaatctttaaagaacattaatgctgtaaacatcaactaaacttaagccatcatgagaaagagaattactgctaattctctggattcattctaatggtgaaaacatactagttgaaaaagctggtgtaagaaaaaattttaaagtatgatggccttaataactagctttcattgttttaactcgtaagatatcaaatgagacagaaagcttatgaagataagatcataaaatacaatggtcataacatgctaacttggtgttcttctgctctcatcccatccaataagtagcgaagcagctcctggctgtcttgctgctgatagcctttaaaccgcactgctctagagaaaaacaaaaagacagaaaagcaatcttcagtctactaagctctgaagctatttttagaaaatcttaggatc

SEQ ID NO: 389873 - DNA, 1000 bp, Homo Sapiens
gtggattatttcatactgcaaagaaaaaccatttgccttttggggaattgagctaacttctaatctagtcttaagactagaatgctaaaaacaaaaacatgaaggaaaataaaaccccttattattaaattgatttgtaaaaacattgttactggaaatttattggacttgaggccttcctccagaaaataaggacttgattgtcaggcctatattaggttctgaaccttaatgccatgtatttgtacttactaaaaattgtttcaatgaaaagtacattagcagtatgaacttctggtccagttggaagtttttccatttgaaaaatgtgatgtttgcatggaactgtttgaaagactggtgatcgagttttaagataggcctccaaatcctttttgaactgaggtggcattactccagtgaaattggtgagaatccggggagcaatgttaatttcactcaacatgtccacctttagattaggagtgaatgggtcggggagcctcatgtttcttggaaaggacactcaggatcaaatttcttaactggatacaattaggtgggatcacatcacagaacccataatggtaatcacaaaaggaactctgggaaatcatgcaaaagaaccagcagcactcttaaagtgccttgtagaggatttgcataggtttggtgagttccacatttctaaggaaaggcgctaaatatttgaataaatcaatcagtagctgtgcatacataggccaccccttctgctgtggcgtatgtgccagcattcttgcaataaatatccgatgggaaatcagttcaagccaggcatatacaaagccaggagctttggtaggcctcaacatgtggaagtgtattgcagaaagctgtaagtgtctggaaattaatggtttccaacacatgctcaggtgcattcacttccaagagaagcataataaaaattcgatggtagggaagttgctgaaaaaaaaaaaaaaaaaaaaaagaattc

SEQ ID NO: 389874 - DNA, 1000 bp, Homo Sapiens
tcaaaggatagtgttggcctttgtttttcctgagggatagcacagcccccgtgtgtcaggtgtgtaaagaaggggagctggcatgtgcccttccatccaacctaaccctgtttccccacccctccctttttttaaaggtaacatttgtcgatcacccattgcagaagcagttttcaggaaacttgtaaccgatcaaaacatctcagagaatgtaagtaccattcaggatcttaaagaggccaacctgaactcctctgggcaggaaattgcaaaaaaaaaaaaaaattccatgtttcttccctgcagtggagggtagacagcgcggcaacttccgggtatgagatagggaacccccctgactaccgagggcagagctgcatgaagaggcacggcattcccatgagccacgttgcccggcaggtaccgtccttggacttgaagttgtgtgttttgtgtttcagtgggtcattgacagcggtgctgtttctgactggaacgtgggccggtccccagacccaagagctgtgagctgcctaaagaaatcatggcattcacacagcccataaagcaagacaggtagacaagctcttgttcaatttctaatatatagagtccagtaacttgagaagtagcgaaaggattaaccagacttgtatattaatgaatgtgtttatttagggtgagcttaccagctatgtgtgtccattttgtttcacttctggttgcacggtgttgaaagrcttgcctgactttggaatttacttattaaaatgcacataaaagctaggtaatttataatgagagagcctgactgtgcgctggggctgagcggtgctctgtcttctgttccttcctgcataatttttattaaacatttaggccatagtaatcatcctgctgatattgcaagtttgttgctagaatgaggttatataatatatacaaaaacattttttcaactgtaaagtgccttagtaatatagggtaataccagcaacat

SEQ ID NO: 389875 - DNA, 1000 bp, Homo Sapiens; identical to SEQ ID NO: 281121

SEQ ID NO: 389876 - DNA, 1000 bp, Homo Sapiens
atccctggaagctgctctccaggagttactctgaagcagttgccacttcttccctcgggccttttcccttgataattcctcacttcctctgggaagtcaccccgaccccctgtcaggtgacccgcctcttaacggtcgccgcgtcccgtctctcccccacaaaagcacacttccctttgcattgtaattatctgtttacttcgtctgtctccctcactggaccagaagctacccttcgggagaggctctgagtgttctgtccggggctgtgccctggccccaagtacagtgcccccacacgtgctgggcgctccgtaaacactggataagggaaggaacgggtgctcttggctagctgggccaggctgctttgcaaaaaggccgtggcatttcaagccgccgagagccacgtgcggtgtccctttcctcgcttcctccccagtgatgtgcgtttccctcgtcaatgccacgctctccaggcgccagccgggcggaggaaatctccgccccctcccaagcccgaggcgggggcgggcgtcggaaggtcaggtgtcccggccggcgcgcagcgccagggggcgtcagaagcgctcagaccaccgggcgctgagccggtgggcgcgcggcgtcctgccggggtcccacctcgcaggggcctcgcttcgctcgacgtcccgccccggacagccccagcacgggggacgacccgcgctgcgccagcgaaccccgcctcggaggagtccccgcccgggctctcaccgccacgcggcgcgagcccggccagcagccggcgcacctgctcggggagtggccttcggcggagacgagcctccgattggcgcggaggtgacaaaggggcgtggcagataaggccccgcccctcccaccccccaccaccccccggagtacttaagggagttggcggcgctgctgcattcattgcgccgcggcacggcctagcgagtggttcctctgcgctactgctgcgcgaatcggcgac

SEQ ID NO: 389877 - DNA, 1000 bp, Homo Sapiens
gccatggtaaaggattcacatatcattcaaagtacaatggaaaactatatagaggttcttaatcagagtagtgacacgaactaatttatgtttttaaaagtttaacaattgtttacagaatggattatggaggcaaaaattgaagcagagagaccagctaggaagatcctacagtagtccaagatgatgtttacttgacacaggctgatagaagtgaatactgagaggagagcaactgaatatgttacagagacaaaagcatgatgacttaccaatggagagtgaagagaagtaaggaatcaaggacaatgaagggtgtcttagtctattcaggcttccctagcaattaccataaactgggtggcttataaacaacagaaatttattctcacagttctggaggcagggaagtccaagatcaaggtactggcagattcagtgtccattaagagtccatttcctcatagatagtgccttcttgctgcttcttcatatggtgggacaagacagctctccagggcctctttaaggggactcctcctattcacaaggcttctgccatcacgactgtattagtctgatctcacattgctataaaggaatacctgagactgggaatttataaaggaaggaggtttaattggctcatagtgctgcaggctgtgcagcggttagtggcttctgcttcttgggaggcctcaggaagcttccagtcatggcagaaggcaaagggggagcaggcacgtcacatggagaaagcaagagcaagagagagaggggctacacacttaaataaccagatctcatgagcactcacttgctatggtgaggacaccaccaagggggatggtgctaagccattcctgagaaatctgcccccatgatccagtcacctcccactagcctccacctccaacactggagattacatttcaatatgagatttgggtggggacacatatccaaaccatctcaatgacccaattatctcccaaagctt

SEQ ID NO: 389878 - DNA, 1000 bp, Homo Sapiens; identical to SEQ ID NO: 281122

SEQ ID NO: 389879 - DNA, 1000 bp, Homo Sapiens; identical to SEQ ID NO: 201665

SEQ ID NO: 389880 - DNA, 1000 bp, Homo Sapiens; identical to SEQ ID NO: 281124

SEQ ID NO: 389881 - DNA, 1000 bp, Homo Sapiens
tgcagaccacaccgtggaaggtggaaaattggtttcactgccagctctgcccttggcttgctgtgtgaccttgggaaggccctggtctgtctctggacttggctttggaaaaaacagacacaagacaaaagtcccaagcttcagctcacacgtcaaggagctgtgacttttcaggggaaggggtaaggggagagctgtggctgacccccttgttccctcccgccccttggatagctgttcttagagaaaagctggatacacccccacagcccctgcaaatacacacttggcttcctcccggcagtgaacacagaggcgcccagcaagtgatgaaggcagacaaaaagacacacttgacaaagcaaaggagatgaggctggcttggccccgagccaggagcatgctgaattctcttgtggtctttgtttcctgaatggcctatcaatcagtaaccgagtgcgtgccaaacccagcccacacgggaacccggtgtcctcggctctccagtaaatactacttcaggtctcatgtccgaggaccatatgctcccaacacagctaataaaatcatccaggagtagcctggaggccgcagacacccgccccagggggcaggagggggacgagccaggctgggcctccgctgttcaagagtgttcctgacctgctctctctagcaccctgggcacctgccaggggaccctgaatcccctgaattctgagctttgccttcacatctgaggccccactgcttataagctacatgagggagggattgcatctgaaagttcacccaccgatcccagtgcctcacccccctttgggcacttagtgcaccctccatacatgtttactgagtgcacacgtgactggttgagtacgaggaatgaatgagtgattgattaccaaccaggtggaccacccctgtccctgctccatgcctccaggagcaaggaagttgtggggtcagggtaggcagctggggtggtcagaggtgtgcg

SEQ ID NO: 389882 - DNA, 991 bp, Homo Sapiens
aggcgcaagccggcaagatggcggcggctggggctggccgtctgaggcgggtggcatcggctctgctgctgcggagcccccgcctgcccgcccgggagctgtcggccccggcccgactctatcacaagaaggttgttgatcattatgaaaatcctagaaacgtggggtcccttgacaagacatctaaaaatgttggaactggactggtgggggctccagcatgtggtgacgtaatgaaattacagattcaagtggatgaaaaggggaagattgtggatgctaggtttaaaacatttggctgtggttccgcaattgcctccagctcattagccactgaatgggtgaaaggaaagacggtggaggaagccttgactatcaaaaacacagatatcgccaaggagctctgccttcctcccgtgaaactgcactgctccatgctggctgaagatgcaatcaaggccgccctggctgattacaaattgaaacaagaacccaaaaaaggagaggcagagaagaaatgagccctccctccgttacttccagcaggccacaccagctgtttcccacctgctgtgcagtcaccttagatgttcagaagccgcttcctctccactgaagagctatgagatacgcacaatacttgctgttcacgttatgactctcatgcaagcaaaatacacagtttcattgttctgaatcctgtggtttctttcagcccacttttatcgccttaacctagttaatgtatattttgaattgtgtgtatgacctcagaactgaaattgataatgaagttgcaagttttgatagcccgtgaagtgcataagtatctaattttacctgaattgatttggggggaaattaccagtagaatgccttggtctgaatatttgatagaaccaattgttgtacataaaacagatctgcgcatatatatatatgtataaaaaataataaaataatggaagatgaaaaaaaaaaaaaaaaaaaa

SEQ ID NO: 389883 - DNA, 833 bp, Homo Sapiens
  misc_feature (56)..(56): n is a, c, g, or t
ccaagacgggaggatcacgaggtcaggagatcgagaccatcctggctaacacggtnaaaccccgtctctactaaaaaatacaaaaaattagccgggcgtggtggcgggcgtctgtagttgtagctacttgggaggctgaggcaggagaatcgtgtgaacctgggagacggagcttgcagtgagccaagatcgcgccactgcactccagcctgggcgacagagtgagactctgtctcaaaaaaaaaaaaaaaaaaaaaaaaaagtcctattgcattaaatatgttttaaaagtttgaaaaccattgaattagatgatcttttacacacctagctctaaaaataattccatgatttgcctgatttcaaatgacatgcatgctaaactctctttcagaaacgaaaatcaagaagagagctctcaggaggttcacatgttgtcagttgctccagttgcttcctctgagacagggccctgcacacttggtttggataggggtcttggtgaaaattctgttgaagagccccagataaaggactctaaaggagacagtgtgcttacacttcctgtgccagaggtaaaagaatgtacagtataataagggatagcaaggtgttttcctccatttaaaaaaaaaaaggtataatttacatacaataaacttcacctcttttatcttcatttttctttatttcttcttttttttttggagacagtcttgttctgttgcccaggcaagagtgcagtggtatgatctcagctcactgcagcctctgccacccagattcaacagattctcctgcctcggcctgccgggtagctgggactacaggca

SEQ ID NO: 389884 - DNA, 1000 bp, Homo Sapiens
  misc_feature (856)..(856): n is a, c, g, or t
ccgacttcccccttgctgttctcgtgatattgagtgagcgcttgtgggattctggttgtttaaaagcctgcagccctcccacttcactctctctgtctctcctgctccaacatggccagacgtgcctgcttccccttcgccttctgccgtgattgtcagtttcctgaggcctccccagccacgcttcctgtacagcctgcagaactgtgagtcaattaaacctcttttcttcataaattacccagtttctcatagttctttatagcagtgtgaaaacagactaatggacccttctggttgaaggaatgcagccattctgcttgtttgactatgtcctttctattcatctctatttcctgggaggtgtttatccaagtgcaataggaggtattggtgaccgcacagtcccctcagtgttctgctagtaaatagttgaaggttgatcattgatcttctgcgttttcagtctggcatggaaaagcccctgtgcaactggtaaagatatcaataagcaccaggaggtatctaaatccaccaggagccataggcatcacgttgacgtccatttaccagtcttccctggcaagattcttctgaattgtgctgccttggccaaaagagtatgggaagggctgggcgcaatggcttgtgcctgtaatcccaacattttgggaaaccaattcaggtggatcgttagaggtcaggggttcaagaccatcctggccaacatggtgacatcccatctctactaaaaatacaataagttacctgggtttggtgttgggtgcctgtaatcccagctactccagaggctgaggcaggataatcgcttgaacctgggaagaagaagtggcantgaactgaaatcgtgccattgcactccagcgtgggccacaagagtgtaaacgtcgtcgcaaaaaataaaaaaaaatccgggcttgatggctcacacctgttatcccagcactttgggaggccaagacggtggatcacaaaggtc

SEQ ID NO: 389885 - DNA, 1000 bp, Homo Sapiens; identical to SEQ ID NO: 118126

SEQ ID NO: 389886 - DNA, 589 bp, Homo Sapiens
ccccctggaagtgaggggaaggaccgtggggctcagtgggagctggagagagtgactcaatcagctctcgtttgcttacaggtgacccatgggctgagggcatacgatggcttgtctctgcctgaggacatagagaccgtcacagcaagccaaatgcgctggacacattcgtacctttctgatgatgaggacatgctggctgacagcatctcaggaggtgagccaaggatccaaggctgggagcagaggggtggggggtgagactgtgcttcttcccactggcatgggggaggagggtgaccgaccattccgagctttctcaaccctgtcccactgtatactaggtgcccagaacagtgcctgacacccagtaggtactcaacaaatacttgttgttgctgattacatctcttttttgcttatagacgacctgggcagtggggacctgggcagcggggacttccagatgggtaagttgctgcaggcctcctgcaggtctccctcctgtcccccagggaagccccagagccagtctcctgggctgagggctccttgggcctgccctggggtacaaagcaagaagaagtgg

SEQ ID NO: 389887 - DNA, 1000 bp, Homo Sapiens
ctcgacacgaaacataaacaataaacaattcagttcacgttatatagacatatctcatatatatatgagatatatatatataaaatatcttacgcacatgcacacttagactttctcggttttcatgaaactcacaatctacctcaggcgctcaaaggcactcggcctctcaggtctgaggcaccacagagaggcttccttgggcacagttgcttgctggtcaagacgccaacttggcaaggttatgctgctggcaaaggcagattcgtcagaataaagtcgccacaggctcaaccaggcaaatcatgaatggccctttcagcaggagcctgagaggagggatgttattcagcccagcaaccctatttactttttttcaggatccccaaactcgcgttttttaaggctttccgctacaagagagccagaattgaagcctgggttggcggcagtgcaggtacctgctcacctaagcatccctcttttaattttcctaactcctccacccacttgcccaagtataacttttgaatggattcagcagaagtgaggcaggaaaggcaggaagatgagaaaaggcgcgacatcaacacgcagagctcactgagccgccttgatgataaaaggcgggcacagggactacgtgggtggtggcagaaagggcgcgggacacgcctcgcaaagagggaagagtgggcggggccacgtgccgttgtcagagttcgcaactcgagcgcccagagggctcgcgaaaagtcccagcctgcaagccaaccgcgctcagcggacgactggccggatcccaacgcgctgccccttgcccagcctgcgagcgcgtggtacgaaggcgcgtctgcatccatgccccagcccggggagctggaggcgctcgcagtcagaggcgagtgatgctaggctgagcgcgtggcggcccgtgtcgtgccccgctgagccaagtgcggaagggcagcggcgcgctccgattgtgctcgccgcacgc

SEQ ID NO: 389888 - DNA, 1000 bp, Homo Sapiens
aagtaaaagatttcaaataaacaacctaatgatgcatctgaaggaattaaaaaagcaagaacaattccaaaataagtagataggaagacataataaagatcagagcagaaataaacaaaattgagactaaatgaaacaatgaaaagatcaacaaaatgaaaagttggctttttgaaaagataaaaaaaatcaacacaccattacctagactaaccaagaaaaaaatagaaaacatccaaagaataaaatcagagatgaaaaaggatgtattacaactgatatcaaagaaatataagggtcactagagactattacaaaaaactatatgccaacaaattagagaacctagcataaatggatacatttgtaggtacatacaatctacaaagattgaactaagaagataaagaaaccctgaaagaccagttacaagtaacaagattaaacttgtaattaaaatcccccatcaaagaaaagcccaggaacccatggcttcactgcagaattctgccaaacatttgaagaactaatgccaatttttctcaaactcttccagaaaattgaagatgaaggaatgctttcaaactcattctaccctgatatcaaaaccagactaggacacaacaacaaaaaaaagaaaaccaaaggtcaatctctctgattaacatacacacaaaaatccttaaaaaaaaaaaaaaactagaaaactgaatccagcagcacattcaccatgatcaagcagagttcatcctaggagtgcaagaatggttcaacatttgcaaatcaataaatgtgatacgtaacatcaatggaatgaaagacaaaaaccatacgatcatctcaatagatgcagaaaaatcatttgttaaaattcaacatctctttatgataaaaattctaaacaagttagatatagaagaaacatatctcaacacaataaagggcatgtatgacaaatccacagtgaacatcatattgaatgaggaaaacttgaaagctt

SEQ ID NO: 389889 - DNA, 1000 bp, Homo Sapiens; identical to SEQ ID NO: 281128

SEQ ID NO: 389890 - DNA, 1000 bp, Homo Sapiens; identical to SEQ ID NO: 281129

SEQ ID NO: 389891 - DNA, 1000 bp, Homo Sapiens
gccgtggagcaactgcgtgtgcacgtcagacggcacaagggggtgaggaagtttgagtgcaccgagtgtggctacaagtttacccgacaggtaggccagggcctggcccccttcccctaccctaggatcccccaaagttctgagctcaccctccccgccaggcccacctgcggaggcacatggagatccacgaccgggtagagaactacaacccgcggcagcgcaagctccgcaacctgatcatcgaggacgagaagatggtggtggtggcgctgcagccgcctgcagagctggaggtgggctcggcggaggtcattgtggagtccctggcccagggcggcctggcctcccagctccccggccagagactgtgtgcagaggagagcttcaccggcccaggtgtcctggagccctccctcatcatcacagctgctgtccccgaggactgtgacacatagcccattctggccaccagagcccacttggccccacccctcaataaaccgtgtggctttggactctcgtttttcagcctgacagtctgttcccgtgtcctggagttggggaagtgctgccttcccacccacgccttcaggagagagtagtgccctgcccggtcctatgtgggcctcagatcagctggcaggttcccctcctgtcaggaaacctcagctgagcgaggcttggatggggttcctttgggggccaaacctctggccttggctgctctccacatctgtattctgttcctcattactgcaggattttagagtggggaacgctggccagttagagcaccagtattcctattttagagctgaggtgataccggcttctggagatagaattcattactaagcttctggagttcagtagagtgacagggcccacggggctggccttgttggggcagaatcaaggattgggccagttagtgttggttgagcacgcctgggggtttgaggagggtagggccctccttccaagaaggctggtcttt

SEQ ID NO: 389892 - DNA, 1000 bp, Homo Sapiens
ataaatgtctgttgcgggagacatcaggtttgtatcactttgttacacagccctagcaaactcacacaatactgtcctccccgctttcttcttcctgctattcctgccaagtttcttttccttccatttttgggccacttctgcttcagatccaggcatacctaccgtgttcatttcctcatccttattcattcattcatccatcaggtatttattgagaacctactataggccacaacattatgcaaatgacctcagagaagcatataaagggcttcatgaggtgctgacagtcctctggccaatgaagcaagcaaagctgggcaaaaggtgctgaaacaagcatgaagaatcctacagattattttgtttgaggtaaaggtagcaaagcacaaaaatgtaatatgagactattaatttgtactttggaagtaatttgcatatcaattaaccacatatttactggagactgaatattgttaccaaattagtctttatgaccatgacataaatgttaataagcaactttgcacacatatgtacaaaataccgtaaatgtttctgctaaaaagtaacttaagaaagccctaattctagagttttttgaggagctttaataaagccaaaatgattttgactgtatcatttttctttaaggtaactattgcctaatttgggtcaaaatataaagctcaagaacattcttttggccaggcgcggtggctcacacctgtaatcccagcactttgggaggccgaggcgggcagatcacaaggtcaggagatcgagaccatcctggctaacacagtgaaactccatctctactaaaaatgcaaaaaaattagccaggcatggcggcgtgtgcctgtagtcccagctgctggggaggctgagacaggagaatggcgtgaacctgggaggcagagcttgcagtgagctgagatcacgccactgcactccagcctgggcgacagagcgagactgacccccccaaaaaaaa

SEQ ID NO: 389893 - DNA, 1000 bp, Homo Sapiens
cacctccaatcccccaagctgtcacgacgcatgctggctgggtcccgtcttgacgggggaagggttttacacacaccctgctaggctgccccacatcacaaccaagctcggagggcaaactcctccaagcctggcggacaagctgtcccaggcgctctggcgcttcctgaacaccaaggtcccctccccgctcaagggagctagcgctctgttccgcagagaaccccggaactgcaggtcgaggggatgcggggggagcgggggcgcaggagggagccgagtgctggaggcaaacggggcgcaggagcgggtgcgggaggcaaacggggcgcaggagcgggtgcgggaggcaaacggggcgcaggagtgggtgcgggagcgagtgggggctgagggaggggacggggccccggggggagccaggcgcggaagggggcgcgggggaacagggaccaggaaccagcgggcgcaggaaggggtgcgtccgcaggaacccgcgggcgcacgggaggcactagctacgcgatcagctcgggactctcaggagccgctcaattgccaacgggaggggggtgcggggagttggaggtgggggtgcagaccagacgggggcgtgcctttgcccggattggctgcaggagcctgacgcgaggccccgggggttggcttggggagtgggagcggggtggggtgggtgctgggtgccggagctgcgggcccggcgcgctcagaaacatgctgaagtcccggcggctcttccagcagctggcagcggctccagcagcagcggcggcggcggcggcggcggcagcggcagcgacagcgctcggctcctgcgggaaaggcgcccggcgcccatgcctccggccccgcgccgcggctgccctgacccggccgcgacctccctctgcgcaccacgccgcccgggcttctggggtgttccccaaccacggcccagccctgccacaccccccgcccccggcctccgcagctcggcatg

SEQ ID NO: 389894 - DNA, 1000 bp, Homo Sapiens
ggagggccacttccgctactacctgctcctcggctggggggcccccgcgcttttcgtcattccctgggtgatcgtcaggtacctgtacgagaacacgcagtgctgggagcgcaacgaagtcaaggccatttggtggattatacggacccccatcctcatgaccatcttgattaatttcctcatttttatccgcattcttggcattctcctgtccaagctgaggacacggcaaatgcgctgccgggattaccgcgtgaggctggctcgctccacgctgacgctggtgcccctgctgggtgtccacgaggtggtgtttgctcccgtgacagaggaacaggcccggggcgccctgcgtttcgccaagctcggctttgagatcttcctcagctccttccagggcttcctggtcagcgtcctctactgcttcatcaacaaggaggtgcagtcggagatccgccgtggctggcaccactgccgcctgcgccgcagcctgggcgaggagcaacgccagctcccggagcgcgccttccgggccctgccctccggctccggcccgggcgaggtccccaccagccgcggcttgtcctcggggaccctcccagggcctgggaatgaggccagccgggagttggaaagttactgctaggggcgggatccccgtgtctgttcagttagcatggatgttattgagtgccaactgcgtgccaggcccagtacggaggacgctggggaaatggtgaaggaaacagaaaaaaggtccctgcccttctggagatgacaactgagtggggaaaacagaccgtgaacaaaacatcaagttccacacacgctatggaatggttatgaagggaagcgagaagggggcctagggtggtctgggaggcgtctccaaggaggtgacacttaagccatccccgaaagaggtgaaagagatcactttggggagagctggagaacaggattctaggcggaagcgatagcataggcaaaggcccttggg

SEQ ID NO: 389895 - DNA, 263 bp, Homo Sapiens
aggcctcagaattatttgcccaagtgtattctttaaatatttttttctgcctctctgtttttttatactaggaattgagctggatgaagatgggtctctggatggaaacagtgatttaacaattagagggcgtctgctatccctggtagaaaaggtgacatatctgaagaagaagcaagcagaaaaaccagttgagagtgactccaaaaagtcctgtaagcagtatgagagtgcactggcagaatgacccaactgctgacact

SEQ ID NO: 389896 - DNA, 262 bp, Homo Sapiens
ggtacgcaatgaatggagacatgttttcagtgtacgttaacatttgcttcatcttccaagatatatggtgtttagatgtttgctctcctgagcaaagaaaatgttctattagtcctctaaatgtttttttttcccttgttattatagtgtccttgacctaaatgcatttgagcgacaaaacaaagctgaaggtcttgggatggtgacagaggaaggatcaggtattaatgacttacattaaaaggatcacctgtctcccttc

SEQ ID NO: 389897 - DNA, 299 bp, Homo Sapiens
ccacaacacccgtttagttctttagtttctggagagcttatgttttgtttgtttgttttcataggggagaagatggagaaaaagaagagaaagccaaggaagacaagggcaaacaaaagttgaggcagcttcacacacacagatacggagaaccagaagtgccagagtcagcattctggaagaaaatcatagcatatcaacagaaacttctagtaagatgttttagagtgaatattgttactgatatagtgcaataccgtaataatttaggctcagtaaatgtttgctgacctctccct

SEQ ID NO: 389898 - DNA, 267 bp, Homo Sapiens
accctctcctgcagggccagtcagagtgttagcagcaacttagcctggtaccaacaaaaacctggccaggctcccagactcctcatctatgatgcatccaccagggccactggtatccccggcaggttcagtggcagtgggtctgggacagagttcactctcaccatcagcagcctgcagtctgaagattttgtaatttattactgtcagcagtataataactggcctccgtggacgttcggccaagggaccaaggtggaaatcaaa

SEQ ID NO: 389899 - DNA, 1000 bp, Homo Sapiens; identical to SEQ ID NO: 281132

SEQ ID NO: 389900 - DNA, 1000 bp, Homo Sapiens; identical to SEQ ID NO: 281134

SEQ ID NO: 389901 - DNA, 1000 bp, Homo Sapiens; identical to SEQ ID NO: 114728

SEQ ID NO: 389902 - DNA, 1000 bp, Homo Sapiens
  misc_feature (830)..(830): n is a, c, g, or t
ttcccccaaatcccatccttctccttccaacttggctgaaacccacctggagacgcagttcacgtccaggttcttccactgtggaatcttgggcaagtcagtaacgagcctcagtttcctcacctgcaaaacgggtacagcattcctgtatgatacgtcacgccgttgttgtgaaaaccacatagacttggtcaattctcggtcctactctgccctcccgtctcagccctcgtgttgccattgcctctctcggatcctccaatcctcacgtccttcacctggtctctggccctggttcttattttctctcaattccctactgcctgtttcttactttgaacctggaggcagcctgcagccccatcccatctcctgccctctcctgatctaactccctgctgcatctcttgctctcattccttagacgtcctccccttttgaccccgttccttcatccatcctgcaccccagtcccccagccctaaatcctccctcctctcctcacatcctggtccctagcaaggtatagatagcctctgtgtcttaggataccccgggtgctgttccctcggtcaccctgttgcccagttccccgtttctcttgctctcattccttgtatcctttccccttttgagcccgtccattcatcggttctgcccccgactccccctgacctaaataccccagctcctaattcccccctcaccccgttgctcaattccccgtttctcttgctctcattccttgtatcttctccccttctgagcctgtccattcatcggtggttctgcccctactcccccagccctaaataccccagctgctgttnctccccatcacccagccaccggattctccattcacccctttctctcacccctggagccctgcgggtgggggcagggcatgagttccccagtccccaaggaaaggcagccccctcagtctccctcctcctcattcccttccatctccctcccctctgccttttaaacccat

SEQ ID NO: 389903 - DNA, 1000 bp, Homo Sapiens
ggaggacctcgggattggccccaacctctggcttccttttcttagggtctggctcccagtttgtccccactgtttgcaatggccgtgaggtggtggactcgacaacgtcatcgctttgaagaccccatactcccgccctgacacagctgctcctgggaacctagtgcagacccacgtccagggccaggaggaagttggctggagcactgcaataatttattacccaccctatgtctgcccccaaagtcacttacccacctccttaccccagctcttcagactcagaagtcaggagccttggccaggagcctctgcagtggccactaactgcccttgtagctgtgtttcctcctggccaggcccagggctcagagaggagcaagccagggttcactctgccctggacccgggtggctgaggacggcaggccccagtcctaaccagcaaaggtgcttccagcccagcccctccccccaactagggccttttttattttttatataagttactctgggatggggagggtggttattgtgggggctgcccctccccctgcacagtagtttgtcctgtggtttattttgtattacctgtaaataaagtggctttattttaaaaaatcactctttgcctttgacccagcaaggcccctcacgccctccacagcctcccagctgtcattctgctagcgtttaaatatcgactctgctctgtgcctgatgttaggacctgtctgccaccgagacagacccagccctgcctggtggggagatggaaaatgaatgagccatcctcccttaaaaggagccactgcagactggcccaggcatcctggggtcgggtgggggctttaaatggatagagatgaatgaacaggctcatctggcagtccaggggtttccctggggtcccggcccccaggatggtgtgggtgatggagcaggagtgacctccgggaatggtgggctttcccacagctggccagcctggcactggatcc

SEQ ID NO: 389904 - DNA, 1000 bp, Homo Sapiens
tagtaggaccagaagccagcaacatagatcagcctgggtcttatgctggggggcgcagagtgagttgtggggagcaggcagggaaggcctgggtgagaggggggagggctgaggaggggagggtattgcgctgctgagcgggggcgggggcccgaagggggaggtcagaggtcagagggccctggaggacagacaggctgcctctcgaagctgtacccagaaccctgtgactgccatgttgtcaggccaggcaaggaaaggcaggggccaggaagcccacagggacaagaggcaggctgctacttattcagcccacataacactcctgagcggtgagcacaggtgaggtcagggaagctcaacgaagatgggccagcacctggcccaggccacacacaaccaggctgaccccgctgagccggcctgttgtctctgctgtgggaaaatgcagctgtgggcagctggcagggggtgaaggtcagtgccctccctgccccctcgggtcactctacaaccccccagtcattcccccgtctcctctggccccttgggcctgctctccaccgccctggcttctgcctctcggcacacagcatcctgaagtccatgggtggggccaggtgagctgggcagttgatggcggagctgggatttgaacccaggaccctctgcgccctgacagccctcaatatattgggctttggaccacatgccttccttcccatagagctttctacaggcaggcgtccctccaggccccattccccagcctcctttgcacatccagcaccccctgcgccttttcatggggatcaaagggcccgagtgccggcctgaccctggtgcagtcactgaggtcactgtcttgctggccttctctgggtgctgggtctgctgtgcctgtctctgcccctcttccctcttgcctgtctgatgcagagtgacccatcccctttggagcacttgctgctgtggggtactgcaccaagacccttatttt

SEQ ID NO: 389905 - DNA, 1000 bp, Homo Sapiens; identical to SEQ ID NO: 281138

SEQ ID NO: 389906 - DNA, 1000 bp, Homo Sapiens
gatgaatatgtatatgctattcataaaatttgtgtttacaaaatgcctattttttacaacactggcaggcaaaaaagacactgccttattttcagtaggtgcacttaggaaatggaacttgagaggtcacagttgtggttaaaaggaaaactgagaactgttcaatattagtatgaatagggtataaatacgttttaattagaaaattagaaatcaggctctatggatttctctactagaatactagaatggatccttctagtggaatgattcttgattataagcaagaaagccaaagttaccatttatctgtctactaactgagaagcccttaagtacctagctctgaaaagacaaggagaatttgaagataaaaggcattttcttttggcagcccaggcgtccagggagacagttaaaaaggagaaacttctcaggagagaaaagagcaatgctgggctcatggctgttagcttcaacataaatgtgtcccagatcttatctgtcccccgcagtcgaggaggagagatagagaaatcccctaggccactatctgccagcaccccttgttgggaagagcctgttcacacctctggctttgctcacccggatggagggagggcatctcccttcccagagcagtccccagctgtgtccattctgcagtgtttatagaagctgccctttccttgccagcttagccctggctcagtcatcccccacacatcccagaagagcaaaatctgtcctcacatcccctctccgagggagccactcaccagcgacactgggaggagacgcaggggatgcataaggacttgtaccagcacagggctggtatgttcagcccattcctatgttggggtttaacttcggagccccagcgaatgcctgccggctgaggggcactcttgttcctttcagccacatcacaatttccccactctagcctagaaccaaatcgactcttctggctgtgagcgttcaaaagcagtctctg

SEQ ID NO: 389907 - DNA, 1000 bp, Homo Sapiens
catcctgaagccctccctgttacaagcccagcccctccaaaggcctctggatgaaggggaggatgaagggggagagaaggaggaggagggggagagggaaggaagggaagtgagggaaggaaggggaagaggggagggaggtaaagagagggagggaaggaaagggaggaaaagaaaagagcagagaggggagagggagggagggtgagtggaaaaggaggggtgaggaggaggagaggggatggtcccctcttggagggtgatgggggttgacaggtgggccccagcttgggttgcagcaatgactgaattcagggcccctactcagctactggcttcctgctgagggcactcggggagccccactgtcccacccggcgctccagggcagtggctactggtcttccgcagcagggtcttgcaggctgggctgagaccccccccccatgctccaccaccctcgtgtaggacaacccaggaacatgttagtcactgcacactcactcagccactgctatacctccgctctgtgctgggccacagaaagatctcaggccccacgaggctaaaaggaggaacagtggcccctgggagtcccagaggaggggccccgggctccgctgcggggggagggagggacttcctggggagaggccattgctcctgggcgttgaggaatgtgtaggagttctctggctggagtgacccaactttctactcttggccccagtttctccatttctcccctctccaggaagatcctgagagaaaacctgaggctcaaggccttccttgagggagggggaaacttcgtggttggaaggcaagtgtcgcccagagcccagctcctctcagggacccccagatgggagctgggagcctcttgttagccctgccgtattcattcaggacttttctggctagacccttccccacagcccaaccatgatcaagaccatcttacagttggggaaactgaggctaagatggtccaacacca

SEQ ID NO: 389908 - DNA, 1000 bp, Homo Sapiens
aaacagttaaagaataagtaaaggataaattttaaataacatttagagaagggtgagatcattttgtgccggagtagtcagaggaggcttcatggaggaggtggatttctaactgtccttcaacaaatgaagatcaacaaaggagaggaaagttttcccaagagagtgggtagaacagtgtgtggaaaagcctagaggtgggattgcctgaagtgaatttgaggtactttagagagggatgtcaggtatgggtaagaaacacaaggacagtagagatcagaaagaatagaatctattccagaaggtctcaacagccaggcagagggagtcagacctgagggcaggaggaaaatgaggccaggtgtggtggctcacgcctgtaatccttgcactttgggagccctaggcgggaagatcccttgagctcaggagttcaagatcagcctgggcaacataggtagatcctgtctctacaaaagaaaaaaaaaaatttaccgggcatggtggcatgtgcctgtagtcccagctactcaggaggctggggtgggaggaacccttgggcccaggagatagaagctgcagtgagctgttatcatgccactgcactccagccagcctcggtgacagagcaagatcctgtcttttaaaaagacaaaacaaaacaaaaaaggatcatgagagacctctgccccagccacaggtatgggtttccttttgatgtggagacactaagatcccacagcgtgtgggggctccagagaacttctcttttacccagagtcctgaggaaactggccagaaaagtacctgtgaagaagctctcttcttctgtcttgatgaagctaaggcctgagtaatctcacccaaccttaggaagcacagaaacctcctggtgagctcattagtcagggccactggcctgaggatcaggttgtgttatctctgcccatcccatgactagcctagtagctgctgagaccactgttaccatgatttgatc

SEQ ID NO: 389909 - DNA, 830 bp, Homo Sapiens
tgacattgtgcccgttggcggattctcgatttcccctcttccccgtcctcgtcctcctcctcccccatgaagtgattctgagtatcggggggtctctggattattgttctgacgaacccctgcttgtggttggggggtatttaatctgaggccttagggtccttcggtgtctttgagtgtgttgtgtgtacatattttactcttaaagtttataaatatacgtatattgagagtgtccacgtctcctcgctgaaccttaggaatcccttggcaccatgtcctgtgtgcattataaattttcctctaaactcaactatgataccgtcacctttgatgggctccacatctccctctgcgacttaaagaagcagattatggggagagagaagctgaaagctgccgactgcgacctgcagatcaccaatgcgcagacgaaagaaggtaagggccgcttggtcttaagatatttggtggctggagagagatactagctagaaggtgcctggcaggaagctaaccgccattatgtctctagtggggactgttcgttctagtactttggatacaactttcattgatagccaaggtttgcagcagttggccttggagtttcactggtttattttatttctgcatacttgggtcatctgtaacaggctaacccaaaacgtggaagcctgattattcttctcgctgttttttaaaatgagggagggaggagagggggatagctatctagactctttgagtgcttgtcttagggcgttttctaacttattttccatcaggagggcaggagagcctgtgcaaagcttgtttgttcaatcagc

SEQ ID NO: 389910 - DNA, 1000 bp, Homo Sapiens; identical to SEQ ID NO: 281140

SEQ ID NO: 389911 - DNA, 1000 bp, Homo Sapiens
ggggggtgggggggaaggcataatgatcaaacacaatacatgatcctgaaatgattctggaccaggaaaaacaaaggttggtttctattgttgttattgtttttaccataacacaggttattgagatgattgtcaaaagtttaaatacagatggtagcttatagtcttgtgtcaatgttaagttcttattttgatcattgcactctagttatggaacagaaagtccttagtgaaccatttagaataggaataaatgctagatgggttccaaagtaataattatataattataattatataatcacatatgtgtacatatatgtctatagagaaagaatagagaatggtaaagaaaatacagcaaaatgttaacatgcagagaatctgggtgacaagtatatgggaattctctgcagtactcttgaaacttttctgtagagattacttcaaaataaagaacagagcagaagtggctgctgttcctaaattccctaagtaaacttacactgctttttcaaactgggagatgaatccactaataggttttgaaatgagtttggtggatttctaataagaataggatagcctagcctagtctagcataacacagcatggcacagaggacgaacattgtagattactaagggtgagtactaacttgtgaaagttttgtttaagttctagtaagagaaacaagtgagtgtagtgggttgcgtggtcaaaaaagtggggaagccaccgcaacgaggggtgagtctgagccaaagagtggctcagagctccccgcccacctcgtgccgggccgtccctcccgcttgtcccaccctcaccggcgccgcgtcagccccgaggccgcctgcaggtgtgcgctcagaactagcacgtgtgccggacactatttaagggcccgcctctcctggctcacagctgcttgctgctccagccttgccctcccagagctgccggacgctcgcgggtctcggaacgcatcccgccgcgg

SEQ ID NO: 389912 - DNA, 1000 bp, Homo Sapiens; identical to SEQ ID NO: 281144

SEQ ID NO: 389913 - DNA, 1000 bp, Homo Sapiens
tgcaggtagaggcttactagaagtgtgaaaacgtaggcttggattaaggcgacagcgatttctaggatagtcagtagaattagaattgtgaagatgataagtgtagagggaaggttaatggttgatattgctagggtggcgcttccaattaggtgcatgagtaggtggcctgcagtaatgttagcggttaggcgtacggccagggctattggttgaatgagtaggctgatggtttcgataataactagtatggggataaggggtgtaggtgtgccttgtggtaagaagtgggctagggcatttttaatcttagagcgaaagcctataatcactgcgcccgctcataaggggatggccatggctaggtttatagatagttgggtggttggtgtaaatgagtgaggcaggagtccgaggaggttagttgtggcaataaaaatgattaaggatactagtataagagatcaggttcgtcctttagtgttgtgtatggttatcatttgttttgaggttagtttgattagtcattgttgggtggtgattagtcggttgttgatgagatatttggaggtggggatcaatagagggggaaatagaatgatcagtactgcggcgggtaggcctaggattgtgggggcaatgaatgaagcgaacagattttcgttcattttggttctcagggtttgttataattttttatttttatgggctttggtgagggaggtaggtggtagtttgtgtttaatatttttagttgggtgatgaggaatagtgtaaggagtaatggggtaattatggtggccatcccgcgtacctcggccgcgaccacgctaagggcgactcgcccttcgagcgccgcccggcaggtacagattactcccatcatctggcatagtgagacagtgccttcagccagatcatgagagtcttgatatacacacttccatgaatttttattccttaaaagggattacctgtcataaaatcaaccaagatacct

SEQ ID NO: 389914 - DNA, 1000 bp, Homo Sapiens; identical to SEQ ID NO: 201592

SEQ ID NO: 389915 - DNA, 759 bp, Homo Sapiens
ccaagactgtgtcattgcactccagcctgggcaacaaagcaagactccatctcaaaaaaaaaaattcttattaaatattttttgtagttaatattacgttagttggtgtcatgaaaacagtacttaacacttgttcaaaattgagagtcttggttgttttaaaaaatctgttaatccaagaataaagtctaagctaatttttatatgttcattacttcattttttaaataaaatcattgaaaaactaatttcctcaaataatttaataggttcttccagcacccaaattgaagatgactaataatcatatttatagcaacaaaggctatggagtaagcattcttcaaccaatggaacagttttttatcgtagcagaagaagctctcaacaaaagggcttcttcaggagataaaaaagatgataaaatgctcttcaaagtaatgcaaaatctgaatctggaaatgaataataataagatagaagcaaacgtcaagggggatatcagaatagtcacaagttaaagcgtctgaattgatgttaaagttttatatttcacaaatttgtttaatacatgattctcataccccactgaaatggtagtttcaattcaaagcttaattaaaaaatatttaaatatcatgctttcactgaatgattcattttacatatttttaaaataacagctttattaagatataattcacatgccataaaattcacacattacaaagtgtacaattcaatgatattagtatattt

SEQ ID NO: 389916 - DNA, 1000 bp, Homo Sapiens; identical to SEQ ID NO: 195501

SEQ ID NO: 389917 - DNA, 1000 bp, Homo Sapiens; identical to SEQ ID NO: 114729

SEQ ID NO: 389918 - DNA, 1000 bp, Homo Sapiens
caagcctcatggggactggggattctggccagtgtaatttctgtcaaccacggacgtttgccttcatgtgtagaatttactgttgttatgcaaattatattttcaattataaatgaaacaagtttgcagatattttagaaatcagagaagggaaacatcacccacagtccctctgctggaacagccacagttggccttgtcctacttacgtccttcagtggatgcttctgggtgctggggttctccattcaggacactgcactctcggaggtgggaggagactgggttgcgtctgtgccgacctgggatgcagtttcaggtcagaatcagaagatgtgcaagttacgcatgacacagctttttaaagtgcttttcccctgcactaatcaagagggaggtcagccctcaggtgtgctggacccgggagggactgtgagctgtaagaagtaacgagccccttgaacttcacaagctggccagggagccatatcccgaatgccactgccacttcctcgtggtgcaaggcttgttgggacctgccaccttgctgagggaggtgctgaagtaggtggtttccctgttccaatgcggtatgcggtcttgcaggccgaggcattccccaggggatgacggagcccccgctgggctacaagccagggcaaacactgaacttgtgtccttagccggcatcccaggaaagaaggccggggtcaagttcacacctcatgagatcacagtgaccagccctgcccaggctgccctagtacgtgcctgaagcatcgcggaggtcacatctagccacggtgaccgtggtgagatgtaaggattaaccagactacgactggggaggtgaggaaggtgacaaggacccagttccagcttctaacggggtgtgggatctttgagcaaggaagaagatgctagggagaatgagtctggctttgttcttgttgggaggtgttcaagccatggctggaccagagcatgagccatcctcagt

SEQ ID NO: 389919 - DNA, 1000 bp, Homo Sapiens
agttgctaggtgatcaagaaattaaaaatacatcgttgtgcctgaggatgtttgtgtaattgtattaatattagagtgaaagaagggtacatagtattctcaggggatgaccccagacctatagacctcactctctgcgctctccttcctcctctctgcttgtccaaatattgacccgaactcccacctccttcacgaccttctctgctacctcatgctgcctgtatcagtctctctttcctaaaagtctgttcaggtgtgtggccctgtcccatgtatcagtctccggccaggttataaggtagttaagtgactgcatctcttctccttttattccctctacccaatatttttaagtaaatgtgctgatcttggtcctatagtactctactgtcaccctttagtgaagaaaagaagatcaaaatcaagcattctctcagctttgcaattgagttgcaattcatgccaggttaaacagaacagaatactgacttcatttcctttcctataagtctggaggtagagcaggtagaatgagctgctaaattggaggcacatatttacagagttctaagcaacttgatattttcgagagtggtaatattccttggcaatgaactgccttgatagaattggaaggtatgaagaaggctggatgagtcttggggttgaacaacttccacaacaaaggctagacagtttcccaaagttgtgggtgtttaaatcagagattacaaggccactgcttagtccttttctacttcatataatgggcatggtgccatgctattctgagggatactacatgaatgcccaatgagcctatgaggtggccttctcccatgaaactccccacagggtcatctagttcaggcctggcttcagtcattctttatgaatgaagatgtctttgaaggcagcaactgtgtcaaaacctttgttttcctgttctcctgtaccagtatcagtgttgagcctagtgaaaagataaaagtctaga

SEQ ID NO: 389920 - DNA, 1000 bp, Homo Sapiens; identical to SEQ ID NO: 281150
  misc_feature (483)..(483): n is a, c, g, or t

SEQ ID NO: 389921 - DNA, 1000 bp, Homo Sapiens
gccaggcctcaaaagatcgggggagctttgtagcaactgtttagtggtgggacttgtatactaggctttgagcaagagaacttttatttcagataaaatcctagaaggattcctcatataacagggatccctgtagcaccgtgaagattgaggcaggaaagggactgggaatgctgcaaatggagacatacacctcagagactgagttggcacagaatccatgggacttgatgatgagggagagggaggtgacaagcctgatgcccagcttccccatgaaggggagaagtagggtgtggacgtgcaaatggagtattagctgctgctgcagagctactggcccttccaggcccagcttcatgtctccagcaccagcccttcattagttctcaaaagggcgtgagttggctgcaggctctgctgggagcaggatgatctagggtggcccccacgtgtgccagcttgtctttgctccatcaatctctcatcctccagcaggctggcctgggtgcgtcctcatggcagccccagggctttgagagagtggaggtcacagggccactcacagcctaggtcctggactttaccacgttctgttagccaaagcaggtcccaagtccagcacagagaagtgcaggccacctggggtgagctgcagagccacaccacaaaggacctgggtgcggggaggggactgggctgctctgccaggccatctacacacacggcagttccctttggccacacggcagtagaggcagctgtggacatacaaagtgtagatagctgggctcaggatcgagtctcgcccaccatcagcaggcgagggctcatcagagccctggaagggacaaaatagcagggttgtgttcaccatggaacagctggctgaggaggagggtggacccctgggaaactgaggaacagctgccagagaaggcgagggagaacaagtgagctcgagagtgaaggcggggaggacgggcgcttggggtgcagg

SEQ ID NO: 389922 - DNA, 1000 bp, Homo Sapiens; identical to SEQ ID NO: 201663

SEQ ID NO: 389923 - DNA, 1000 bp, Homo Sapiens; identical to SEQ ID NO: 114730

SEQ ID NO: 389924 - DNA, 567 bp, Homo Sapiens
gagcacatggcccaggggtggagccgacctccagacaccagaagaacaacctaagttcctcccacacagtcagacttgaaactagaggacagacagagaaccaggaatgtctactttgcccccatgaggaatagaaacaacttcctgactatcccttggtgggacaggaggactttcaagaggatgaaactctgaaaaagagtttaccctgtgattaattaaatgaaatcctcaatggccagagtaattatacaaagattaagtgtcaaatgggagagagtttacctggaagcagtaagattcgttgcttttattggttcatttgttttgttttctgctttcggtagaaatggatcttcacgagtcagttgaatttgattaaacagaatttagcatttcagccatttgggtgacagtgggtgcattctaaagtcagcacaccacccaaagtgatatatgaggtggaatgggaggggtggcaggtattcagcttaaaggaccgggatatcatgatcagtggctactgttttacttttaaaaaccttccttttctgggtctagactcga

SEQ ID NO: 389925 - DNA, 1000 bp, Homo Sapiens; identical to SEQ ID NO: 281154

SEQ ID NO: 389926 - DNA, 1000 bp, Homo Sapiens
aattcattaatccatgtaaatattcaaaagcttgttctatccacattatttcaagggatcactttatttttcattatactttcacagcacttttctagtaaattctgtaacacagaaattccattttggaatcatttcatgttaccaataattctagacttttataacatttaacatgttgatggaaatagattacatctgctagaaccttttgccttaactattcaccaatatatgctaatattcataaatatggattgactgtttacaaacattagaatcttgtcttggttccattttgatggctaatatttgttatcttaattaagactatttctgaggtcatgattacttgaaaatattgactaaaactgggtccttagaaattccaggtggagctgatttacctatgactgaggggaaaaaaaaatcaaattttactgataatagtaatgctccaaatgaattaatgacacatctgttcaataaataaagagcttaaatatacaaaacataagaaatctgggcaacaaaacttgtggtctttacttttgaatagctacccaagaaaaggttttaaaggtaaaagttatgagtaatgtcatcacaataagctcttgtttaaaattcttttcttttatgtataattaggtttatgtttcatgtctttttaaaaccttataaaagatttaattatcacatctattcttcaatgtggaaatattaaatattgttggttgtaaaataatatttatgtacttacttgtgtctgaaaagttgtaaaatgcttacctcagctatacaatatctgtgactctgaagactttaatgagtactatttcattaacaagaagtcagaggcaaatagaggaacaccattatcttacttccctctagaatactgttgaaacatttgaaatacaaaagtttcagtttcattttgtggcattcaacttcctctcctctttttccgttattagtgttgctgctctggttagcc

SEQ ID NO: 389927 - DNA, 1000 bp, Homo Sapiens
aaaaatattaactgaatgctacctgaaaaataattactcggcattcctaatatattctatattaatcccaaagtgctaagaaatgcagatgtgaaccaccacacccagccccaccctttttttttttttttttttttgtgacagagtctcgctctgttgcccaggctggagtgcaatggcactatcttggctcactgcgacctccgcctcccgggttcaagcgattctcctgcctcagcctcccgagtagctgggactacagcatgcgccaccatgcccagctaatattttgtatttttagtagagacagggtttcactgtgttggccaagctggtcttgaactcctgacctcgtgatccgcccgcctcggcctcccaaagtgctgggattacatgtgtgagccaccgtacctggctgccccaccctatttttatatcagattcctaatttccagttaaactactcttttctaattcatttgcattgccagaagaactctcataggcttccattaggtgtttttaatatttaggatttttcatgatgttaaaaactttttctgatcccttccttttgaaaagcccattaatgattgtaataatagctaatgtttattcatcacttattatgggtcatttattcttaacaacaacatggaatcaatattattaatcctctgaattttatagaaccctgaaatatatctcacatctctgcctatttcccttgtgttcatggctaccatcctagtccaagctactattctttttcactggacttcttcattaactatctaaattgtaccccttgtttcccttcctacatctcccccaacattctatacacagaagataaagtgacattttaaaaatgtagactgtggccagatgcagtggctcacacctgaaaacccagcactttgaaaggctaaggtgggaggatcacttaagcccagaagtttgagactaacctgcacaacatagtgagacccatctctag

SEQ ID NO: 389928 - DNA, 1000 bp, Homo Sapiens; identical to SEQ ID NO: 201667

SEQ ID NO: 389929 - DNA, 1000 bp, Homo Sapiens
  misc_feature (190)..(190): n is a, c, g, or t
cgacgaagactcggtggccggcgagtcggaccgcatagacgatggcactgttaatggccgcggctgctccccgggcgagtcggcctcggggggcctgtccaaaaagctgctgctgggcagccccagctcgctgagccccttctctaagcgcatcaagctcgagaaggagttcgacctgcccccggccgcnatgcccaacacggataacgtgtactcgcagtggctcgccggctacgcggcctccaggcagctcaaagatcccttccttagcttcggagactccagacaatcgccttttgcctcctcgtcggagcactcctcggagaacgggagtttgcgcttctccacaccgcccggggagctggacggagggatctcggggcgcagcggcacgggaagtggagggagcacgccccatattagtggtccgggcccgggcaggcccagctcaaaagagggcagacgcagcgacacttgttcttcacacacccccattcggcgtagtacccagagagctcaagatgtgtggcagttttcggatggaagctcgagagcccttaagttctgagaaaatttgaagcccccaggggtggggtggacgcgtgccgcccagtcgacgtcagcgtggtctgtcatcctgctagtttgtgatgttttctgacagtagcctccaagaagccgttgtgcgaagacagagtcctgcagagtccttccagcctaggcctgcagcgccattttatttatattttttaataaaaagtaaaaacaaaaaaacagacccacattggaacagtgaatcagtcccatagagagggcccgtggaccatcgctgtcatgagtgatgccctggcccttctgaaaccagccaacctaattacctgtattgtggaaatgcgcatgagtccccaaccccttgtttctatacattctatgttgtcttttaaaaagtgtgcttaacattgacacaataaatgttggagctttagaaaaaaaaaaaaaa

SEQ ID NO: 389930 - DNA, 1000 bp, Homo Sapiens
cgctggggaagaaagggaggcgcagaccacgggggctgcacacaggagccacgcaacactggggtcactggggagggcccctggcagtggccatgtgaccgcttctgagctgagattactgatacagcaagagcgaggctgcggctgtttccaccagctctgaagttattcagatttcaagtgacaccagcggtgcgcggtggctcacacctgtgagcactttgggaggctgaggcgggaagatcacttgagctccagcctgagcagcatagggagactgcatctctacaaaaacgactttttttaaaactagctaggcatggtatggtgtgtgcctgtaatcccagcgactcaggaggctgaggtgggaggatcacttgaacccaggaatgtgaggttgctgtgagccaagatcaggccactgcactgcagcctgagtaacagagcgagaccctgtcttaaaaaacaaaacaagtggcacacatggatgaatggcagctctgtcccaaagggttctgggaggagccgtttctatggagatggggctgggacccaggaccccaaagagggggacacgtggcagctaaacacagccccgtcttccaggcttcggccagccctcggggagtgcctggcccgtctggcagcagccatgccggtggcgttcctggagccgcagctgaacgagtacaacgcctgctccgtgtacaccaccaagtctccgcgggagcgggccagtaagctgtgtggggcgggagcagtgctgggagtccaaatctccccagcacagggccttggggagaccctaatttgggggtagtgtggctggggctggggctgtgagcggctgaggattccccaggttgggagtgccacacattcaggaacccagagtttatggttcggggggcatttcaaggccgttacatggggagaatttagagattaatttgattttgaaacagaatctattgataaagttagaaagtagccattgtgg

SEQ ID NO: 389931 - DNA, 1000 bp, Homo Sapiens; identical to SEQ ID NO: 281160

SEQ ID NO: 389932 - DNA, 1000 bp, Homo Sapiens
catcaaatggaaccgaatgaatcctcattgaatggaaatgaaaggggtcatcatctaatggaatcgcatggaatcatcatcaaatggaatcgaatggaatcatcatcaaatggcaatctaatggaatcattgaacagaattgaatggaatcgtcatcgaatgaattgaatgcaatcatcgaatggtctcgaatggaatcatcttctaatggaaaggaatggaatcatcgcatagaatcgaatggaattatcatcgaatggaatcgaatggtatcaaacggaaaaaaacggaattatcgaatggaatcgaagagaatcttcgaacggacccgaatggaatcatctaatggaatggaatggaataatccactggactcgaatgcaatcatcatcgaatggaatggaatggaatcatcgaatggactcgaatggatggaacattgaatcgaatggaatcatcaatcggatggaaacgaatggaatcatcatcgaatggaaatgaaaggagtcatcatctaatggaattgcatggaatcatcataaaatggaatcgaatggaatcaacatcaaatggaatcaaatggaatcattgaacggaattgaatggaatcgtcatcgaatgaattgactgcaatcatccaatggtcgcgaatggaatcatcttcaaatggaatggaatggaatcatcgcatagaatcgaatggaattatcatcgaatggaatcgaatggaatcaacatccaacggaaaaaaacggaattatcgaatggaatcgaagagaatcatcgaatggacccgaatggaatcatctaatggaatggaatggaataatccatggactcgaatgcaatcatcatcgaatggaatcgaatggaatcatcgaatggactcgaatggaataatcattgaacggcatcgaatggaatcatcatcggatggaaatgaatggaatcatcatcgaatggaatcgaatagaattatggaatgaaatccagtgtgatc

SEQ ID NO: 389933 - DNA, 1000 bp, Homo Sapiens
actactccctctgagtgcatagaaccttgttagtttactaagggatactctgatatttaaaaatatttgattacttcagagggtggctagtttatttttggcaataaatttttcccagttaacaagtttatagttatgtatcatacaaaattttttcttatatattagtgacatataattagaaagcattattagaaagcatgcctttctattttctagagctacaaaggtgtgttttgttttgtttgttttttgtttctgtttttgtttttttggtgacaaggtctcgccctgttgcccaggctagagtgcagtggtacgatcatggctcacttcagccttgactcgaccctcagtcgcaagcgatcctcccacctcagcgtcctaagtagctgggactacatacagatgcaagccaccatgcctggctaatttttgtatttttattatagtagagacagggtgttgcccaggctggtctcaaactcctggactcgagctgtctgcctgcctcagccttcagagccacagcacctggcccaaatatttttatagaatttaaatttttgtccattataaaaggttttccctttgttctcatgcccataaaaagttgaagaatatatggaagaggagaaagaaagaaaaaaaatcacttatagtcttatcatccaggacaagtatattgaccgacaatattttgatatatttcttttgaataaattatatgtatttcaaggcttttatttgtttttgtttctgtggattaaaatacttagcttttctgtattctcatgctaatgtaagaaagcaaaccagaaccacattgatttttagggaagctaaaatatttgttaatccaaaaagtaccacagagtaggccatgttctttttgatttttttttcttttttaaatagggtctctctctgtcacctaggctggagtgcagtggtgcgatctcagctcactgcagcctcaacctcccaggcttaagtgatc

SEQ ID NO: 389934 - DNA, 1000 bp, Homo Sapiens; identical to SEQ ID NO: 281161

SEQ ID NO: 389935 - DNA, 864 bp, Homo Sapiens
gtcattggttattatattcttattggggtctgaccttttcattagacctgtaaccttcatccagggcagagataaaagattatttgtgtcagcagtgtgtagaacagtcctatgcacatgatcaatgctcggtaaatatgtgtagacctgagttgaatttaattgaggctctgcttcccctagaccgtaatatttatatttcagtcagatttgctgcgtggctacacactgattttcaatgtgtataactctgggaatgatgaagctacagtttatgaagcaccatctactggcagacatagtttccaacatttatgaatgccaggcgccatggcaaataagatgaatgagacatggaacaagtccacagggcacttgccatgggtgtgaggaaatcataatgataacacctgacaaataatttttgaggttgatctagatgtttttcacagttatgtcccaccatttgtgtaaagtgcacctgtttttcttcaacagaaatattgtcccaggtaaatagtcttccacatagttgagcatccaaacaagagcctgaatccatcatatctttcttttagtggctccagcaggcagcctgacagcctctcatctattgagaatgctgtgaagtacaaccccgtgtatgaaagtcacagggctggatgtgagaagtatgagggaccctatcctcagcatcccttctacagctctgctagcggagacgtgattggtgggctgagcagagaagaaatcagacagatgtatgagagcagtgagctttccagagaggtgggaaactttgcatttatgttgctgtcgcagctactgctggtgtgtgtgtgggggagcagggggtgttgggtg

SEQ ID NO: 389936 - DNA, 1000 bp, Homo Sapiens; identical to SEQ ID NO: 195007

SEQ ID NO: 389937 - DNA, 1000 bp, Homo Sapiens
ctctgccagcctcttgggggcagttccggcctctccgacttccccactggccacactccattcagactcctttcctgccttgtgacctcagatggtcaccatcattcctgtgctcagaggccaacccatcacaggggtgagataggttggggcctgccctaacccgccagcctcctcctctcgggctggatctgggggctagcagtgagtacccgcatggtatcagcctgcctctcccgcccacgccctgctgtctccaggcctatagacgtttctctccaaggccctatcccccaatgttgtcagcagatgcctggacagcacagccacccatctcccattcacatggcccacctcctgcttcccagaggactggccctacgtgctctctctcgtcctacctatcaatgcccagcatggcagaacctgcagtggccaagggctgcagatggaaacctctcagtgtcttgacatcaccctacccaggcggtgggtctccaccacagccactttgagtctgtggtccctggagggtggcttctcctgactggcaggatgaccttagccaagatattcctctgttccctctgctgagataaagaattcccttaacatgatataatccacccatgcaaatagctactggcccagctaccatttaccatttgcctacagaatttcattcagtctacactttggcattctctctggcgatggagtgtggctgggctgaccgcaaaaggtgccttacacactgcccccaccctcagccgttgccccatcagaggctgcctcctccttctgattaccccccatgttgcatatcagggtgctcaaggattggagaggagacaaaaccaggagcagcacagtggggacatctcccgtctcaacagccccaggcctatgggggctctggaaggatgggccagcttgcaggggttggggagggagacatccagcttgggctttcccctttggaataaaccattggtctgtc

SEQ ID NO: 389938 - DNA, 1000 bp, Homo Sapiens
gtggtagcagctgaaattgatgaagaaccagtcagtaaagcaaaacagaggcggagtgaaaagaaggcacggaaggctaggttcaaactgggtcttcaacaggttacaggagttactagagtcaccatccggaaatctaagaatatcctctttgtcatcacaaaaccagatgtctacaagagcccggcttcggatacctacatggtttttggggaagccaagattgaagatttatctcaggaagcacaactagcagctgctgagaaattcaaagttcaaggtgaagctgtctcaaacattcaagaaaacacacagactccaactgtacaagagggcagtgaagacgaagaggtcgatgaaacaggtgtagaaattaaggatatagaattggtcctgtcacaagcaaatgtgtggggagcaaaggcagtccgagccctgaagaacagtaatgatattgtaaatgctattatggaattaacaatgtaaccatctgaaagcaacttttttggtgtctcagatgagtaactgcagcttggtttgaaatttgtactgtttctatcataaataaagttatggcttcttgttggatgaaaaaaaaaagacagtattttgccaaattaaacagaaaagagagttcagtggaagatggctctgatttcagggtaataataatggtaggtaacaattaaatggcatttaaaaatttgctgaatgcttgctacgagcggtggctcatgcctgaatctcagcactttgggaggccaaggcaggcagatcatctgaggtcatgagttcgagaccagcctggccaacatgatgaaaccctgtctctactaaaaatacaaaaattagctgggcatggtggtgcacacctgtaatcccagttactcaggaggctgaggcaggagaatcacttgaatccagaaggcggaggttgcagtgagctgagattgcaccacggcactccagcctgggtgacagagtgagactctgtctcaaa

SEQ ID NO: 389939 - DNA, 1000 bp, Homo Sapiens
tgaaagtgaatgatggtatgcaaattcttcaaagttggggggggtgggcaatacttggaacttgagcccccatggtctgaaaataaactttaaccaacatttttggctaaggctagacaaaagattaaaagccacttctcccatccgctaagtgaaatattatagctaaagtgactttaatgtcaatttgcaaaaatctgaaaacagatctagtaaatgactactacaaacacacaatgtattccaaatggtttaatttaacaagtcaacaccttatcattaagcacttgagatcttgatacatattcaagttacacatctaaaaggtttccactttgcaagcaaacatggtaatgcagagacctcctatttatgaaatcatgtaaaatggttcttcagacacctctatgtgccactgatgctcaagaatcaacatttttcaagggggtattcaagcaaatgacaaccatcttatacatgcagttaaacatttttgcttttccaatgatttgcaggtaaatatgtgtgtgaggctgatggattctggacgagctccaaaggagaaaaatcactcccagtctgtgagcctggtattggatacatttatacaagagactggtaattgatggaaaggaggactgggtaggagacagtgaggagagttttagctgtggtaggcagaaatgtaacttcagcacttggctcttaggctgttattatttccaaatagtatgttctcattacccccttcccatatacagaggttgttaggtgctgactgcatcagtcatttgattctctttgaccttataactaggcaagcataaaaaattaaatgatttttaggccaggtgtggctcacgcctgtaatcccagcactttgggaggccgaggcaggtgggtcacctgaggccagcctgaccagcatggagaaaccccgtctctaataaaaatacaaaattagccgggtgtggtggtacatgcctgtaatcccagctac

SEQ ID NO: 389940 - DNA, 705 bp, Homo Sapiens
taaagacatttactaacaattttccacaaactaaaaatttataaaacaataaataaaatagactttaaaaaaaagcgtgtcacacagctgcttgttttttgtttgtttctttgtttgttttttagtagtgaaatggtgaaaaatcagacaatggtcacagagttcctcctactgggatttctcctgggcccaaggattcagatgctcctctttgggctcttctccctgttctatgtcttcaccctgctggggaatgggaccatcctggggctcatctcactggactccagactccacacccccatgtacttcttcctctcacacctggccgtcgtcaacatcgcctatgcctgcaacacagtgccccagatgctggtgaacctcctgcatccagccaagcccatctcctttgctggctgcatgacatagacctttctctttttgagttttgcacatactgaatgcctcctgttggtgctgatgtcctacgatcggtacgtggccatctgccaccctctccgatatttcatcatcatgacctggaaagtctgcatcactcttgccatcacttcctggacatgtggctccctcctggctatggtccatgtgagcctcatcctaagactgcccttttgtgggcctcgtgaaatcaaccacttcttctgtgaaaacctgtctgtccctcagctggcctgtgctgatacc

SEQ ID NO: 389941 - DNA, 1000 bp, Homo Sapiens
aatttttgtattttcagtagagacaagtttcaccatgttggccaggctggtctcaaactcctgacctcaggtgatcctcctgccttggcttcccaaagtgatgggattacaggtgtgagccaccacacctgtccaatgatttgttttctttccctcccccaggaaagctccgtggcttcctccgtgttggagacctggtgattgtggtgacaggctggcgacctggctccggctacaccaacatcatgcgggtgctaagcatatcctgagacgcccctccctcctctggcccagcctacccttgtaccccatcccttcctccccagtctacgttctccagcccacacccctccaaagccccacctttaagtcctctcttctctattcctgaccctccctacctgaggcctatctgagactataactgtcatctagccccttcgaggttgccccttccccatctccatttcacacaggtcctgaaagtctgtgtccaattatgcactggccacccaacagcaccaattgtacattccctgcatccaatctgctcagcaggccctaagatgccttgagtctttaatcccaggtttggctggttaattccataaccccaggcatcccatcccttggggtgggggagaggggagacagggcaatcttgtccacagtctcccattctcatatgtagccctcatgataatctgggcatctcgtgccagggcaggctaccccttcatggtgactaacagttacatgaaagtccacgcttttgggaaaactgggtgggatggatgctggggagaagtgagggctgggcagctgattttgtcactgtcttcacaactcgtgctgggcttgtagaccactgtcctggctgctctcatgcctgcctgataccctgcttggtcaaatcccggctgcttccttctgcacccagaaattccttcccactcatgttgttcccacacacaaaccaagagccaaaaatgagtgtgtc

SEQ ID NO: 389942 - DNA, 1000 bp, Homo Sapiens
tgtctcctgtaaagccctataatacttaagctaaaccctgttctttaagttaataatgccaaccaaacaatccattcatttcatttctaaaactccatcttcatcattcatttcaaaaccaggtattgactgaccccaattccaagtgttttaatttatcctctctaaataaccttttgctctgctcttatcgtgcaatctctcctgcttacagcccacacctaaagcttacatgttatggatcactctcatctgatccattaagttggaaaaactaatgctgacatgtattatttccctgtcagcgtcaccaagctggaaaatagataattcaaaagagacataatcaaaatacagatgtctctgaaataacaagaagaaaggcccagtcctggctccgcctgcaggaagctttcactgtccactctgtccttcttctttgtctgactttccagagaaattcttgtttgtactgatctattcatttcattcaacacatatttctgggctgccttatgctgtctgttaagcattttatacatgtggctagtttttcacccagattataaaactttgagcattataaaaacaaaactgacagtgcttgtacattacaggtgatcaatacactcttgatgaattgaagaaaataattatttgattctaaaatatttaaaagaaacagtaggccttgacgtccttaagaaatattaaattaggatagaccagcaaaaaggatatcactaaaaatatatatataagataccttaaaaatataagtctgaaggacctcaggtttgataaaagatagtagatgaacggtgtctacatctctctgtcttctctgaaaacaaggagaacatgaacagaaactccaattttaaccgaactaggaaacacatctctgaagcgaaattaagacttggtaaatattaagaatctctttggctttaattataacacacagaaagaatttgacataatgtgtttgttgaaagtt

SEQ ID NO: 389943 - DNA, 1000 bp, Homo Sapiens
agacccatcttaatgctgccttcaaagcctacccggaccccttccttccgcttcccaccaacacttgagtttttaacccccttggcaggtgggtggcttgcaccctggagtggcagcgtaagttattttacatggctaagagtgcgggagacttgtgaaaggaacatgggtttggagttcatcaacctgggtacaaagtccacttctcaaaaaaaaattagatgggtgtggtggtacaggcctgtagtcccagctactctggaggctgaggcaggaggatcacttgagcccaggagttgggaggctatgatggggccactgctcttcagtctggttgacaggtgagaccctgtctccaaaaaaaaaaaatggtggttgccctctttgcccccaaacaaccttagtagaggcaggggtgggaggattggacaagcacagttgcacactgaatcctcaaaaaccatgttgaccagctgtctactaggtgactccctcatcctgacatgactacaaataacttctccctggctcgttgtttgcttcagtctcctggcttgtagtgactccactttgcaaatgtcttgtttctctctcctgcagttccctaagctagcctgattgcctggtttgtggcatgattccttcccatcagctcattgaaattggcattggttgggtcttagccctcaggataaattcgtgttctgggattgaaggtctttttctgatctgcctcatttatccagcctgcacttcctcataaagcctctgctgtctctcccatgcccctctcttccctcctcagacctcactcccagaacgccttcctcctgagtgaatatggatgggttgatgggggaggctgcagctattgctgccctatgtgtgagtcctgagtcttgggtagtgctatgtgtcttccctatcttcactgacatctctgttttgtagccgagtcgtccggaaatccattgcccgtgttctcacagttattaaccag

SEQ ID NO: 389944 - DNA, 1000 bp, Homo Sapiens
cttttccaatgtttgtttacacagatagatcttattgacccatatggcactagaactgtatcagatataatatgggatcccagctttttttcctctcccacaaaaccaggtagtgaagttatattaccagttacagcaaaatactttgtgtttcacaagcaacaataaatgtagattctttatactgaagctattgacttgtagtgtgttggtgaaatgcatgcaggaaaatgctgttaccataaagaacggtaaaccacattacaatcaagccaaaagaataaaggtttcgcttttgtttttgtatttaattgttgtctttgtttctatctttgaaatgccatttaaaggtagatttctatcatgtaaaaataatctatctgaaaaacaaatgtaaagaacacacattaattactataattcatctttcaattttttcatggaatggaagttaattaagaagagtgtattggataactactttaatattggccaaaaagctagatatggcatcaggtagactagtggaaagttacaaaaattaataaaaaattgactaacattttaagttgtgcatcttttctccttcctgtccacctattgttctttttttcacttttccatttcaatttcttccttatgtattcttgatctacttttctttatatccttctatcctttccttgcgctctcagtatttttcatttaggatattctccttgtttcttttctgttcaccaaatgtcttgtttattacagcctatagatcacttagatttagatccctaaaatttgctgtcactctgtaaagtgcacatagtatctgcgtatttatttttacaattttctttacaaaaattctaagaaagcttagactgcaacttttcataatatataaacaaaattccaaaatagcacagatttgactttctcatttaattatgaacagtttgggaaatgtttctcaattctgaatgcatattagaactacctgagaagc

SEQ ID NO: 389945 - DNA, 1000 bp, Homo Sapiens
ctgcactatttaattatggtacctgctgccactcatcacagagcccttcttggtagaaatgatgtcagcattcttatttgctgatgctgctatgataccacgccttaaaaattgacagttgaaaaaaaaaagagtgaccagagggcaaaggacccattctcagtaatgggagatcttgagttgcagtccacagcattcacattctcaggataaacatgcttgtctccatatatactatctgtgcctgttatgaatgaaaaatccatccactctgctgccattcacagcctaatcttctggagtagtccaaacaatgtttggaaaaacatgggactgtatgtcattactatgactgatagcagaataataatgcatcttacttctatatagagatagacttacataggttacccttgaaattcattagtttgtcataaagttttaggaaaggtaggacccggaaagaagttctaattagttgtctaaatatttttcagtgagccaagaaattcaccatgaaaaaacaagaataacaaatagaagggaagagataggatgggaaagctaacaaattaaagttttggcaaaaaggaatatatgtaaatagctaattatttacttttgtgcttactttatttagattatttctatcagttacaatctttttctagttaagtgtacctaatttatggaatgggtgctatcctgtttatgtgtgtcttggtttttcttggctacagaaaaactgttgcagggcaacactagtttgatatttgatttactctccaatgagactcaatggctgggccgtggtagactcatagttcctcttgttctttattaaattcatcctgctaattagatttctagtgacttgtaacatgtagtttacactgaattgcaattacagatgcatacaactactatactagaaaaaattgtcatttctgatgtgccaataaatgatttttatgagagaaaaaaaaaaaaaaaaaaaaaa

SEQ ID NO: 389946 - DNA, 158 bp, Homo Sapiens
gactccgtcgaaagcaggcaagcaagcaagcaagcaagcaggaaagagaaaggaaggaaggaaggaaggaaggaagaaagaaagaaagaaagaaaaagaaagattagccaggtgtggtggctcgcacctgtaatccccttactcgggagtctgaggca

SEQ ID NO: 389947 - DNA, 1000 bp, Homo Sapiens
catgaaccacacaataaaaagtactcttactaagttaatcctagagaccagtgagaattgggtaaagctccttcctttagcccttcttagagtaagatacaccacttactgggctgggttttcaccttttgaaatcatgtatggaagggctcctctatcttgcctaagctaagggataccaatttagcagaaatctcacaagctaatttgttcagtacctgcagtctctccaacaggtatgagacaccatccagccacttgtccagggagcacactccaatccagttcctgaccagactggccctgccactttttccagccaggtgacttagtataggttaaaaagttccagaaggaaggattcactcctgcctgaaaaggacctcatactgtcatcctcaccacgccgatggctctgaaagtggatggcattccttcttggattcatcactgtcacatcaaaaaggcgaacaaagcccagcaagaaacatggatccccaagcctgggccatgccccttaaaactgcgcataagtcaagtgaagccatcggattaatcatttttatttacctcttttgtttgtttccgcctattacgccctctgcccctctctactcttttctcctcacttctttcacgacagtatgtgtgtttgcaaacaccacctggaaggcaggaacctccaaggaagtctcttttgcagtcgatttatgtgctttgttcccagagcctgcccaaacccatgaaaaacaacccaacctgccggttatgggagcaggaaatgtcaacctcgctgcagggtccagacacacaggaagccggactagatgtggaagctctaaaggtgcagaaaaaggactccagagcgttgacttttacctctgtcctggaaatcaccctgactctagttgtctagattcttatcagtttttctgccctcactggtcatgtgtaaccctggccacataccctggaggattgacctggtcctcaacacttt

SEQ ID NO: 389948 - DNA, 1000 bp, Homo Sapiens
tccaggtgaggcccacaagccctgtggccgccacctgaggtgggctggggctgctcccccacccctacttgcttctcctacttggccatttgcccctcctcagatggggcaccaataacaaggagctcaccctgcgggctccaaaccctcctgctcctccctgccccccaaggttctggttccattttttctctgttcacaaactacctctggacagtcgtgttgttttttgttcaatgttccatttttcgacatctgtcattgctgctgctaccagtgccaaatgttcatcctcattgcctcctgttctgcccatgatcccccaagatactcttcatggagaagaggggctggagcatggctggctgggtgaccaactaccccagtcccagggaaggtggggccctgcccctaggatgctgcagcagagctggcaagggggcccgaattgaccaaaaagggcatagaggccacctcctccccctgttctgttgaggaggggtagccatgatttgtcccagcctggggctctccctctggtttcctatttgcagttacttgaattaaaaaacaactatatccttttctggaaaaaaatagtgcactaataaataatagatgaataattatggaacatctagtctcttgttcacaatgaattgtgcagacaaaaactgcatcaaccctatctttgtgggatactaggttacatgcattgaaacaagaattttgaactattttctctcaagaaactactgtagagttaatttgttttctttactttttacaaaatgtactaattatgaataaacatttaaaatttatccccaaacagtttttaattaaatatttaaattgcttgctattcagcaggaaatttttaaaggaaacacatttttaaagctaaacagactgaaaatcaactcaccttagatccattagcaaattgaggtcacagggcaaactgtagttcttaaaattagagagaaagataaataca

SEQ ID NO: 389949 - DNA, 500 bp, Homo Sapiens
taagtgccacggagaaagctaaagcagagaaaggaatggagaatgttcaggatggaggtcagagtgttacatcaggtggtcaggaattaccttaggtaattcctccactccaaacccttcagtgacttccatgacatgaaataggaagtcattggagggtttgagcagaggaatgacctgttttaaaaggctcactcaggctgctgtatggtgaatagagttgcgaacagaggccataggataacagggttttgttgagaaagtggtttcattttgagggctaggtggaaagacctgaggttgtaaccagtagtggagagggaaggaaaattaactcagggggagtgaatctgtagacccacttgagataagatactcgctgggttaggtaggaggggcagataggatatctaggcttggagaggctggtaactcaaatataatggatacttaatttttttttttttttttgcaggggtgagcacagacaggatcgcagg

SEQ ID NO: 389950 - DNA, 1000 bp, Homo Sapiens
tggaaacagattatttttgtgctaatgagatatgtgtttctcaagcaacgacaaaacatctcgcctaatggaattttgttttatccctcctctctctgtccatctgtctgtccgtgtgtgtgcctccgtggctctccttcgctctgtgggacgacagaaccatctgctgcagaatcccaggggaaaggcagcatctccgaggatgagctgatcaccgccatcaaagaagcaaagggattatcgtatgaaaccgccgagaacccacggccggtgggccagctggccgacaggcccgaggtcaaggccaggtccggaccgccaaccatccccagccccctggaccacgaggccagcagcgcggagtcgggggactcagagatcgagctggtgtccgaggaccccatggccgcggaggacgcgctgccctcaggctatgtgagctttggccacgtgggcggcccgccgccctcgcccgcctcgccatccatccagtacagcatcctgagggaggagcgcgaggccgagctggacagcgagctcatcatcgagtcgtgcgacgcctcctcggcctcggaggagagccccaagcgggagcaggactcacccccgatgaagcccagcgccctggatgccatccgggaggagactggcgtccgggccgaggagcgtgcgccaagccggcggggcctggccgagccgggttccttcctcgactacccctcaactgagccccagcctggccccgagctgccccctggagacggagccctggagcctgagacgcccatgttgccacggaagcctgaagaagactcgagttccaaccaaagtcctgcggccacaaagggccctgggcctctaggtcctggcgccccgcccccactgctgtttctcaataagcaaaaaggtaaaggatcccaagcagggatgcttggttagtgtcctccctctgggtgctctgagcattcagcaggggcggttctggctcagccctggagtc

SEQ ID NO: 389951 - DNA, 885 bp, Homo Sapiens
cagagagagttgaaagtaaaaggggaatttttgaggcaagcgaagtcaatgaggtgaatggtaactggtccacaaaatttttgttctaaagcatctgaaatctcaagttccttgggagagaaggattttggaaaggggggataaactctttggtttagaggaggtatcaaaacaccttccagctggtggggtgtcacaggattgatgtccaggcgagggacattaattttctaaccaaaaagagtggaaacattttacctcttttcctgctttcaaaaacctgttactgcaaagacctcggatttgtgggtcaatggatttgggtactatattcttcttaccgtatctttttttcttgctttcttcagagtgtgaacatggctacgcctcttcattcccgtccatgccgagcccccgactgcagcattcaaagcccccacggaggttgagccgggcacagaaacacagcagcgggassagcaacaccagcactgccaacaggtagcaagctgggaacgcttagaagagggaactggagggaaggagcacatttctcctgtaatcccaagtctgaaggagcagcacttgatgggttcctttaccactaccctggggatttggcccttttaaaataatgaagtctagaaatcataacctggttttgcatggaaggaaaggaatataatctggaaagacaaccaaagaagttcttgctgggattattaagatggctatgccaagttgagagacttggcagcatgtgtccatgcatgcagccacctgctaaaagtaatcgtgggctggctttcaatattctggccaagtttggacagtccaagaagattaaaaaaaaaatcagaaataggtctggcagggtataaagca

SEQ ID NO: 389952 - DNA, 1000 bp, Homo Sapiens
ggtagaaaaagggtcaatgctatttttgtttttagaatcattaccttttaccagcttttacccatctgatatctatagtagacacactatcatagttaacatagttaagttcagcacttgtctcattttaatgtaaagatttgcttccattttcctacaggcagtctctctcttcctcacagtcccactgtgcaggtgctattgttactcttacgaatattttcagtaatgttattttcttctaagtgaaatttctagcctgcactttgatgtcatgtgttccctttgtctttcaaactccaaggttcccctgtggccctctcccttaccctgggaaggcctcttggagaccttacccctggctgtttggactttgtatactttaaataatttaactacccttaattacttaaaaaaaaaaaaaaaagctttatgattttcataacttattgctgattttaatggattgttaatttcagtcctgtagttttattttatgtttagatagggctgggcaaggaaaaagaaaataaagacaaccatatttagcagtgcagttgagttgtgtgttaatgttagactatccctttgtgagtgacactttaacagcattcactgcttctatatatagcgtaccatcttggtcatacattacgcctcaacatatacttgtgctcttcctttgcctccagaagaagtttttccttgattgtgctatgtttcagtggaagaaattctttgaagtagatgtgagtgaaaaactgcatgcctttagaagcccagtatcagaacttgctacgtttcaggtgctagggacttaatgaaaaacaggacaaaacaattcctttttgtggcccaggtaaattatttctggtttcacttataattactaatggctgagtcaagatgttgtctctgtgtttgcttactcttgatcaagtgtgagacagtttgaagactgtgctaccatacaaagtgaatgaagccagtgactaagctt

SEQ ID NO: 389953 - DNA, 1000 bp, Homo Sapiens
caggaactgctaacgaacgtacagtgcagtggtggttcaagaagttttgcaaaggagacgagagccttgaagatgaggagcgtagtggccggccatcggaagttgacaacgaccaattgagagcaatcatcgaagctgatcctcttacaactacgcgagaagttgccgaagaactcaacgtcgaccattctacggtcgttcggcatttgaagcaaattggaaaggtgaaaaagctcgataagtgggtgcctcatgagctgagcgaaaatcaaaaaaatcgtcgttttgaagtgtcgtcttctcttattctacgcaacaacaacgaaccatttctcgatcggattgtgacgtgcgacgaaaagtggattttatacgacaaccggcgacgaccagctcagtggttggaccgagaagaagctccaaagcacttcccaaagccaaacttgcaccaaaaaaaggtcatggtcactgtttggtggtctgctgccggtctgatccactacagctttctgaatcccggcgaaaccattacatctgagaagtatgctcagcaaatcgatgagatgcaccgaaaactgcaacgcctgcagccggcattggtcaacagaaagggcccaattcttctccacgacaacgcccgaccgcacgtcgcacaaccaacgcttcaaaagttgaacgaattgggctacgaagttttgcctcatccgccatattcacctgacctctcgccaaccgactaccacttcttcaagcatctcgacaactttttgcagggaaaacgcttccacaaccagcaggatgcagaaaatgctttccaagagttcgtcgaatcccgaagcacggatttttacgctacaggaataaacaaacttatttctcgttggcaaaaatgtgttgattgtaatggttcctattttgattaataaagatgtgtttgagcctagttataatgatttaaaattcacggtccaaaaccgcaattacttttgcaccaacctaa

SEQ ID NO: 389954 - DNA, 1000 bp, Homo Sapiens
gtaaaaaggagactgtattttgatttatgttcacctttttaatatactttaaaataaatgtgaatttcaaattgagttgtgtttaagtggacagtgccttctagaatgtcagaaatcttttctagtatctcatgggaggaaatatttaaacactcaggaaacaatgttaaaacatatttacttaagttcattgcatagtttatccatctatgataaaatccctttaaaaattttaaaaagacacaagacatatttgaggactcaaatttgatcatatattgttcttctaaattacacttattttccccaagtgatgtatcatatatattatatcactgtgttggtattagagcccatttgcagttaattgctatttccttacctttagtgcctgtctgcaagtgttcaaaaatctgttatgtttttggaaaaccatttaaggctataccagtttgtataaacctttgcattctaattagcaaatgttatgttcagaaacagtgcaaaattcactattgctcagtattgctgtatctatgattatgattatttcatttttaggaacaagaactctatcaaaaagaaggtttaggtgttaatgaagtgcattatgtggataatcaggactgtataggtatgtgttttttaactccacctttgaaaaatataggaagatgtagtgaatgtgtttagtgctttttctgtgctttttaattgacattacttgttatatgacttgaaactggtatttgagagaaggttacttctgtattactgcctggaagttattttttccaccaagacttcaaaggtatctttgttggaagttttctataatctcttctatttattttgaaggatgttttcctatttaaatagttagcatgtgaattggtaagggggaaacttaattgcctagtcagtaaagacatttattcacctgaggaagtccatagttaggccaggctccaggcaagttttgtcagggtttgcccttgct

SEQ ID NO: 389955 - DNA, 1000 bp, Homo Sapiens
gtatgatagcttctagtcacgtggttattaattatttcacgtggttatttaaattaagtaaaattacaagttcaattcctcagtacactagccacacttcaggtgcccagtgtccacactgactagtagtgactgcgttggacagtgcagatacagaacatttctgtcatcacagaaagttcctttggacagagccatgttaagtgatgttatcacaagatggacagaaacattcctgtttgatttatttttcagacccagtttgtggagaaaaataatgatgctttacatatgtctcttgaatccttaatatgtgaatccagagataagtttatacgggaattatttgaatcatccacaaataacaacaaagatactaaacaaaaagcaggaaaacttagcttcatcagcgtgggaaacaagtttaaggtatttgtgttatttaattttttttttactatatttaaaatgaaattattgttttatattctaaaatggataatgtagatcactgtcagaaatctcacagtgaagttcaagagcagaccctgcattgttgatatttgtatgtaaaatatcataatgtaggcctagtaattgaacatacagaaatgcttgtaattttctgaatgtgttcattcttggttcttaacatatctgattgcctctcctaatgttcttgcttctgcatactgtctggttgaccttcaaaccttctctttcccatgtgttttctgtttccttcctcattcagcggttttgttttagctggagtagtccagctcgggatggctagagaggactagttgagttgagagaggaaagcaggcacagccaggggcttcaggtaaatgatcgccttcatggactcctatttataaagtggctgccatgttaaaaagagcccatctgaagttaatgattcagtttgtaattcattttcaatgtgtttctctcacaatggcattttgggtgtgcatattacactaaaatttgatta

SEQ ID NO: 389956 - DNA, 1000 bp, Homo Sapiens
ctgaccccaagtgatccaccagcctcggcctcccaaagtgccgggattaaaggtgtgagctatagcgcctggctttgtgcgctattgaattgaagaattttatgcttagcttaacctccagcctcaatcagttttatctcctaagatttgctttaaaatgtacaaacaactttaaaaaaatcagttttaaaaaatagtttagattggagcaaccactttttctgttttgattgctgactcttcaatgagggaacatactctgttgaaaggggtattcatatatatgtttaactttccagcactgctaacacttctttgtgtttggagtactgatctgatttaaattggttacctcttcaccccatccatctcccaaaatcacacagataatacttaggtagttgacaggttctctctttttttttttttttgagacagagtctcactgtgtctcccaggctggagtgcagtggcgcaatcccagctcattgcaacctccgcctcccaggttcaagcaattctcatgactcagcctcccaagtagctgggattacaggcgcccaccactatgcccagctcatttttgtatttttggtagagacagggtttcaccatgttgatcaggcttgtctcgaactctgatctcaggtgatccacccacctaggctttccaaagtgctgggattacaggcatgagacaccgcacccagcagtttctcttttaagagctgaaagggagtagaccaagcacaaagactgctaatgagtgtaaaactttttgaatgggtatgtttgtatttgggacattttattattttgtataatggggtatgcctcaccctaaccccttttcactggcacagatattggagagttattggctaaagggaggaactcttggagttctttcataatgtttttaaggaaaacaaaatctgcattcccatgaaagcagacaggtttctaaactcagtagaaccgtttcaccttgtggtaggat

SEQ ID NO: 389957 - DNA, 1000 bp, Homo Sapiens
gaaatgcaaagtctttaaagagagagaggcacactgatagtttattcaagtagctatttgcttgctattgtttgcttgaccaaaaaagaaaataaaaaagctttaaaaatagcttttccttttggtttgttcaatcttccttgcccccttacctaaagcaaaaaatggatcagcaacataaaaatttcagtatggcggaggggggcacaggaccccaggtaggggtcctggatccagagggccaattcccgtccccccagcggcatggcttcgtgtgctgaaccctctaagccctctgcccccgcctcctgccagggtcccaccgcttgaggacttcaaggtgctggatggggtggaggatgcagagggcgaggaggaagatgacctgaaagagctgcccccgctggtgcatgggacagcccccggtggaagaggctgaacagctgaggacattggccctagagttcctcgctgccatggagcctgagcccgccccgtccctggccccggaagcagctgttgaggaagaagacgcttgtcccagggccgccgggttcaagccgcccagtcaagggccaggtggttaccgtgcattttgcagacgtcgtgagagaacagcatgtgggagctggtgttcaccttgaacaactgtgacgtcatccaggccctggatcttagtgtctagctcacggacgtgccggacacaacatgttcactgctgactcgatctactgatatagctccgatggagcacgcatgacatcgagcgcatgcagggctgtagctagaggtcgagctgtagagggttgtgtactgctgtgacctgcagatgctacaccgaatcgagacattgtcctccaacccgggaggagtagtgtacgagtctcactacgaatcgtgaacttcatgttctgtaagtctatgactgccacaaacccatcactcagggcgaagtgtacatttttgccgacggacacactactggggtccaataaatgcc

SEQ ID NO: 389958 - DNA, 1000 bp, Homo Sapiens; identical to SEQ ID NO: 281167

SEQ ID NO: 389959 - DNA, 1000 bp, Homo Sapiens; identical to SEQ ID NO: 114734

SEQ ID NO: 389960 - DNA, 1000 bp, Homo Sapiens
  misc_feature (352)..(352): n is a, c, g, or t
atacagaaattttctgtatatttcaacttaagacatttttagcatctgtatagttgtattcaatttgagaccttttctatgggaagctcagtaatttttattaaaagattgccattgctattcatgtaaaacatggaaaaaaaattgtgtagtgaagccaacagtggacttaggatgggattgaatgttcagtatagtgatctcacttaggagaatttgcaggagaaagtgatagtttatgttttttcctcgcccatattcagtttgttctacttcctccccttccttccagatgataacatcacatctctacagtaagtgcctctgccagcccaacccaggagcgcaagtngtctttgccatctggtctatagtacagtgcgcggcgttaggccacaatcaaaagcattatctttccagggttagtagaaatcgttatgttgatgggaggttgtcgatggtcaaaatgtacagccacagccttttaatttgggagcccctgttgtcattcaaatgtgtacctctacagttgtaaaaagtattagattctactatctgtgggttgtgcttgccagacaggtcttaaattgtatattttttggaaaagtttatatactctcttaggaatcattgtgaaaagatcaagaaatcaggatggccatttatttaatatccattcatttcatgttagtgggactattaacttgtcaccaagcaggactctatttcaaacaaaatttaaaactgtttgtggcctatatgtgtttaatcctggttaaagataaagcttcataatgctgtttttattcaacacattaaccagctgtaaaacacagacctttatcaagagtaggcaaagattttcaggattcatatacagatagactataaagtcatgtaatttgaaaagcagtgtttcattatgaaagagctctcaagttgcttgcaaagctaatctaattaaaaagatgtataaatgttgttgaaaaaaaaaaaaaaa

SEQ ID NO: 389961 - DNA, 302 bp, Homo Sapiens
tttttttttttgcttaaacttttaagaggatgaaaatatattgtattttcccctatttttactttttcatttgttctttctgttatccaaagattcattcttattatcatttttgatttgaaaaatttcctttattattgttcaccaactatacttcaattaaaattttaaattattttttaaaaataaatagataaaaaagaatttccttaaactgtcattttagaatagatctgctggtcacaaatctcttagttttttgtcatctgagactatccttttttttttttttggctatgatc

SEQ ID NO: 389962 - DNA, 1000 bp, Homo Sapiens; identical to SEQ ID NO: 281172

SEQ ID NO: 389963 - DNA, 1000 bp, Homo Sapiens; identical to SEQ ID NO: 281173

SEQ ID NO: 389964 - DNA, 1000 bp, Homo Sapiens
ggacgctggtgtggttggtggccaatcgtggaaccgcgcatgggagccagccaggggtgctgcgtcctgggacacctggcgcaacaaggcggtggtgcatcccaggcggtccggggagccaatggtgtccatgcaggctgcagaggagatccgcatcctcgcagtgatcactatccaggcgggcgtccgtggctacctggcgcgtcgcaggatccggctgtggcaccggggggccatggtcatccaagctacttggcgcggctaccgtgtgcggcggaacctggcacacctctgcagagccaccacgaccatccagtctgcctggcgcggctacagcacccgccgggaccaagcccggcactggcagatgctccaccccgtcacgtgggtggagctgggcagccgggccggggtcatgtctgaccgaagctggttccaggatggcagagccaggacagtatctgaccatcgctgcttccagtcctgccaggcacacgcttgcagcgtctgccactccctgagctccaggatcgggagcccgcccagcgtggtgatgctagtgggctccagccctcgcacctgtcatacctgtggacgcacacagcccacccgtgtggtgcagggcatgggccagggcactgagggccccggggcagtgtcttgggcctccgcctaccagctggctgccctgagtcccaggcagccgcatcgccaggacaaagcggccacagccatccagtccgcctggaggggctttaagatccgccagcagatgaggcagcagcaaatggcagcgaagatagttcaagccacctggcgaggccaccatacccggagctgtctgaagaacacagaggcgctcttgggaccagcagacccctcggccagctcacggcacatgcattggcctggcatctaggaccctggctccctgcagtggggacttcgtgggaggcactcatggctctctgggtctaatgaataaagtcctccacagcct

SEQ ID NO: 389965 - DNA, 1000 bp, Homo Sapiens
gagcaggctgccaagtgcaggggagggccgggcgcaggccacacagggagctccggtccactgggggcccttcgatcagtggcctcccgcttcgtcctggccgctgtgctgaagagaagccaagtgttgttggtgtttttctctcccaagtgttttcccatttcagttatcagaaggtcatggccgtggggaaagtggtgaagatacccctcgtggcttggggtgcacctgcttgtgcagtcagcatgtagctgcctttccatttcattctctactgggctaaaaattgcagctacaagtgttaccatcttgaagcagtccacttccattcaattttttttttttaattttagaataacagtgtccccataccaaaggaagcctgctagctcatttcatgtataaatttcccatcttcaaacagtttaggtgtatttgttgctctggtcacattctgcataaaagaaatcctcttaagcctatggttaagaaaagccttgaagtttatattcagttaaaatatatgtcggtggagatagccagtgcttctaattttgacttagtttcatacagtaaagcctaaatgtgaaacgcacacgctggaagatattgttcctatcaatattttgctttttataacaagggtttgttcatattgatgccatttttgcaggatttcttcgtgatttctgtccatatgaaaatgctgacattaaacattaacacatggagaccgtgccctgtggccctgccgtggctgccagcatggtctgtgtttccttgtggattcacctgtggccctgctgtggccaccagcatggtctgtgtcctcgtggattcactgcagctgtcggatgcgagtttctgtcataatcatttgtttcctgatacaattgttcttattcttttccaaaactgtaaaataatctcctccctcaaatgcaaaggttgtttttgttctgtttctgttttctttgaaataaaattataacgttaaaag

SEQ ID NO: 389966 - DNA, 1000 bp, Homo Sapiens
agaatagggatatttctgtattatatatttactgtttcatccctcacctttggagtgaccatgaccttggcatgaaggagagaaacctctgctttccgcctattgcttccaggagttactaccttactggccttggagataatgctcttttgtgccaacctgaggataattttaacaaaatgtaaggccagtttcagaggttgttttgccccacagagagactaatcccaatacaagaatattgacaacaaaaggacaaagtagttattgcacaggacggaaaggtgtctttatttcatcccctccccacttccaaagatgcaaaaggcctaattgaatcaagtctcctttccatctggcaggagacattttaataaggactttttaatttcctacatttcttggccaagtgtcataggaatgtggcctcttttgaaatttaaaaatgaagaagaaaaaaagagcaacactaagttaatataatggagcagatacttttaatgttcttaccattgaatatgccatttaagtttgttatacttgaaattatatgatttttgtccagctctctaaattgtcatctccaatagatttagatgcttcaaatagtaaccacattactgtgataggtattattagaaaaaagttatttcttgagttacacctaagaggaagaagtaacatgatggaaagtggttggagatagcacccaattaacatcgacagccaagtcttctatttcagaatattgatttatttcgctttggcttttgatgccatcatgagatttaagtctgcagtttcaaaagctcatgctacttagaagagatgatttttgcagcttaaaaaattgcttgtgactgcagtatgtacacagttaaaaagctgttcactgcccctttcaaccttttcattttgagctttactaagagaatgcttttaggaacagaattcctaaagtgtaattttttatgtataaataaagttttatctatatctg

SEQ ID NO: 389967 - DNA, 1000 bp, Homo Sapiens
ccagttgcctcaccttctgctaccaccgtagggacacagacccttccacatagcagttctggcttcctcgattctgcattggagttggatcacaggattgattttgaactcagagaaggccttgtggagagccgctattggtcagctgtcacgtcgcatactgcctattggtcatccttggatgttgccctttttcttttaaccttcatgtataaacatgagcacgatgatgatgcaaaacccaatttagatccaatctgaactcttgaaggacatgaatggcctaaaactgattttttttttttccgttaaaatgtgtgtgtcaagatacggagatttcagggttaaagtatatttcagttttctttagggcaacatatatttgaatttaaaagcactttatttaaaaaaaaaagaagttttcagttctgaagaagtcatttacagtttgcatcattttaattatgagtctgacaaaaccttctccagagaatcaagcaagacctggatgtgaagaaggtttgggtaaactgcatgtaaaggctacaaatcacaatctgattcctcccaaatataaaggcatatggaacataatgtattaaccaaagtatgttataaatcaaaaatggtcaaggttcagcatattctatatgaagatcacaaggtggtatcgttttagatttctatgaaggctttcatttgtacatccctttgaaaaaatataacagatttaaaatgttttgaatttaacttgtttagaaaaactaatgcttaaaacaatatttgaactactgtatttataatttattacctctaattgctttatttcagtgtatgagacattactgttttaatgtttgctttgaacataatttaagaaccagatttattttctatagtgataaacccttttttctcagaactccatctttgtactcttcagatgaatatatagacactgtggcatacattttttttcattaaaaacttatggcttcat

SEQ ID NO: 389968 - DNA, 1000 bp, Homo Sapiens
ctgagtctcttgaagcctcacgtttccctgggggggtgctgcatcgtcgggtgtccctcaccccacctggggaacctctgtcttcaggtcaccccttttcaggggcctgggttgctcatgtcacaagccacttttaaggcccgtgtcacctgtgtccctgtgtcctcagggcctgtgttacttcgtgccccacttctgcccagaacactgacctgttagctggctccctcctgcacaccccagagcctcctcccagggcagaaagggtggcccatccagggaaccaacgagtacctcacttagtgaccccagcatccaggctggcgtcgcgggtgctgggcgggaggggctctggcctgggtcctcagccctggctggacgcgggcgtcccaaggccacgtggctggccacgaaggtccccgtgccagacagccccagccgcatcccggcctcctccggaggcaccttctcctggtactcggcccagagcctgcgcataaagccactttgccactttgcagccctcatctcatgttctttgtagcggaccgagtgggtttgctataggcctcgtctgactttgtcttgcgtcttttctctgtggactcttgaggacgcctgagccccagccctgcccctgaccagcctcccccttgggtccaggggtctttcggctcatattgcagggcctgccaatgccttcacgcaccccttccccaaaggtgcccggcagggaggcagggcctcccccactcagcgcaggtcaggctaaggccagtcggctggtcactatgcaatgctgccctggggaggctccctgagggcacagtgggcgctggacccggccccccaactctcttgcctgctgcctgtgaccctgaagaacagaattgattcttgcccctctccctgtgtgagcttggccccgcctcttgccccaggcccctgctggcgggtctcaccccccacccctcgctttgaataaagcacttgcgcccac

SEQ ID NO: 389969 - DNA, 1000 bp, Homo Sapiens
ggtggtggggaacagggcacagagatgccatggctcagccctggagctttgagagccttgggttggtttccagccccaccctgcctggtcctgggagcagcccctgttctgtccagcagccagtgaggccctgtgcacctctgagcacataatgaaccctctgatggtggcagctgtaatgacgacatcgtaggcctttcctggcctgtcttcccagttgcctaatggggttgtcttggtaccttctgcctgaaaattcatgaacctgggttggtcaatggctttgaactaaaggtatcaattctgtaggtggtagcttgtggccccacccctcagagtgacctaagaaacgcacataggagatgaaggctccatgctgtgtcagctgtgtcacaggatgcccgccttcacggctctgaagggacctgtaggatcagaagtctgaggctagtaatgaggaggagagccggccccacacaaaacatgaccacaggaaaaaacctatctgtgtaaccactgagccaggtagggtgtgactggccacttaacacccctgagccttcagatcctcagttataaaccaggagtggtagatgaggtggtcactaggtcccctcatggccctagtattctgtgcttctgtaaattttcaccgtgtgccctctagctgtccctggtgacccaacatccagaccaccttttcttccatccgttttcccacctgagacatcgcaaaatgggagttccctccttctggttcttgctgtctgcctccccatttaactctgctagattaattcatactaagatattaatggctgactagtttaataggttttatcccactgaaatttgcatttgtacaaatgtcactgtctgggggctccctacttccgggtgttgctgtctgccccccagtttatctctactagattaattcatactgagctattaatggctgactagtttaatgggcttttattcaagagaaatttgcatt

SEQ ID NO: 389970 - DNA, 1000 bp, Homo Sapiens
atgcaaaatggaataaagttatcttggatggaaagaacagggctaaatctggtcctctggtgtcgagatggaaaactgtggagttgaagaggctctgatgcccagaaaggacaatcaagctggttgactcttccagagaagaagggtaagccctgtatttatcctcccaggccattcttcttcactcctgctgctgtttgcagagagttgccctgattatcaggagaaaagaaccacgagcatccagagagtttacatcctgccttctgtcctctgctccttcagaaagatgaatgcctagacaatgggttcacactgaatgcaggctggaaagaatgcatgctggtggcctaatgccagggctgttgaaacaatttcagatatagcactgtggtctccactttatttctttatatgttttggccgctgcattttgattgcagctaaaagagataacagaaaggagatactggctggctgcttcatattagccctctctgttgtcaacaccttgatgaggccaacccagagatgcttgatcagtcctcagctttgcagggctaggtacagaattttatcacaggattttatcacgctctctggggtgactagatccacaggaaccaaaacgcagtttccaaaagctcgagtgactgaaggatctatacacaaacatggctatttgctagttaacaacaggatatttctctctggccagatcacagacatggttctgagtcagatcttccttggtggcatccctttaaagaggccatcttatgaacaggatcacaagtgagcttagtgagcagagagttagaacaaatctagctaggtgtgtttaaggaatatttccattcagctagtgtagctggattaatttctattctccaaatcaaggatgtctagaaaatgggcattgtggctttcaaatctaagaagaatctcctttgggccagctggatgtacaataaaaatgcttgtttcttggccttccttt

SEQ ID NO: 389971 - DNA, 528 bp, Homo Sapiens; identical to SEQ ID NO: 281175

SEQ ID NO: 389972 - DNA, 766 bp, Homo Sapiens
taatacataggttgcaagcgttaaggcgcccgatgccgacgctcatcagaccccagaaaaggtgttggttgatatagacagcaggacggtggccatggaagtcggaatccgctaaggagtgtgtaacaactcacctgccgaatcaactagccctgtaggttgtttgttaagtgtctggcgttaaattttggggctcaaccccaaaacgcgttggatactggcaggctagagttgtgtagaggttagcggaattccttgtgaagcggtgaaatgcgtagatataaggaagaacaccaagatggcgaaggcagctaactggacatatactgacactgagagacgaaagcgtggggagcaaacaggattagataccctggtagtccacgccctaaacgatgatcattagctgatggggaactcatcggcgcagctaacgcattaaatgatccgcctgctactgagtaaggggcattcctgttacagaccaaggagaactggagaaagaaagagaaaatcagttcgtggttgcattgtggatgcaaatctgagcgttctcaacttggttattgtaaaaaaaggagaaaaagatattcctggactgactgatactacagtgcctcgccgcctgggcccaaaagaagctagcagaatccgcaaacttttcatctctctaagaagatgatgtccgcagtatgttgtaagaaagcccttaataaagaaggtagaaacctagaccaagcacccaattcacgtttgttacttccgt

SEQ ID NO: 389973 - DNA, 1000 bp, Homo Sapiens; identical to SEQ ID NO: 281178

SEQ ID NO: 389974 - DNA, 1000 bp, Homo Sapiens; identical to SEQ ID NO: 281180

SEQ ID NO: 389975 - DNA, 982 bp, Homo Sapiens
gggcccgggaactcctgccacaacagaataaagcagcctgattgaaaagcaaagggtgtgcttctgtcttcctgcagggcgcagtcctcgcctggcgggggccggccaagaagggaagggccttgggagagcaaagtggggtttgccattcgccctctgtcccagggcgctggggcactgggtccacctcggcgggggagaggggctcgcagggagccatccacgggctttcggcgccctccagcggcgtctccggaggagggagagacaccaagacagcgagagagacagagcgcagagagcgagacgcgagagagcgagggtccaagaaggggagatagggagacgcgggcggagagaccgacccgaggcgggggcgcggggcaggggcggcgcgaggacctgacagcgtgtcccgcggcggggcgggggctcggccgcgcgcccgcgggggaggccgccgctagagggcacttcaggagggacagccctcccggcaccccggggcccgagctccagccccggcctcgcggcccgcggcccgcggcccgggcggcccgagccccctccccgggcgcgcggctctccgccttccccgccccggctggcgcgcggcccggcccggccgagcactgtcccggccccgaggggggcagagctcgggcgaaaacccgccctccagcgagctcatttccctaaaaaggggggggggagtcggagggagggagggagggagagaaagaaagagagaaaaagaaggaaagggagagggagacggctggagcccgaggacgagcgcggagccgcggaccgagcggggggcgggagacaggaaggagggaggcgagcagagggaaggggaagaggtcggggagcgagggcgggagcggtcgcggtcgcgatcgagcaagcaagcgggcgagaggacgccctcccctggcctccagtgcgccgcttccctcgccgccgccccgccagcatg

SEQ ID NO: 389976 - DNA, 916 bp, Homo Sapiens
aggcagaggaccctgcggccttccgcagtgtttgtgtccctgattacttgagattagggattggtgatgactcttaacgagcatgctgccttcaagcatctgtttaacaaagcacatcttgcaccgcccttaatccatttaaccctgagtggacacagcacatgtttcagagagcacagggttgggggtaaggtcacagatcaacaggatcccaaggcagaggaatttttcttagtgcagaacaaaatgaaaagtctcccatgtctacttctttctacacagacacggcaaccatccgatttctcaatcttttccccacctttcctgcctttctattccacaaagccgccattgtcatcctggcccattctcaatgagctgttgggcacacctcccagacggggtggtggccgggcagaggggctcctcacttcccagtaggggcggccgggcagaggcgcccctcacctcccggacggggcggctggccgggcgggggggctgaccccccccccaccggtcaggttagtctcgaactcctgacctcatgatctgctcacctaggcctcccaaagtgctgggattataggcatgagccactgcgccaggccaattttttttatatcactcttacacctgcaactttgctgaatttgtttacttgttctgacggttttgtggattccttagaatttcctacatacaagatcatgtcatatgcaaatacatatggttttatttcttcctttctaatttgtgtggcttttatttctttttcttgctaatttcctggctagaaatttaagtataatgttgaatagaggtggcaagagtgaatatccttgtcttcttcctgatcttaggagaaaaacttatagtctttcatcattaagtattacctgtggggctggatgcg

SEQ ID NO: 389977 - DNA, 1000 bp, Homo Sapiens
tgagccaccaagcccagcaggctggcctgtcttttaaaaccccaactcacttatttcaaaccaaaacaacccataaatgtgtttattcatttgatgtcttcagatttgagtagtctgtacaacttgaactctacaactttcccagttgagccccaaaataaactgcatttggccaaagaatctgtgttcaacaggaaccattgcaaaaacaattgccccaaatgtgtgatctgattctgactgtagtttacaccattttccacctcagtatatctgcatatcacctactttcataagtggttaattttactgtgctgcaattgctaagagatagattctccaattaatatacatcataatgactccacacatccatttgaacaactgaaataaaaatattctcacttgcaggattcttggaactgagcctactcccctggaaagcacagccaaatctggtatcattctatccagccttatcctggttccaaatgatttggcacagtctcccttcagggactccttagctgaaagtctccttttgatttagtcatcttagctcagaaggagagaggtgctagtattcagagtaatagcaataataactgaaaaaatgagtgcctcactcatgggctttgctatccagtaaggctgaacttcggtcaaaattagctttcaaaggatcaaggaaccactctgaccagactctgaagtcatctgggatactttctcctttcctatcctaaaaaatggcagggtcacaaataaatttacagtattctctgggagatgcaaactgctgtaggaaaaggcaaacatgagtttaaagacacaggtcctagatccacctataccactaacaagctgagtgaacctaagtgtcttcacttcactggctctcagttttcctgactgtattgtgagggatttggatctctatgggccctttcagcccccagaatctattaccctgctttctactatttgtctcagtatctct

SEQ ID NO: 389978 - DNA, 1000 bp, Homo Sapiens; identical to SEQ ID NO: 281181

SEQ ID NO: 389979 - DNA, 580 bp, Homo Sapiens
gcggccgctgatccgctccgcgaagatctgagtacaggccagccagggtgggtttaaatagcctcgggcgcagctagcagcggaaagggcggagcttcactcctcctttccatcagtcacccccaactttccgaggctacacctcgtaggaaactgttctcctgctttgatttcatgcgccacctttgggacaatctaagaacttacaggttttcttggccagatttattaggaattgtatgcactgaaacactgaaaaccaactagtggttctgtgcttcccacgttgtggttttgacaccagcagcatccttgccacaatcaaaccccggagatccgcagatctgtgttgtaacaagacctccccctgaccctgaagcgtggcagttgaagaagtctttccgtgtaagcgaaaagactttgaagaaaaggtggagatatgcgttgtataaacattcttttgctctggaaccacgtagagacttgggagccagttgggtggagcattcgttggatgagggtgctcgggttaggaatatcaaggtgtggctccagataatccaatcatctaattaagatt

SEQ ID NO: 389980 - DNA, 1000 bp, Homo Sapiens; identical to SEQ ID NO: 281183

SEQ ID NO: 389981 - DNA, 1000 bp, Homo Sapiens
aacacataggaaagttgactggttgctcataaggaatctcgtatatcagtgaggcctctgttacatacttgcaatgatttctctggtagtaacaatggagatcaagaaggaaatattctttgaattgccttttttatccaaagaaatgtaaaagtaaatcggacactactattttcccctggtggggggcctcaacacgaggtatttattactatgagacttcactgctgcatcagttagtagcttcttaatggccaagtcaaaggaaaccaaagaaagtgttctatgccagcttgccattacacagagtgagaagaaatgctgctttgctgtcaattctgttttattggcccacttggacaagagggaaagcccccaacatttcttctttcttatctgcttctaaaggcaagaatagggcttttgacttgctccaggggatattttttcctctctaactgaaattcaagtgaaagagtcttttttttgtttttttgtctttgtttggtgtttttgtaaacctctcccctatgttcctagcattgaaatgtaagctgctttttctggctgcatgtagcaggagcaggctgtcgtcatagcaatgaaagggtgtagagagactcctgcttcatgacctgctctgggaaataactcttagtctgctttaaaatccttctttagaaatgaagtctccagtcctggcttgtttccttcctattacacaaccaacttatgtacacccattgcagtagctaaatgtttcctttaaagatttagtgaataggtattttaaaaatcaacaagagagctgctaaaacagtggctagtttactgtggcatacaggggaaaaacaactgggaaggcaaagaaagagaaatagaaatggcctcacatgatacacatactgcagcaaaccctgcaataaatccatttttcaagttcccactgcttcctcccatcttcacgatgtgctatggtgtagggttatagaggggaatt

SEQ ID NO: 389982 - DNA, 1000 bp, Homo Sapiens; identical to SEQ ID NO: 281185

SEQ ID NO: 389983 - DNA, 1000 bp, Homo Sapiens
ggaagatgggcgcaccctgtctgactacaacatccagaaagagtctaccctgcacctggtgctccgtctcagaggtgggatgcagatcttcgtgaagaccctgactggtaagaccatcaccctcgaagtggagccgagtgacaccattgagaatgtcaaggcaaagatccaagacaaggagggcattcctcctgaccagcagaggttgatctttgccggaaaacagctggaagatggtcgtaccctgtctgactacaacatccagaaagagtccaccttgcacctggtgctccgtctcagaggtgggatgcagatcttcgtgaagaccctgactggtaagacgatcactctcgagggggagccgagtgacaccattgagaatgtcaaggcaaagatccaagacaaggaaggcatccctcctgatcagcagaggttgatctttgctgggaaacagctggaagatggacgcaccctgtctgactacaacatccagaaagagtccaccctgcacctggtgctccgtcttagaggtgggatgcagatcttcgtgaagaccctgactggtaagaccatcactctcgaagtggagccgagtgacaccattgagaatgtcaaggcaaagatccaagacaaggaaggcatccctcctgaccagcagaggttgatctttgctgggaaacagctggaagatggacgcaccctgtctgactacaacatccagaaagagtccaccctgcacctggtgctccgtcttagaggtgggatgcagatcttcgtgaagaccctgactggtaagaccatcactctcgaagtggagccgagtgacaccattgagaatgtcaaggcaaagatccaagacaaggaaggcatccctcctgaccagcagaggttgatctttgctgggaaacagctggaagatggacgcaccctgtctgactacaacatccagaaagagtccaccctgcacctggtgctccgtctcagaggtgggatgcagatc

SEQ ID NO: 389984 - DNA, 1000 bp, Homo Sapiens; identical to SEQ ID NO: 281186

SEQ ID NO: 389985 - DNA, 1000 bp, Homo Sapiens
ggctctgcacccccgtgccatggagcccagcttggcaacctccagggccctcccctcccttccccagatggggcttaaatgaggccagggacccaggaccagcctcagcggaggggcctggactgcattcaccgccccttccccggggctgcaggcacagaacagcactgggcccatggtgccatctcccctgcccgtgactctgccaccaagtccacgaagcagcacccagccggccccagacccggctccacgcccccctccgcccccagtgcacctgccgccgccatacccgctgaaggaggtggaagtccccgtagtggaaaaccacctttgcaacgcggaatatcacaccggcctccatacgggccacagctttcaaatcgtccgcgatgacatgctgtgtgcggggagcgaaaatcacgactcctgccaggtgggccctcgcgtcccccaccccaatccccggagcctggccagcgagcgcatccctcatcctgacccccgaagcctggccagcgagcactgacctctgaccttcccagggtgactctggagggcccctggtctgcaaggtgaatggcacctaactgcaggcgggcgtggtcagctgggaggagagctgtgcccagcccaaccggcctggcatctacacccgtgtcacctactacttggactggatccaccactatgtccccaagaagccctgagccaggcctggggtgtccacccgggtcactggagggccagcccctcctgtccaaaccaccactgcttcctacccaggtggtgactgccccccacaccttcccccatcctgagtcccctctcccatcctgagccctgtcccctgtcctgagccccctcccctttcttgatcccctcccccatcctgagccccctcccccaccctgagccccctcccctgtcttgagcccctgctccatcctgagtcccctcccccacactgagccccctcccctttcttgagcccctcatc

SEQ ID NO: 389986 - DNA, 1000 bp, Homo Sapiens; identical to SEQ ID NO: 281187

SEQ ID NO: 389987 - DNA, 1000 bp, Homo Sapiens
gaatgttggttccttgttccaggaattcaacattaatttccaaaagtatcatgggacttgtgacaatacaagacatgaatctatgtataaaatttatcggcctttctcatttacctgctctagtattattgtattgtgtgtgcgtgcgtgtgtgatgtcaggctgccacgtaaaacttcagagaaaaatcttaaaagcagaccatccttttttgcatgctctattctaagtagaatgttcaatgtaactgactaaaattgcatgttaaagatatttaggtttttttgttttctttatttttatttgttttcagtttcctgtatatttgcttactgtgccgttttagtggttttaggataaaaatgcactggtgaagcaaatgtagtgccaacagaaggtgattttccagttgtaaatgtcatgcagcatttgaagggactgtgttttcttaaaaaaaaatcacagttacttctaaaccagatttcatttcttttattgttttatgtgccaaaccacgaagtgcattgggcttcaatctctgaacactgtagacccattagaagactgttccgattgttacaaattgtagtgcctgaaaacactcttaagctgattgtcttaacaaaatgaaagttctccaaagacaaaacagaacaattattataacaaaataattatggttgaaatgtctgtggttccttggaaatgctgcgctctttgtgtttttccatcattagtgcagttggaatgaatgtgtataggtcagaggtcttcgtgttcacattttaaaattaggtaaatgacctcatctttcaagcttgaattcatttttaattttaattttattttatacaatgtgtagacagttccctgttctctgcatttagaagtatacacaatataaatctgttaattctgtaagtaatttttataattatgatgtaactctatcttatccttaaaacatttaaaataaaccctttatgtgcaaaaaaaaaaa

SEQ ID NO: 389988 - DNA, 848 bp, Homo Sapiens
gggtccgtgggtctgtcctctgtggggtggggggcaggtcttcaaggtctgggctcagcgccctgactcgtgccctgtctccaccaggttttctgggtagggcccatcgtgggggcggtcctggctgccatcctttacttctacctgctcttccccaactccctgagcctgagtgagcgtgtggccatcatcaaaggcacgtatgagcctgacgaggactgggaggagcagcgggaagagcggaagaagaccatggagctgaccacccgctgaccagtgtcaggcaggggccagcccctcagcccctgagccaagggggaaaagaagaaaaagatcctaacacaagcttcctttttgcacaaccggtcctcttggctgaggaggaggagctggtcaccctggctgcacagttagagaggggagaaggaacccatgatgggactcctggggtaggggccaggggctggggtctgctggggacaggtctctctgggacagacctcagagattctcaatgcagtgccaagctcacaggctgcaagggccaggccagaaaagggtgggcctgcagcctgcaccccccaccttccccaacccttcctcaagagctgaagggatcccagaccctaggtgggcagaggcagaccctccccagagctccttaggaagaagacagactggttcattgaatgccgccttatttatttctggtgaggatgcatgcgtggggctgctggtctttagagtgggggctacccaataaatcactgatactcacattccgcctctgtctctcctcagagtgccttgagacactctgccccattgcctctcctctttgtcatccc

SEQ ID NO: 389989 - DNA, 1000 bp, Homo Sapiens
ttaaggataataaaaaactttaacatatttgaactcctcactgaatacctcactccctgccttatctaactgtcttcatttttttggttaggaaatttaatactacgttgtttatgtaagacatggttttctgatgaccccagtatttaattacatttgacagtattatttgctcaccacaagttttgttctgttttgttttattatttctttaaaaatctactcatttctctacattattattgctaaaattcatcccttaaatattatttttgtgatgatctgtgaaacatgaacacttttattctttgtctagatgccttaattcccgttgtctcagatgtgatttaggctgggcatagattataggttgccagttctgtgctcagcatcatttttgatatattgtagttaataagaagtgttttgcaaacttaattttcatattttgagagatgataatatacattatttataatttttaaacaatggtgaagtttctctatagtatgtacttgtatccagtgccatactattcttctacacagaatgatctattgaaaatgcaatatagtgagttacattatgatattgcttaaaatcctgcaccacccccatatctacaggataaaattcaaatttatcaggaaagccgcaatggttcatgccaatccctatagccttatctctgaccattgtagacctcacactttatgtgccagacacataaaaatacttctcattcactgaacatactatgctgtttttaggttctgagtgtttatttattctgttctctctactaaaagtatcttccttctcattctcaattttatttttaactaataaattttccttaatatttaagcctttattgaaaccttatcttttccaagaagcttgacctaactcctccagtatgaggtaactgtgtttcttgctgtgctcccaaaatactgccatttatgtgaatgactctcccaatggatgcctcgagctc

SEQ ID NO: 389990 - DNA, 1000 bp, Homo Sapiens
agagtgcgtattcggtccacggctacagggaggctcacgaagtgtcctctcgtggcgctggcatctcttcccaccacgtcactgcacgacacaacacttgtgcacatgggcatgaggtttacctgccccgggcatgattcggaaggccaggaacacgggcttgtggtctcccatgcagacgttgggcccaatgtggtcataggtgacaaccttctcctcgctctccgaccgcagcaccagctccttggcagacggggacatgaggatgcggtcacaccaggctgggcaccgggtgttcatgtactgctcaccctggcgggcgtcctcactgtacgggtagctgggagggaacgagatgtccagttcatacagtctgtccttaaagacagacaactccttgtcaaactccaagagcgcggtgccgttgttgtctcggaaaacctcctggttgaagtagtcgaagagtttcttttctaactggagcataaccttccggtcgttgtccgactcacgaaatatgagcttcaccacttcattggtgtcggcggcccggaccgtctgcatcggtggttttgctgagagcgtctccacgacagacttggaatccagccggaagttgaaatcaccaaatacaaagtaggaaaccttctcgaatcgctgatcaatgattctgtccagcacgtagcccagtgccttgtgccggattcccgagtacacggaagggcttgtttcccaggcgaccagattggaagcatcatggaaaagatggatattcaccaagtcaaaggcacagtctgcaatcaccacctcgtccggatgaagccttttcttgaccatttgcactcggggaagtagtctgcgaaacttctccttctccagcatgggcgtgctctctaaggtatccgagtagatctctttgccagcgacctttctatacttcttagctttaaagtcaaactggtagatgttttttaaggactcatgaagaaaataaaagctt
